United States Patent Application Publication US 2011/0191912 A1 - sequence listing, part 12

SEQ ID NO: 14136 - DNA, 3000 bp, Unknown
  misc_feature (1)..( 3000): cDNA_ID_3100679_gDNA_ID_2214702_Annot_ID_136889 3000 nt of promoter + ATG
atactcatctgcaaaattcaactctctctctcacatgaaagatggaacaagaagagaagaagaggaagtaaaagtaaccattggaagagatataaaggagccccaaacaaaagtggggaaggatcttaggtgcttaagttgttggaccactaaaatttcactcctaaggtataaaaattattagcatgttgtgtaaaaaagagtacgaacaagctttagtgctctattattttgtatatgcatacatgcatacatatgtatccttaaaacctgacgaggacccagctctattttgtagttttaagttaatgtcgatgctatgacaccaccccggtttattttgtggttgatcatgttaatgccgatgctatttcaccatgcgggttcaaatatgcatgttgtttgacaagaaaatattgagagagagaaactgagaaacactgtgaacattttgtcgcgagattagtggaaaatacatgtgaagaatatgtgctaatgtagtgattggaaaagcaagactgaacagtaaatttacattgtgtaatgttttatttttgtggtaacaagaagttgagattcgaactaaaaaacagaccaaacataccacattgcgtttttatgaatcattcgctttttttttttggtagttaaagtttctgtatcaaaaaagaataacatatttaaaagatcattcgtagtgtactattttatttttctcttatgttgttggtttaatcatggagtgactcaataatttatccaactgtaggtttgtaaaaacgttattactgaggaatatgtccactaatttgcacataaatgtgtcgtaaggtttatatttagtttcaaaaagaagtgtttacgattttatagtatagggccaccactaaattaatttgacaatttaatttcttgtttggtgtagatgataaggtcaatcaaattagctatcggggccacgaagccaaaagtggatatacaagaatggtccaaacttgaattatgtattcatttttcaattggtattatgtaaaacaaagatattagcataattaaatggtaaaaacagcaaacacaactctgttattcgagatattttcttttcgatcttgtactcaggtctcagggtacactaaagactacacatatctcgaagacactctgagactagaagcaacaaaagaaaaaaagagaggctattcttaacgtgcaaggaggtttgtggttcgtgagatttgaagatcatctctaacttaaagttcacacctaaaaccaagaaaagaaaaaaaaaaaacttgttcacaccataaaaccatgcacatatactaggttatgtcatcagctagattcatgcacatcagcacatccacatatataaataatgaggagcgtcgtcaaatattgatgccaatgctaatcaaatgttaaatgattttgccgtgttatgtcatcagctagatccatgcacatccacatatataaaatatagaaggaaatggtacagcgctatgcaaacgttttgctctatatctcttagaggtaagggacaaatctattttttgtcaccccctccttttgactatttacgaaacaaaatcaccagtttactatctccactatttagctctatttgtgtttacatcaatcgatctagtttgccctaacttattttcatagagccacttgaacgaaaatctttgttgccgaggcaggcataacataaaattgagttccacgacacttgaaataaacagaatcgaatcaatatcttgaacccaatttataaaaggaatattgttatgcacttatggtttattttctacttcttttaagttgaaataatatcttaagaaaaaatggacaaaaataaataacgtcaagattgggcagtagagtcgtcagctgtcatgacactacttatcattattgtactgcctgtcaattttttgattgtatcttttattcagcagcatcacattctccttcagtgtccttctcttcttttctttttcttttctttttctttcctcattaaacccatacaattctacggtaaatattatggatttgcatacaaactctctaattgtttgtttgggtactataatatggggtccctataatatgtgtagcttaactttaagatagaactaagtcaacaagatccggagacaccatgtcaaagttctatgttcttatgattagatgaacaaagttatgatttattcaagattatcacgattcgaactagttctaaacttgtaaacgtaaaataataaataacgtttgcaactacaacactgaacataaattaatgaagtttgcttgatgtgttggttaaaatttggaatgggacaataaaaagaagaagagaactgagagaagtggtgggggaagtgggaaccttaacttccccacgtgacactaacgagcaacgttaattgaatagtagtaggccctttttgtagtacactcttttatatatggtcaccttttaattagtttgcaaatcacatacttttaaaatcataaaagcaattaacgttgctcgttggtgtcatatgcgattgtagttagtataatcgatcttaattaaaacaaagtccatattaaaaatgaccaaagtatgtaaaaataaaatgttgaattagcatatggtcactgatcttttctattttaagatttagtaaacctaagatgtatccgcaagcctatagggtttgatgtggattactactagttacttttgtatgggcttgaagaaacttcattgggccacaaagagggaggagtgagcgaagagcccaaattcaaacaaaaggatatgagggttcaaatgttattataaaatatattgtggccaatttgtaaagaaacttgataattactttaaaagccccaacacaattatctttacagtttttacgatctggtgctggataagccttttgcttcattctcacttccttcctcatccaaaaaagctcctccatttcaatg

SEQ ID NO: 14137 - DNA, 3000 bp, Unknown
  misc_feature (1)..( 3000): cDNA_ID_2994331_gDNA_ID_2214702_Annot_ID_136890 3000 nt of promoter + ATG
gccattgaaatggaggagcttttttggatgaggaaggaagtgagaatgaagcaaaaggcttatccagcaccagatcgtaaaaactgtaaagataattgtgttggggcttttaaagtaattatcaagtttctttacaaattggccacaatatattttataataacatttgaaccctcatatccttttgtttgaatttgggctcttcgctcactcctccctctttgtggcccaatgaagtttcttcaagcccatacaaaagtaactagtagtaatccacatcaaaccctataggcttgcggatacatcttaggtttactaaatcttaaaatagaaaagatcagtgaccatatgctaattcaacattttatttttacatactttggtcatttttaatatggactttgttttaattaagatcgattatactaactacaatcgcatatgacaccaacgagcaacgttaattgcttttatgattttaaaagtatgtgatttgcaaactaattaaaaggtgaccatatataaaagagtgtactacaaaaagggcctactactattcaattaacgttgctcgttagtgtcacgtggggaagttaaggttcccacttcccccaccacttctctcagttctcttcttctttttattgtcccattccaaattttaaccaacacatcaagcaaacttcattaatttatgttcagtgttgtagttgcaaacgttatttattattttacgtttacaagtttagaactagttcgaatcgtgataatcttgaataaatcataactttgttcatctaatcataagaacatagaactttgacatggtgtctccggatcttgttgacttagttctatcttaaagttaagctacacatattatagggaccccatattatagtacccaaacaaacaattagagagtttgtatgcaaatccataatatttaccgtagaattgtatgggtttaatgaggaaagaaaaagaaaagaaaaagaaaagaagagaaggacactgaaggagaatgtgatgctgctgaataaaagatacaatcaaaaaattgacaggcagtacaataatgataagtagtgtcatgacagctgacgactctactgcccaatcttgacgttatttatttttgtccattttttcttaagatattatttcaacttaaaagaagtagaaaataaaccataagtgcataacaatattccttttataaattgggttcaagatattgattcgattctgtttatttcaagtgtcgtggaactcaattttatgttatgcctgcctcggcaacaaagattttcgttcaagtggctctatgaaaataagttagggcaaactagatcgattgatgtaaacacaaatagagctaaatagtggagatagtaaactggtgattttgtttcgtaaatagtcaaaaggagggggtgacaaaaaatagatttgtcccttacctctaagagatatagagcaaaacgtttgcatagcgctgtaccatttccttctatattttatatatgtggatgtgcatggatctagctgatgacataacacggcaaaatcatttaacatttgattagcattggcatcaatatttgacgacgctcctcattatttatatatgtggatgtgctgatgtgcatgaatctagctgatgacataacctagtatatgtgcatggttttatggtgtgaacaagttttttttttttcttttcttggttttaggtgtgaactttaagttagagatgatcttcaaatctcacgaaccacaaacctccttgcacgttaagaatagcctctctttttttcttttgttgcttctagtctcagagtgtcttcgagatatgtgtagtctttagtgtaccctgagacctgagtacaagatcgaaaagaaaatatctcgaataacagagttgtgtttgctgtttttaccatttaattatgctaatatctttgttttacataataccaattgaaaaatgaatacataattcaagtttggaccattcttgtatatccacttttggcttcgtggccccgatagctaatttgattgaccttatcatctacaccaaacaagaaattaaattgtcaaattaatttagtggtggccctatactataaaatcgtaaacacttctttttgaaactaaatataaaccttacgacacatttatgtgcaaattagtggacatattcctcagtaataacgtttttacaaacctacagttggataaattattgagtcactccatgattaaaccaacaacataagagaaaaataaaatagtacactacgaatgatcttttaaatatgttattcttttttgatacagaaactttaactaccaaaaaaaaaaagcgaatgattcataaaaacgcaatgtggtatgtttggtctgttttttagttcgaatctcaacttcttgttaccacaaaaataaaacattacacaatgtaaatttactgttcagtcttgcttttccaatcactacattagcacatattcttcacatgtattttccactaatctcgcgacaaaatgttcacagtgtttctcagtttctctctctcaatattttcttgtcaaacaacatgcatatttgaacccgcatggtgaaatagcatcggcattaacatgatcaaccacaaaataaaccggggtggtgtcatagcatcgacattaacttaaaactacaaaatagagctgggtcctcgtcaggttttaaggatacatatgtatgcatgtatgcatatacaaaataatagagcactaaagcttgttcgtactcttttttacacaacatgctaataatttttataccttaggagtgaaattttagtggtccaacaacttaagcacctaagatccttccccacttttgtttggggctcctttatatctcttccaatggttacttttacttcctcttcttctcttcttgttccatctttcatgtgagagagagagttgaattttgcagatgagt

SEQ ID NO: 14138 - DNA, 3000 bp, Unknown
  misc_feature (1)..( 3000): cDNA_ID_3593822_gDNA_ID_2214702_Annot_ID_189721 3000 nt of promoter + ATG
atgaataaaaaaacgaaagcgaagcattgaatgaaagtggggctaagttctactgcaaagagagtgagagagagagaaaaaagtagaagaagaagaagtaagtgaacagtgtctgaaacgggtaaaaagaagaccaaagaagagcaaagagagtgtgaagaatacgcgcaatgggaagagcgtgaggctcgagagactttccaaaagaagataggaaacagatgtcggggcattaaccaattgggtatttggatttgtaacccgttttgtccgggtcctgccccaatctctaaaccacttttgttgttgttgttgttgttgttgttgttgttgtgcctctctcttctatagctgtatctatctacatctacactgtctcgcgtgttcatcaaaatttaataagcaaaaacatatttcttttttatttatagagaaaaaaaaaatttgaaagaaagaaagaaaaaagtcccccctgatcctcgggttctttgtaatttatgacactcccaatttaagaccttcttctcactttttctctatttgtccttttttttgcagattctttttatcttacatttctacccttgcatgtttcttgtatttacttgtactttcattgttctcttgtttgctacattgtgcttgttgttgagatgagattcattctcacaacaatcggcaatgaaagaaaatgttgggtacttttcatgtttgctttggtttgtgtttaactctctatacatatgtacaacaatgttttgtaggaaaaagagaagatattcaaattgtggtttgatagtaagtattattagtaaaagaagttgattagtatttttagatttaaaacggtataagaatatcacttagcagagacaatagataagatatttgcatgtttgatatatgaagctaaaaagtaaaagaaaagaaaaacatttcaaatctctcgtttactttgatgccgttggaaaaatcaacgtacactgcacttaaattcaatatgttacataaatagtcttatttatgaaaagattaaatttattatcaagagatttaatgtacacaaaccatagttatatacaataaaaaacatttccgaactttattagtatgtgggaaaaaaataaacttatgagttgcgaaatatctaacacaactcaaggataaacattgtaatttctttcatatagcatcatcactagttcaagtgtaaatcgatctaattttgcatagaactgaaaggagtgaacaatgtactaggtaaagaagaacaatgtttttgtttgcatgtgtattaagctctaatttaattcaaagtgtgatatactgatatgattaggctagttcctcatctgggtagacataattataagaattttcgaaacctcatcttaccaaaaacatatataatctctaccatttgtttctctcaatatgccctaccattaatggaccctactttgtacttatgcaataattcttcctgtttttacaatagccattaggtaggtttctttagaaattcggatgacttgtgtatccatcaatttattcgccgttgataacaggttcatgcacaaatttcttaagattgtttcttcttgccttaactttatttttttatcaaaaaaaattagatctagctcacaaatcaaatttgtcacaagatacgaagttatttgtttcaaatttagtcctcgttagtcatttaatgtggttttgttattttgaatcgtttggttagaggaaaataaaatgttatttcaaatcaaatccaaatttggacacattggcaacaaaatgtgttaactttcacttgatgatggtatcaagtcattccaaccattggtttaaaaatgatgacaaatttagtaagcaaatgtgtttcttcttcataaaaaaatacaacaagaagtgaggaagaaacaatgtggtcgactatgattaatgtgatctattgggaacaatgtgattaggcgatgatgaataggtcgtattaaatcgtttactaaaatgatagatcaataacattagcacaaaccaatatatatatatatactaatgcatgatcttctaaaatatttttaaaatccatctaactagttccgaattcgaataacagcaataaacactgattatttatcacaaaggtgtaattttaatcagaaaaatatacaacccttttcaccatatactaaactactgaaaatcaaaggcatgaaagaaaactatcccccaatgtactttagaatataacggtagtccaaatcttcgccacaaaacacaaaaccacatgaactagtcatataataatggataaatgatttaaactatttcactaataatgtgcatcaatccctaaaagtatgccaccagtattcttttatttctcccacaataatatcaataaaaatgattcaaagacaaagagacaacagagacgaaattattcttttgtagatcttattatatataaatgattaactaaaaaccatatacttgtaacaataattattatatcagtactaaaatccaatagtatcaacattgcaaagaaactgttgtgtaaaagataataataatataaagagaaagcaaagaaatcaatctatttcaaaaatctaatcccatctaatgtctctctctccacgcacaaaaggtctaaaagccacaccacacacatcagtcaccagacgtagcagagagcctcactgttgcagagagcactcagtactgttctgtttctctgatacctctctctctcctctctcttttaacattgtccaaattaaaaatctaaactttttttctagttttttttttttctttaatagaaaagttttttttctccacggcttaaagactcactcatcactgtgctactactctctcttcttttggctgagagggtaaaagtcatgaagaaactcctctgagttttttttctttctttcttataataaagctcttatctttatctctgtttctctctctttaatg

SEQ ID NO: 14139 - DNA, 3000 bp, Unknown
  misc_feature (1)..( 3000): cDNA_ID_3021936_gDNA_ID_2214702_Annot_ID_189716 3000 nt of promoter + ATG
gataggaatggagttccaaagaatttaggtgctacgtactaaatctataactgagtaaaagaaggatgacataatgtacaggaatctcatcagtttgagctcatgccacaccaagtgacatttggtttgataactcagggtttaccatacttttcgacatacccctgcaaatgaacataagaattgttagcttatgcaatacttactacttaggtttttacctgctttaagtgtcttttatttccagctaagaaactcacctcgacaagtttcacaattctggttccagacaaaccaagatattgatcaactgattctgtgtcagttggcacctgatgaaactggacagcggcgccgactaccttttctgcagcttttttaactatcatgttatgcacgtctttagttagacgaccctcacgccacaacggtttcaacatttctttaatggtttccacaactgcagtccggaatagtctcattactttcattcctgcatctgacctcacttcaccatctatctcatctgatttctttgtctttttatatgaagacccatcacttctatgccaagaatcatgccctgcaggtttgattcttttcaaaacaactctattctctgcagccgtagccgaagaaatctctttgctaggcgttgctgtatcattttgatcaaccactgacgtagccaccccttccactactccatgtgcttccaaactccttgccacggtttcttggtgttgattttgactgcatgaactgcttttatcatcattcttgcaatcccgtgcttggggaccactagcagaatcaccatctttctgctggcaggaacttttccgtgcatgttctcctttacttgacaatgaatcattaagaggtctgtctcctagattctctatatccgtgaaaggatcgtagagggcatcagacgagggaagaatataaggtggaattgtaaaagatgctttaaaaggttcagaaggttcccagtcatctgaagaaactttctttttagtgctagtagtgttggcttctgcgcctttatcagaagaaacagctaccccttgcagcgttggaagtgatccggatccagataaactattcccattttcaaaatcccccaccgtagaagcacgatcattcataggaacagaactggataatgatcctgtccaggctggtccagcagatcccatgtctgtttttaaataggaactgatagaaggtctatgctcatgaacaaagctgcttctcaatgcgaaggaattggcgttattaataactagagacctgttgtcagtgaaatcagcaccatacgtttgcttcaaactctctcttctaatgttttcaaatgaaggcataaagcgcatctcgttattgaacgggaaaactctctgagaacctgggggattcacaaaagacatggaggagaaaactctctgaggattcatgaaagatatatcctctctggtaggcaacgatgtcacaccgttttcgcttaactgggaaactcttacaccttctctgctgtccaaaattcttctttctgaatagacataagcaaaataaattattggttgattcagaaagagtaattaaaccccatagatattcaccggcctctatattgttggaactacctccacatagaatcacaagaataagtattcatggtacaacgtacctagatcagaccggataccaccgtttccagccatactattttccgccagttgttgactagtgcaatttgaattctctttcacatgtagaaacttgcaggacaccccattgaaacaccaccctttagcaaaaaatttgcagggaagagctgcacgtttttgttctggttcattcccaccaccgccagtgaaaaagcttcttggcggtatacccggagcaggaaatctgataaccgaatttgtcagtataaaagcttcaacctcttaacttagtttcagcaaaacttaagcagaaacttttttgccataccttggtaaagtaccattatcttgagcaaaagcttgctcctttatgatttttgattgctcatctaaaggtgttgttacagaatgcctcttcacatctacatgagacaagtttaatcagtacatattagcaaaactgctgttttgaataaacaaaagagattccttacagaaacaagcacaaaactctgagaattgaatttgcttacttggtattaaagccacaatttttacaaaagagcttcagtgaaaatctaattgccaagtctttgaacctctaatcagagctaaatctagtcaatttaacaattctctctttcttctagaacaaaattcatcaattccaaattggaaaaggtgtttccatcaataaaaacacgaacttgacagaattaatcaacaataccatgtaaccaatcacgaatttcaaatactaaccgttgtgggaattggaagcttgaattggtggtttatcaaacaattcagattctcttacaattgtatgtacttgcaccttttgttcgacctcatcatcatcaatgtccatgtcggaatcagacatcttgaagtcttcggcgaggtaaccaacgcagagagtggtaaattgataaaaaaaaatactgcggcgtgatcggggtccgaagctcgctgttgagtcctgatgatctccgagaatacgtttggtatatcgaaaccaccattgttacaaagaccaccgaactattttatatctaatgggcctttcctaaataattaaagctttagtattaaggcccatactaaattccaaattttaccaactatttcctaaattaacacatcgttgcctttttatagtaaccggattaaaccaaaacaaaattaaagagaatcgaatcaaaccgtgaaaatcgtgaagcgtagtggtgctatattgcacgttaactgtctccatcactgccactggtaaaccctaagaatcctccgcaatttcgcaattttgtgaaggagccgccggctaaatttg

SEQ ID NO: 14140 - DNA, 3000 bp, Unknown
  misc_feature (1)..( 3000): cDNA_ID_3021940_gDNA_ID_2214702_Annot_ID_189715 3000 nt of promoter + ATG
ccaaaaaatacattttagtagcatatatcgacaagatttaaaaacaattttacatattttttatacggatataaaattccttatttgattaaccacaacattggtaaactatctgtagtagcatctgatatacccaaataaacaaaatccaggagttttacagtgtgtttttggtaataataagtttcataaagtgagagaaagctttcaatgacacattctggctctctaattttatctggtgactctgtaagcctacacaatacaaaaccaaagccgtgtgagaaattctcaagtagtataattaacataaccggaaacatatatatgtttttgttaccttgatctgtttgagtagattcttcgcgcgtgcgtctgttttgaaatgatcacgaacaggctgccatattggtaaaggacgttaattatttgttgttgaatacaaaacttattcaaaggttttctgaataattgtgtcagtcttttttctaataccatcattaaggactcgtaaagctctaacataaaggaagttttaacttacttgcaaaatcttattcaacgcgttcatcaggcctttctttagatcgccagggtgcaactcgccgctctcatagtcagcagcaatgtcttcaaagcttttgtaggtcctaatatttggaagaaaattccacagctcaatgacttatgtaataggattatagcaatccaaattggatttttcatgcagaaaccaagcaaataaaggttttagaaaagaacaaaaaggggtaaaactcacttgttaccgccatattcttcatttctctcaactgtgaactcatcaaaccatggtagaatgatgtatttgatgtattcgaggcatggattgcccttcacgacttttggagggcagtaagctttcttgatcttcacattaacttcagcctgaggacatccagacattcaaaacaagtcaacaactgtgataactcttatctacttttgtaaacttagaattttggctaagttatagttacctcttcatcttccataaagatagcagataatggatcacttttggacatcttttcttgtccttgttggagaccaggaagcatatctgcaagtagttaacaatgataaatgattaacaacacgctagaccagttaaaacgtggtataacagaagtcaaataggaaaatgcagagcatacggtgtgacaagattatcggtttgtttttcctctttatgtcatcacagtattctctcgctagcacatttacttttctttgatccatcccaagctggcaaatatcagcctacatatgtaacgaaaatggtttaacagtagtcacagaactcatcagccagatacacaaaatgtaacattacattgataaaatctgcaatcatatacagcttatttctagcctggagcttttatcaggtgttttatcaacaatataatagactttctgctgatgtaacgcttaagctaaattttttattccgagtaactagcagcagaatcaaagacagttcataagcaagcaaaggcttaacagtacctcaaggaaaaaaatatctgcacattgcatgcatgggtaaaggatctgggcagcactcagttcatcagtctcactacgtcccataatctgcacacaccttcaaggacaagaaccagagtcattcaggtcccatcatttccctcacataattacaacgtcccaagaatggagaagatttagaaaagtaaccttaagattctagggagcttgtttttgcgagcaatgtccatcacaagaggccaatacttatctgccttagaattaatttcttcggacgaccacaaaaactctactttgtcattatccatcccagcagccttccatatctcttgaaagtattctccaaccactctgattttcttcaagtcaccacccattttgttgttcaactgagcaaaccaatcagcaatccaaatcttcactctgcaaccagctgaagtcattttgttcacattgatgactttcatcactccctattaagaaaacaacagaaccaaaatagattagccaacgcttccttcccacatatggtaatggaacaaaggaaaactaacagacctgagcaatgtgcattcttcctgatggttcaaagccgtcgtagcaaatcggagcagccttcttagcaagaagattctttagctcttcctcttgtatacattcctcaccgatactcctaacaattttgtatctcttctcaacttcttcactcatcctgaagaattagtaaaatttcaatatctaccagaccaataagcagataacaagatcttttcaattttaaattccatacttctaaattgctatagctttttcatctcttccactctaatcaaataatataatccaaatcaaaattgaagcgcgaaaatgaaaaaaattgatgattggtaagaaaactcactggaatccatcggacgaagaagatgcctgagttgatgaaacggaaacagcttccatctccgacgacagagcattgacgatctccgaactttggtctgccatcaaatttagccggcggctccttcacaaaattgcgaaattgcggaggattcttagggtttaccagtggcagtgatggagacagttaacgtgcaatatagcaccactacgcttcacgattttcacggtttgattcgattctctttaattttgttttggtttaatccggttactataaaaaggcaacgatgtgttaatttaggaaatagttggtaaaatttggaatttagtatgggccttaatactaaagctttaattatttaggaaaggcccattagatataaaatagttcggtggtctttgtaacaatggtggtttcgatataccaaacgtattctcggagatcatcaggactcaacagcgagcttcggaccccgatcacgccgcagtatttttttttatcaatttaccactctctgcgttggttacctcgccgaagacttcaagatg

SEQ ID NO: 14141 - DNA, 3000 bp, Unknown
  misc_feature (1)..( 3000): cDNA_ID_1376943_gDNA_ID_2214702_Annot_ID_189714 3000 nt of promoter + ATG
attccttcgcattgagaagcagctttgttcatgagcatagaccttctatcagttcctatttaaaaacagacatgggatctgctggaccagcctggacaggatcattatccagttctgttcctatgaatgatcgtgcttctacggtgggggattttgaaaatgggaatagtttatctggatccggatcacttccaacgctgcaaggggtagctgtttcttctgataaaggcgcagaagccaacactactagcactaaaaagaaagtttcttcagatgactgggaaccttctgaaccttttaaagcatcttttacaattccaccttatattcttccctcgtctgatgccctctacgatcctttcacggatatagagaatctaggagacagacctcttaatgattcattgtcaagtaaaggagaacatgcacggaaaagttcctgccagcagaaagatggtgattctgctagtggtccccaagcacgggattgcaagaatgatgataaaagcagttcatgcagtcaaaatcaacaccaagaaaccgtggcaaggagtttggaagcacatggagtagtggaaggggtggctacgtcagtggttgatcaaaatgatacagcaacgcctagcaaagagatttcttcggctacggctgcagagaatagagttgttttgaaaagaatcaaacctgcagggcatgattcttggcatagaagtgatgggtcttcatataaaaagacaaagaaatcagatgagatagatggtgaagtgaggtcagatgcaggaatgaaagtaatgagactattccggactgcagttgtggaaaccattaaagaaatgttgaaaccgttgtggcgtgagggtcgtctaactaaagacgtgcataacatgatagttaaaaaagctgcagaaaaggtagtcggcgccgctgtccagtttcatcaggtgccaactgacacagaatcagttgatcaatatcttggtttgtctggaaccagaattgtgaaacttgtcgaggtgagtttcttagctggaaataaaagacacttaaagcaggtaaaaacctaagtagtaagtattgcataagctaacaattcttatgttcatttgcaggggtatgtcgaaaagtatggtaaaccctgagttatcaaaccaaatgtcacttggtgtggcatgagctcaaactgatgagattcctgtacattatgtcatccttcttttactcagttatagatttagtacgtagcacctaaattctttggaactccattcctatcctttaccgataatggaataaggttggaatgggagcttggtggaggaaatgtgtacacattgtaaaactcttcaaagcttaatttatgcttaaaacagttttcttttacctttgggaatatgatttagaatgtgatctttagaagtaatgtgataaagaatggttgccttggaagcagaggaaaagagaaagaaatggaataatgttgaggtacgtttcctaactatttgataagtaatttagctttgtgaaaccaagatttttcaaattagaagttagttttagttttgtatttctccatcaatataagtaaaacctctgtaaattaatactcggtaaattaataacctctataaattaataatttcttccaatcccgaggtgagactaatggaaaaaatgacataaatcgataaattaataagataataatttttttgaaaatcctatgtaaatatatggtctcattaatatcacaaattaataattgcagaaatgtatcaactatatatacattatatgtaagaaatttctttaaaatatatttctaatatttttttttgcttaaatttgtatttattcttatttgatattgagttctaatattttattgtatcaaaaaattttggtgttgttttctaaatatgatattactttttacttgtaattgattcttaaaaaatattttctataatgaaaaaatcttaaattttttttaaaagttaataaattagaaaaatatctctataaattaattaattaatcgataaattaaaacctctataaattaatataatttttcggtcctaacattattaatttatagaagttttactgtaagtagaaagtggtttttggtttaggataaagtgcatacgttttgtgtacagttttggaattagttttatctttttcaaacattttagtgaatcatttggactatgatcattaggacatcatgaacttattatctatggtgggtttgtggaaaactatttgattagagttactgttgcttaataatattaacttcacaaaataatcaaaatatgtttgttgttcctataatacttttccacgaaagacttgggattcttttgatttaagggtccctacactttatgactcgtcgtccttatccatatctccagctctatacccaccttgcattttttttatttccacacttctccctcactgctcacgcttctcatgatcaatggtttgatctatattataacattaatgttatatattaaggtcctttaaagtaggcttatccacatcctaatttccaaagatggcgtgtattttagctctaaaccctggaagttgcatgttatattaaaatgttgtaaaatgacatattaatacataacacacaatttacaattatattatgtattcatgttgtttattgacagagaataataacattttggctaaacgtatcaaattttaacgaaaattctatgtgcaagtatataaacttcatttggtaattaagttatcaattacttgtcaattatttctagtctattatagtatttctctagatattttgtgggtcaaataaaaaatgagagaactagtcgacaaaggaaaagagatatttttacgaatagtttaaaaatgagtctataaattagatgaaggaagccctttagtaagtacttcacacttgacacaattctatccaaaatcaacccaaaaaaagaaagaaatatg

SEQ ID NO: 14142 - DNA, 3000 bp, Unknown
  misc_feature (1)..( 3000): cDNA_ID_2994331_gDNA_ID_2214702_Annot_ID_189712 3000 nt of promoter + ATG
gctgtcgccattgaaatggaggagcttttttggatgaggaaggaagtgagaatgaagcaaaaggcttatccagcaccagatcgtaaaaactgtaaagataattgtgttggggcttttaaagtaattatcaagtttctttacaaattggccacaatatattttataataacatttgaaccctcatatccttttgtttgaatttgggctcttcgctcactcctccctctttgtggcccaatgaagtttcttcaagcccatacaaaagtaactagtagtaatccacatcaaaccctataggcttgcggatacatcttaggtttactaaatcttaaaatagaaaagatcagtgaccatatgctaattcaacattttatttttacatactttggtcatttttaatatggactttgttttaattaagatcgattatactaactacaatcgcatatgacaccaacgagcaacgttaattgcttttatgattttaaaagtatgtgatttgcaaactaattaaaaggtgaccatatataaaagagtgtactacaaaaagggcctactactattcaattaacgttgctcgttagtgtcacgtggggaagttaaggttcccacttcccccaccacttctctcagttctcttcttctttttattgtcccattccaaattttaaccaacacatcaagcaaacttcattaatttatgttcagtgttgtagttgcaaacgttatttattattttacgtttacaagtttagaactagttcgaatcgtgataatcttgaataaatcataactttgttcatctaatcataagaacatagaactttgacatggtgtctccggatcttgttgacttagttctatcttaaagttaagctacacatattatagggaccccatattatagtacccaaacaaacaattagagagtttgtatgcaaatccataatatttaccgtagaattgtatgggtttaatgaggaaagaaaaagaaaagaaaaagaaaagaagagaaggacactgaaggagaatgtgatgctgctgaataaaagatacaatcaaaaaattgacaggcagtacaataatgataagtagtgtcatgacagctgacgactctactgcccaatcttgacgttatttatttttgtccattttttcttaagatattatttcaacttaaaagaagtagaaaataaaccataagtgcataacaatattccttttataaattgggttcaagatattgattcgattctgtttatttcaagtgtcgtggaactcaattttatgttatgcctgcctcggcaacaaagattttcgttcaagtggctctatgaaaataagttagggcaaactagatcgattgatgtaaacacaaatagagctaaatagtggagatagtaaactggtgattttgtttcgtaaatagtcaaaaggagggggtgacaaaaaatagatttgtcccttacctctaagagatatagagcaaaacgtttgcatagcgctgtaccatttccttctatattttatatatgtggatgtgcatggatctagctgatgacataacacggcaaaatcatttaacatttgattagcattggcatcaatatttgacgacgctcctcattatttatatatgtggatgtgctgatgtgcatgaatctagctgatgacataacctagtatatgtgcatggttttatggtgtgaacaagttttttttttttcttttcttggttttaggtgtgaactttaagttagagatgatcttcaaatctcacgaaccacaaacctccttgcacgttaagaatagcctctctttttttcttttgttgcttctagtctcagagtgtcttcgagatatgtgtagtctttagtgtaccctgagacctgagtacaagatcgaaaagaaaatatctcgaataacagagttgtgtttgctgtttttaccatttaattatgctaatatctttgttttacataataccaattgaaaaatgaatacataattcaagtttggaccattcttgtatatccacttttggcttcgtggccccgatagctaatttgattgaccttatcatctacaccaaacaagaaattaaattgtcaaattaatttagtggtggccctatactataaaatcgtaaacacttctttttgaaactaaatataaaccttacgacacatttatgtgcaaattagtggacatattcctcagtaataacgtttttacaaacctacagttggataaattattgagtcactccatgattaaaccaacaacataagagaaaaataaaatagtacactacgaatgatcttttaaatatgttattcttttttgatacagaaactttaactaccaaaaaaaaaaagcgaatgattcataaaaacgcaatgtggtatgtttggtctgttttttagttcgaatctcaacttcttgttaccacaaaaataaaacattacacaatgtaaatttactgttcagtcttgcttttccaatcactacattagcacatattcttcacatgtattttccactaatctcgcgacaaaatgttcacagtgtttctcagtttctctctctcaatattttcttgtcaaacaacatgcatatttgaacccgcatggtgaaatagcatcggcattaacatgatcaaccacaaaataaaccggggtggtgtcatagcatcgacattaacttaaaactacaaaatagagctgggtcctcgtcaggttttaaggatacatatgtatgcatgtatgcatatacaaaataatagagcactaaagcttgttcgtactcttttttacacaacatgctaataatttttataccttaggagtgaaattttagtggtccaacaacttaagcacctaagatccttccccacttttgtttggggctcctttatatctcttccaatggttacttttacttcctcttcttctcttcttgttccatctttcatgtgagagagagagttgaattttgcag

SEQ ID NO: 14143 - DNA, 3000 bp, Unknown; identical to SEQ ID NO: 14136
  misc_feature (1)..( 3000): cDNA_ID_2992886_gDNA_ID_2214702_Annot_ID_189711 3000 nt of promoter + ATG

SEQ ID NO: 14144 - DNA, 3000 bp, Unknown; identical to SEQ ID NO: 14135
  misc_feature (1)..( 3000): cDNA_ID_2710982_gDNA_ID_2214702_Annot_ID_189709 3000 nt of promoter + ATG

SEQ ID NO: 14145 - DNA, 3000 bp, Unknown
  misc_feature (1)..( 3000): cDNA_ID_3021951_gDNA_ID_2214702_Annot_ID_189708 3000 nt of promoter + ATG
ggtttaggttaataccaatcctaaaaactaaatacatatcaccgtaccatttaacgttttatcaaagttctgtggttcaacactctaaatattacatgtgacgctataccatacgtttgcgaagcttggaatttttcaaaaagtatttgatctcacatagctttattcagaacctccaaaagaattgcacttataatctccaaggcattgtatagtttaggaaatgaaatcttatgcatgacgtgaaacgatgaaagtataaatcttttttgtaaaacactagaccaaaagagtttccactattaattaacatcaatttttaatagttattttcctgatttaagaataattacacgggcattgttttaccagtttcattaaaatctagttgactttttaacgtattttatcttatcctgatctaagaataattttataggcaccgttttgctaatttaatcaaattggaaacccaaataaatagaaacagaagtgtggatattaattgaacttttaaatgtgttgtaatgtgttgaagccgcaccaggcgcatcttgttgccatgcccatgttaaggaccacaaaacatggaacatgaatgaaaactcatgcactaatactatctatatcccagatatttgcattgaaagttacactgtaaatttacatattgtccaatagaatttgtaaaattatatctatatttttttttactaactctcattaaattcacaaactataagaaattcacatatacatgactataattttctcataaaactttcaaatcataacattaatttgttgaatattaacatatatatgactaaacactgtattgaattcagctgtgatgcattcgttaattattatcttttcatcagaaaaaataaacttcaggtaggttgacgaagttttcatttattctattaaaaaaacccgggaagtgactgtactacaaatcaatatcgagtttcttgcttcaagtattcaaacctgttaggagatctaaatctaaatctttaacgggactacatcgatcggaaacttctcgccagttgtgtacatgtgctgtgtatgcctctactctctagtatctatatgaagtataaaaaattgtagcccgatatctcctataaatacacccaagtcacatcaacccaaagtcacacacacaaagaaaaacaaaagaacaaagatgggaatcattggtaagagtgtttctctaactctctttgcacttttgtgcttcacttcctctgttttcaccttaggagtgaatcaacctggttcatcagatcccttccatagccttccccaacaccttcccctacctccaatcaaactaccaactcttccaccggccaaagctcccatcaaactaccagcctacccaccagccaaagctccgatcaagctaccaactctcccaccagccaaagctccgattaagttaccaactctcccaccgatcaaacctcctgttctcccaccagtttaccctcctaagtacaacaagaccctagtggcagttagaggtgtggtctactgcaaagcttgcaagtacgcgggcgtcaacaacgtccaaggcgctaaacccgttaaaggtactcacttatatacattcatgatatgaaagtctatatattatcctaaaaatcactcgaacccttaatatacgcacctgtggaccgtggtatgtccgtatgtgaaaagtccacacttcaatcccatgcattcatactttttttttgctaaaggtatgctgcatgcatacttcatcctttacatttattttaggcatatgttatatgtatcataatctcattgtcggttgttcaaaactttttgtgtaaacttttaactatatgctaccaagcgagattagttcagagccggtcgtatcattctggtcccttcacgaattgataaacataaaatataccatggaaaactaagtaacttctttcaatgcttttgaatttaatttaattataatcaataggtttttggttaagacaatctactgtagcgaagccttgtcattgttttccccaagtttcctataataccaaatttagctcaactagtaagaaaatcttgttcaagtcatgccccttcttaaaaaaagagggtaaatttaccataactaatctaaacaaatacatgctcttgcattattttaaaacaatttctgtataacaaatctatccaagtactatattttcactttttatttcgtttgtgttatctggggatacagatgcggtggtgagacttgtgtgcaagaacaagaagaactcaatatcggagacaaagacggacaagaacggatacttcatgctcctggcccctaagacggtgaccaactacgatatcaaaggttgtcgagctttcctcgtgaagtctccagacaccaagtgcagcaaagtgtcgtcactccacgatggaggcaagggctccgttctaaagccggtcttgaaaccaggattttcctcgaccatcatgagatggttcaagtacagtgtgtacaacgttggtccattcgcattcgaacctacctgccccaaatgagatggtgttataagagctacttaaacttttattaatcaatgattgtgttgaatatgtatcagcttggtttctttgtatgggcttttctggtagtgttaatctttctaatttgcttcttaaataaaaagtggtgacgtttacatattaggtttttcttgttaattccttatcttcgtgaccccaaaagaaaaaagaaaaaaatagtttgctaaataaaagagactctgaatatgttatgtggatgttaatgaacacaaccgttgatatattagcctatatattaattcattaggaatcgaaatgaccaaatttatctccaacaccatcatatcagaacaagtattgacaagtgttgagcaactagtacaataattttctttcataattatactgtacatttgttcattttgtacgaaacctctgatg

SEQ ID NO: 14146 - DNA, 3000 bp, Unknown; identical to SEQ ID NO: 14134
  misc_feature (1)..( 3000): cDNA_ID_2706080_gDNA_ID_2214702_Annot_ID_189700 3000 nt of promoter + ATG

SEQ ID NO: 14147 - DNA, 3000 bp, Unknown; identical to SEQ ID NO: 14133
  misc_feature (1)..( 3000): cDNA_ID_2711004_gDNA_ID_2214702_Annot_ID_189697 3000 nt of promoter + ATG

SEQ ID NO: 14148 - DNA, 287 bp, Unknown; identical to SEQ ID NO: 14132
  misc_feature (1)..( 287): cDNA_ID_2705235_gDNA_ID_2214702_Annot_ID_189692 3000 nt of promoter + ATG

SEQ ID NO: 14149 - DNA, 3000 bp, Unknown
  misc_feature (1)..( 3000): cDNA_ID_2710978_gDNA_ID_2214702_Annot_ID_136891 3000 nt of promoter + ATG
gttaataaattagaaaaatatctctataaattaattaattaatcgataaattaaaacctctataaattaatataatttttcggtcctaacattattaatttatagaagttttactgtaagtagaaagtggtttttggtttaggataaagtgcatacgttttgtgtacagttttggaattagttttatctttttcaaacattttagtgaatcatttggactatgatcattaggacatcatgaacttattatctatggtgggtttgtggaaaactatttgattagagttactgttgcttaataatattaacttcacaaaataatcaaaatatgtttgttgttcctataatacttttccacgaaagacttgggattcttttgatttaagggtccctacactttatgactcgtcgtccttatccatatctccagctctatacccaccttgcattttttttatttccacacttctccctcactgctcacgcttctcatgatcaatggtttgatctatattataacattaatgttatatattaaggtcctttaaagtaggcttatccacatcctaatttccaaagatggcgtgtattttagctctaaaccctggaagttgcatgttatattaaaatgttgtaaaatgacatattaatacataacacacaatttacaattatattatgtattcatgttgtttattgacagagaataataacattttggctaaacgtatcaaattttaacgaaaattctatgtgcaagtatataaacttcatttggtaattaagttatcaattacttgtcaattatttctagtctattatagtatttctctagatattttgtgggtcaaataaaaaatgagagaactagtcgacaaaggaaaagagatatttttacgaatagtttaaaaatgagtctataaattagatgaaggaagccctttagtaagtacttcacacttgacacaattctatccaaaatcaacccaaaaaaagaaagaaatatgtgggatgaaactgtagccggacctaaaccggagcatggccttggccgcctccgcaataagatcaccacccaaccccttgacatcaaaggtatttatttttctttgtcaaccataactccgtaataaacttgcatatacagatctttgtagaaacgtatgatctcataattatatcatgtgatggtttttggaaggtgtaggagaagggagcagtagtaaaactgtggcggcggtggccgggagtcctggaactccgacgacgccaggatcggcgcgtaaggaaaacgtgtggagaagtgtgtttcatccaggaagtaacatcgccactagaggaatgggcacaaacctcttcgacaagccttctcacccaaactctcccaccgtctacgattggtacgtactcagtttctgttattattatctgaccggacggtgtagatcagatctaagatggtttgaccgttgttgtgatcccgcaggctatacagcgacgacactaggagcaagcaccgttgagccgagagggtagagtgacatgagaatgatgtaaaataattatgttctttacgccacgtgtttatgttctgtttcgtctattttggctatatgtgcaatcttttatttgcttcatgtcgtttgtgtttgttagtgaccgttgatttccaccatctgggttagtttttagcttttaacggtggcgatgcgtcttcagtgtcttgtaatatttttactgttcggtaatattacaattagcttctctaatgatttagctaacaatataacttaacttaactataattagcaaaatggaatttaacttaaccatggttgatctcatatcattatttttattttattttatttgttcatcattaaaatatctcaatcatgcatggttagatgaattcgttgtgtcaacaaacaattatgatagtgatttgattaaattttaactgaactatggttgatctcatctcattaaataacaaaaacataacaatggttaaatgcattctttgtgtcaacaaaccattatgatagtgatttaattaaagtttatacatgtctttggatacagttgtaattttttatatatatttttttgtctgatttgatataattatacaaagttacacaaaaagaaccaatccaaagctcagggatcaacctattttaatcaccatggttgatctcatctcattaaataacaaaaacataaccatggttaggtgaattctttgtgtcaacaaaccattatgatagtgatttaattaaagtttatacatgtctggatacaaatgtaatatatatttaattttttgtcatctgatttgattaaagaagaagatagaatacaaggttacacaaaaagaaccaacccaaacctgagtcctgcgggatcaacctattcaaagcacattttcaatacaaggggaatatacaaaagaagtgtctccacctacacaaaaacacacaagttcatagagaagaaagagatctttcaccattaaacacacgttacacaccttgcaaccaagagctacatacaaatggagccgtaaaagtcattagttatactttgtgcaatgagattagctcctttataagtcactttggattcactgccatcttctattcaaaaccttaaaacgagatgataatattaacacatataccacaaaaaagcattgaccatttcacatgccattcgttaatcaattgtaaacaaattttatgaaacaatctacctaaactatcataattttgtcacgattagaccgaaactatcattctaattagttcacactacacaatatagaatctatcatatatatgtagcaaccaattctttatctaaaaaaaagtaaaattttgtaacacccatataaatatttaactttcactctgaattattcatttttttttgtagaaagcaaaagacaccgtagtgaagtgaataattcttcttctgctcggtggcgttgtgggaatg

SEQ ID NO: 14150 - DNA, 3000 bp, Unknown; identical to SEQ ID NO: 14141
  misc_feature (1)..( 3000): cDNA_ID_1376943_gDNA_ID_2214702_Annot_ID_136892 3000 nt of promoter + ATG

SEQ ID NO: 14151 - DNA, 3000 bp, Unknown
  misc_feature (1)..( 3000): cDNA_ID_2710974_gDNA_ID_2214702_Annot_ID_136893 3000 nt of promoter + ATG
aaaccaagatattgatcaactgattctgtgtcagttggcacctgatgaaactggacagcggcgccgactaccttttctgcagcttttttaactatcatgttatgcacgtctttagttagacgaccctcacgccacaacggtttcaacatttctttaatggtttccacaactgcagtccggaatagtctcattactttcattcctgcatctgacctcacttcaccatctatctcatctgatttctttgtctttttatatgaagacccatcacttctatgccaagaatcatgccctgcaggtttgattcttttcaaaacaactctattctctgcagccgtagccgaagaaatctctttgctaggcgttgctgtatcattttgatcaaccactgacgtagccaccccttccactactccatgtgcttccaaactccttgccacggtttcttggtgttgattttgactgcatgaactgcttttatcatcattcttgcaatcccgtgcttggggaccactagcagaatcaccatctttctgctggcaggaacttttccgtgcatgttctcctttacttgacaatgaatcattaagaggtctgtctcctagattctctatatccgtgaaaggatcgtagagggcatcagacgagggaagaatataaggtggaattgtaaaagatgctttaaaaggttcagaaggttcccagtcatctgaagaaactttctttttagtgctagtagtgttggcttctgcgcctttatcagaagaaacagctaccccttgcagcgttggaagtgatccggatccagataaactattcccattttcaaaatcccccaccgtagaagcacgatcattcataggaacagaactggataatgatcctgtccaggctggtccagcagatcccatgtctgtttttaaataggaactgatagaaggtctatgctcatgaacaaagctgcttctcaatgcgaaggaattggcgttattaataactagagacctgttgtcagtgaaatcagcaccatacgtttgcttcaaactctctcttctaatgttttcaaatgaaggcataaagcgcatctcgttattgaacgggaaaactctctgagaacctgggggattcacaaaagacatggaggagaaaactctctgaggattcatgaaagatatatcctctctggtaggcaacgatgtcacaccgttttcgcttaactgggaaactcttacaccttctctgctgtccaaaattcttctttctgaatagacataagcaaaataaattattggttgattcagaaagagtaattaaaccccatagatattcaccggcctctatattgttggaactacctccacatagaatcacaagaataagtattcatggtacaacgtacctagatcagaccggataccaccgtttccagccatactattttccgccagttgttgactagtgcaatttgaattctctttcacatgtagaaacttgcaggacaccccattgaaacaccaccctttagcaaaaaatttgcagggaagagctgcacgtttttgttctggttcattcccaccaccgccagtgaaaaagcttcttggcggtatacccggagcaggaaatctgataaccgaatttgtcagtataaaagcttcaacctcttaacttagtttcagcaaaacttaagcagaaacttttttgccataccttggtaaagtaccattatcttgagcaaaagcttgctcctttatgatttttgattgctcatctaaaggtgttgttacagaatgcctcttcacatctacatgagacaagtttaatcagtacatattagcaaaactgctgttttgaataaacaaaagagattccttacagaaacaagcacaaaactctgagaattgaatttgcttacttggtattaaagccacaatttttacaaaagagcttcagtgaaaatctaattgccaagtctttgaacctctaatcagagctaaatctagtcaatttaacaattctctctttcttctagaacaaaattcatcaattccaaattggaaaaggtgtttccatcaataaaaacacgaacttgacagaattaatcaacaataccatgtaaccaatcacgaatttcaaatactaaccgttgtgggaattggaagcttgaattggtggtttatcaaacaattcagattctcttacaattgtatgtacttgcaccttttgttcgacctcatcatcatcaatgtccatgtcggaatcagacatcttgaagtcttcggcgaggtaaccaacgcagagagtggtaaattgataaaaaaaaatactgcggcgtgatcggggtccgaagctcgctgttgagtcctgatgatctccgagaatacgtttggtatatcgaaaccaccattgttacaaagaccaccgaactattttatatctaatgggcctttcctaaataattaaagctttagtattaaggcccatactaaattccaaattttaccaactatttcctaaattaacacatcgttgcctttttatagtaaccggattaaaccaaaacaaaattaaagagaatcgaatcaaaccgtgaaaatcgtgaagcgtagtggtgctatattgcacgttaactgtctccatcactgccactggtaaaccctaagaatcctccgcaatttcgcaattttgtgaaggagccgccggctaaatttgatggcagaccaaagttcggagatcgtcaatgctctgtcgtcggagatggaagctgtttccgtttcatcaactcaggcatcttcttcgtccgatggattccagtgagttttcttaccaatcatcaatttttttcattttcgcgcttcaattttgatttggattatattatttgattagagtggaagagatgaaaaagctatagcaatttagaagtatggaatttaaaattgaaaagatcttgttatctgcttattggtctggtagatattgaaattttactaattcttcagg

SEQ ID NO: 14152 - DNA, 3000 bp, Unknown; identical to SEQ ID NO: 14138
  misc_feature (1)..( 3000): cDNA_ID_3593822_gDNA_ID_2214702_Annot_ID_136895 3000 nt of promoter + ATG

SEQ ID NO: 14153 - DNA, 3000 bp, Unknown
  misc_feature (1)..( 3000): cDNA_ID_2706071_gDNA_ID_2214702_Annot_ID_136897 3000 nt of promoter + ATG
tcccaaaaacatataggaaaaattcaggctgtatgttaatcacttcgacgtttcttataaccaaaaattaaacgcaggatatgttaattagtaacttttttttggtatgtagattgtcatggaaaaatcttcttaattagtaaattaacttgaaaaacttatagtacatcgaattgtttgttgttgttttttttttcaatcaaaacgaattgtttattgtttcataagaatagatggaaatatagatatttaaatggttgcattgatcgccattttctgattcagccgaagttaagctgcaaaggcccgagcaccaaaacagcctaaacatatattttatattttaattttaagaacaaataaaatactactatatccacataactaaaatatctttatttttttgcttaaaaataaggccataaattgttttgctttggaatccttaataatcttggaccagtccttggaacgagactttgcaatgttacttacagatctagttaacactgataaccgcttgtgttaaatggagatgccacattttgttttgatttatttgcatcctatcacaaagttatgatttataaactaagactgtttagcattgtcccatagtcccattcaatagttagtcttttaaataaagctcacatttagttttttttttttgtctgataaaaaaggctccatttagtttatatttgaaataaatgcagatgaaaagaatcttaatatttcaaaagaaactgaagaattattaatacgttattaaagggaacgatcatcaacaaagaccctcgagtcaatccaaaaaaaaatgaccttaatttctttgcaattactatacaccaccacccatcctgacctcttaaaatttcgtattttccccattaatacatgtttcttttttccgtactattacatcacaaaactcctaaaatcgtgtttgctaatttgattatgactattcctacgtccaaacaaaccatttgctccccatccgaatttaaggccgatgccccgaaggtgaccgagagaatcctcttctgcacagactgaaaatccagaaactacatgattttatttttttgtaatacaagcaaataataaaaacccatcttgttatagttaataaataaacataaaatgtgagaaaatttacaatctttctgtcttgttttaattaatgtttttttttgagatgtcagaggagaaaataataaaaaggagaaaaaatcctagttcagaaccaaacatggatcactttcaaagaatctgttgtttcaatttctgaagaaatttgtgttcgtacgtttgaactgcagaagcagtttggagtttaatgcaagaagtgtaaggaagtgaggcatggggttgcattaatgatcactttgagtttcttcctgtctcttactgttttctatctcagaaattgatattaggaatgtgaataacaaaacaaacgaatgaaataccatgcaaactctaatatggatgtagtaacagaaaatctgtattgctctactaattaaattttttaatttagtaatatgaattcagagtctattagtataaacctaaagtaaacagaaatttttggagtgcgcttcaaatacccttgtaaaattacagatgactttgtatggcaactttttaaaattgctaaaataatttcttataataaatattgaatatttttaaataattcagtacccactctataaatctatataactagtctctctctttttttttttttttgggcacatataactagtctctctatcagttattttcatatggattttggatttttttgtacatatatgaaaaacacaaatgataaaattatttaatggtattaagcattcgccacagggtatgctatcaatttggtcatttgtgagtgagattgatatggtttggggctaattcagtgaagctccttcggactctcaaagtggtttattagacagtgtgaatgcatgcggtcttctatttgtttgcgaggctaaaagaaacgctcatgatacacaactaatcaaatgactgttgaagaaatttaagatttccaaaattgtcttcttctatttgttattgaagtattggtcaatccatcagtgatttaacgttatagcaatataggctactcgtcgactagcacattttgacgtacttaaatactaaccttgtcactctttttttaatactgtaataatgccttttgaatttccattggtgatatacacattttcccactagatgacactaaagggaactaacccctaaaacagtttttattttatcataattgaaccatgacaagcaaaactggattcaaatctaaaatgtcaaagtgctcctcataatctatatataagcgatcaaagaccttctatagaattaataaatttactttttaatgcaattttttttgttcaaaactatttaatgcaagtatgcaactaaatcatactgtttgactgaagtagttaataataaaacgtaatgaaaacagtgttcctattttcttttataacatttctgttaataggatttagcctacttctctaattcatttgattccctaaacaagagaagtagtgatagttttttttgtctttactaaacatatacacataatgatatagatacacatctatacatcatagatagatacatagatatagagagaaagagaaatggtgtatagaaatatgggtgagactttaaattaaatttatgtaaaagagatgaatgaatatatgaaaacaggttgggtaggtgaagagaggctataagagggagagaaagaggtcgtaacccttttgccctattcacatttttatttatctttccatttagccattctgttccctgtctcttcctcctctctttttgacacatcacatcatcatcacatcatcattcaacatcaatcatcatcatatgcatacacatacatctgtgttctgcggatcgagttaattagttatg

SEQ ID NO: 14154 - DNA, 3000 bp, Unknown
  misc_feature (1)..( 3000): cDNA_ID_1034283_gDNA_ID_2214703_Annot_ID_136907 3000 nt of promoter + ATG
taaaccagagagcacagtacctttgagaattacgtgatggttttatcaaattatggaaaatttaaggatactcagtgaatgaatgctgtcaaagagttaacatcaagagcagctataaaaggacccactagttaatgcaatggagaaggaagcatgtgatgaacaacatgataaaagaagcacataataaagacgtgtgaagagcatacacattatataaccttaggaccactttctctgctctcttgtttttttttagatatgtaaaagggactagtggaatttaaggaacatcggcccacaaccctaggaaagttgcaacttgaggatgatagttcgaacagtacacatctcaaaccccttaagaaataaaactcactcaatctcatttacacaacagtgcaacctgccaaaacggtctcatttttgtgaccaaagctacatatataaagttccaccgaccctatagaccatgtggttcaatccttgggagttgggactatggcttcttacacaactaattttcaacatctacttgcttgctaccattgctaccatcactcagaatctccgatcttgttgtcagaattcaagacaaacatatcaaaagtcatagcaatggattcatatgaaaaggtagccattgagaagacatggttcatgtagttccatgactgcttgtaaaatagatcaggaggatattgtgtaagcagtataatatattcaagaatcaaataccatggcattatcagtagagaggacctaaaagacattatatttggtataactatgttgagaaattaacattatagatgtggttctcaagaatgtgacttggaaaggtaaccgagaaaacaaaatagaagaagagatcgtgaaataagctggctcagctagaggagtggaatagattctcatttatctgtgcatgacttcattttacctcttctttctgagttcgagagagatgagcttcttcgatacgccgggttagcatagaaattccataatgtgaagcacttgaagatgcataatacgaggtaactgtcagctgagcaaactttggaagtgcataacctagcaagcattgtacacaaacaaaagttcaggtgctttcttcaaagtaaacatacagatgtatctacatatataccaggtacatcaaacaaaagactacgtgcacaaagctactaacatacccactaccacctggcatttgaaagttttaaacagataagaggaaagccaattctcttgatggtaaaccattaatgtaagtaattcacctaaaggtaaaagttgcaattctacactgtgcagcacaccttgattcgtattctaaccatactattggaaaacttatcgcggcttgtaaactttcttgcattaaaaagctacaagtacaaaagatgctaacagaactacataagttcaaaacacaaaataaagaggttcaaaacacaatgagaaggccattcacaaaaattcaggacaaatcacagacagttaatcactaacgcaggatatatacgaaacaaatattcaggcacaagagaagcgagtgagccaaaaacgattaggttacctccaaaagcagcccctacacctgaatatactagaagcaatggaacctataaggaaaagcaataattgagaagtacataaaattcatacaaggtaatgtcaacagaaaagaggaaacaggaagaattccagaactagtaggtaaggcaagagaaaatacatacccccacaagaaaggaaagccgctttgacccggaaaaccgattttgaagataggggatccctgaaaacccaaagagataagatccactgtagaaatgataagtatttgacgacaagagaatcatgtgatacctgtattgaaagcatggacggcactaagcaagccaccaataccagaaccagcctatagcacaggagacacctagttagaaacagagtagtatagctaaatgcacagcaagataaatcgatttccatgctatccaaaaagccaatacacatcatggtattcccaaccaaaaaataattcccaaccaaaatactaagtcaaaagtcaaaacacaacaaatctgtgaacggaaggataattggagaatatgatggatgctctgcacccaacagccaacacaaatcatttcaaatgaaaaagctaaaacacaaacatcgcaatagaccaaattaacattaacctggaaaaggctatttcagaagtcaatgaaaaaaaggttaaacctttacatgaccaacagaggaaaccaaaaatcacaacacaataccctaagctagaattcaaattctcattcgcaatataattgcaactaaattcagctgattgccaacaaaccaattacccaactaggagtccaaaacaagtatccgtgcatataaagtaatcccataacacataattgaaacggagactgaagagaatttcaaagagatgaatgagatagaaatgcgaaaactgaccactgcagcagcatcgtgtaaaactggagttatcgtccactctcctttctcctgagaaattattaaacacaagaacatgagtctcagacgcttctgacacaaaaccacaaaacactgtagaagaaactttggcaactcactgaattagggtttaagagagaaagacaacgaggacaccgagcagaaccaagaccaggattcatagtcggatcataatcaagattcccacgccgaagcttctcttcgtatacttgtctcgttcccatcctctctttctctccgatcaccgtctctcttctctccgagaatgttccttctccaccgttgctacgccataactgaagcttacaactaataaactactgggccttatgggctttcttattctggcccaaataaagacactacgtcatcgtcatcgtcttcccaaattgagatgccctacaaaattcacactactatcttcttcttcttcgatttagcacagaagctgcagttttatca

SEQ ID NO: 14155 - DNA, 3000 bp, Unknown
  misc_feature (1)..( 3000): cDNA_ID_1815954_gDNA_ID_2214703_Annot_ID_136908 3000 nt of promoter + ATG
ttgaacagaatggcgggtaacttcggaaacaaggcactgatcggtgaaggttcttatggacgtgtcttctgcggcaagtttaaaggagaagctgttgctatcaagaaacttgatgctagttcttctgaagaacctgactcagatttcacctcacaggtacacacatacatattacaataacgattatcttctcttcaaactataatttgttcaagcttcttctcttcaagctataatttgttcaagcttcttctcttcaagctgtttagattaaactactgttattttctaatctaattaatttctattcaaaatggctaagttatcggtggtatcgcggctcaaacacgaccattttgtggagttgctggggtactgcttggaggcaaataatcgcattctcatttaccagtttgcaactaaaggttctttacatgatgtattacacggtacgtaaattttaactctcactactcatattttagtatatggtacatgaaatatatatggaccaattgaatctttagggagaaagggagtgcaaggggctgagccaggaccggtgctgaactggaaccaaagggtaaagattgcatatggagcagccaaagggcttgagttccttcacgagaaggtccagccaccaatagtccatagggacgtgaggtcgagcaatgtcttgttgtttgatgactttgtggccaaaatggctgatttcaacttgaccaatgcttcctccgataccgcggctaggcttcattctactcgtgttttgggaacattcggctaccacgctccagagtattataccataaacccgttaattcatttgtttaaaacaacctgatagttcttgataacgtaagagttttgttgtcttaggtatgcaatgacaggacagataacgcagaagagtgatgtgtatagttttggtgttgtgctattggagctcttgacaggaagaaaacccgtagatcataccatgcctaaaggccaacaaagtcttgttacttgggtacgtacacaaattaaagcaaacattttggaatgactccatatatatcatcattataagtccccttttaataacctttgtattgttgttacaggcaacaccgagactaagtgaagacaaagtgaaacaatgcatagatcctaagcttaacaatgactttcctcccaaagcagtcgccaaggtccgttcttcattttcttcttcaaatatcaaacgatatcttcatttactttgcttggttaaagatattttgatattagatgcatctagatatcatattttgaaaactagggacatatgattatttggtttagctttgtaattttgaaaagtttctttgcgtatggtcgaacagttggcagccgtggcggccttgtgtgttcagtatgaggcagatttccgaccaaacatgaccatcgttgtcaaggcacttcagcctcttctaaactctaaaccggccggtcctgagtctacgtcctaaactaaacaatataccatttctcttgtttttgttcatgttgttgttattatggctattttctccctcttttctgttccaagaactatgattattggttgtaagatgttgttatttaagcgaatgtaacttatatttttcatttggtttaacacccctttcgttttttattgtatctaagccttaaatccaagtttgctctcacaattttgaggagtcaacgcaagcaatagcaaattagttgtgagatttaaataataaaaaaaagtaaatatattaaccattaaagactttcaaattttttactattctcaataaaagatttagagatttatgtagattgtattatacctctagtttcttataagatgtttatttgatttccatctttctttaaggtaagtatccattataagacaactgccaaaacttagacatctttctatattcgttcatctgattccaatctttcttattttgttaccaaattgtacacatttcaatattttggggggctcatctttatttttattcaattcagtaaccaaaactagaagttctttctatcatatgcctatcagataaaaagtccttaaatttaaaactagaagttcgtttttttcatactaacaatatatatcaaataaataaaaaacttaataaagtcataaatttaaaatgtgaagaaaccaatactataataatttattatttatcgtcaattagttttgaattcggaactcgttacccttcatttgataaaataatttatatagtgaattaatattttacaaaatgaaatttagtataagtttccatggtcatatatctcaaatcattgagtaaaaaaacaagagtgatgacaaattacaacataatgacgacacccacacatgaagctgaagtcccaaaaacaaaccagtaaaccacatttcaccaccacgattcaaaatatataaaaaaatatggaaaaaatgatttttcttaattggtccatttgatgaaaaaagaaagacatttggatttttgctataaaaatgaaatcagcggcattaaaaataataataaaaaaatgggatggtttttaccagaaaatctcaagaaagtcacgtactgtaacagtaaagcacattttaggtttatttttttattttatttttaacttttttaacaacacgtcgcctcttttatacacagcgtctctctctctctctcctcaatataacatacttagctgcgaatctcgtcgtcatcgccccgacgaaccctgtttcgcgtctctttcccaatcccaatccaatttcgattccttcatttcaggattcgtatagccgtaaatccgttattgggttcttccgattatccaccgatagatctcgatcgaacgtttttctccgattggatttttgggtgatttcgccggaattcataatcagacgggaggagtcgcttctcttctcttgagtaatttagtccctttttgtgttatggaatcaattggttgatg

SEQ ID NO: 14156 - DNA, 3000 bp, Unknown
  misc_feature (1)..( 3000): cDNA_ID_3021980_gDNA_ID_2214703_Annot_ID_189760 3000 nt of promoter + ATG
ttgttccgttgtgtagggaattttgatttttgcgaagttgatgaggactttgatgtcgactatgtattccgaactgcttttggaggatcccgaggtttctctttttcattcactcatgaagaggatgaacctcgatggcggcatcactcttcaaggttttccaacaactctaacaggtcttggagatcgaaatatcggttagatgaagatgaagaagaagaagactatacttcagactccagtgactctgagtctgagccaaaccaagtttctcatagacaagcacttggcctgagtccctcaggtcccttaaaccttaaagatgtcaaacatgcgtaagtagtttcactgcatgtcaacacacaaaacctaacatatatctttcatcttctcaccacttaacatcaaactctcttttattttgtatatcaggtatcgaacttgtgcattaaaatggcatccagatcgtcatcaaggctctaccaaggtaagatataagatctcctcctctctgttcaatctccatgtaagtttctctttgatttctcgtgttattgaatatgtgattatatgaaaacaggaggcggctgaagcaaagttcaagctctgcagtgtggcttatcaatctttatgtgaaaagctatctgtgaactaagagttagataggtcttgattacttagagatacctcattacaataatttccgaattgtttcattttggctttgttcaagcaaaattgcctttgttctgtctttttctatttcttcaaaatctactactgatgtgtaatttatatatctcttcctcttgaaccagttaattattttcagagtgaattgacaaatatgaatcaaaatatgactgaaacaagcccaattactaattgcccaaccaggaaggcccaacgcgtgtagtgacgaaagcaagctctctgttttgtaaataatctcgttcatttatttatgaataaggacagtccttggagaccaagcaaaaattattgcgtttaaatattccatttctctgtgttttttttgttttccttttacaaaacaagaaaatcttcttttttttctcctctcttctctaatttttttttgttaattcttatgagtcaagctcgagtcacagtggtttaagacgcaatgttgtgcactctccaacaaagatgaacactgccgccgcaattaaagcagcgatttgcagaccgcaaagctattgttctctcctgaaaactgcgttttttcattctactcctgtcttagaacgcaaacgccgttcctcttcttcttcggacggtctcttcactacatgtgtgggttcatctagataatggatttctatcatttattaccaatctctagattttagagtgtgaatacatgttctgatttttttagggttttgactatttggcagaaatcaaatgctcagaagaagaagagaagcaagaaatttttgagggaacatcaagaagcagtgcgtcgtgctgttgaagaacttaaacaagaaagagaagaggtacatgactgagattatatatgatgcaaaaacatgtttaggccctatctatatcacttttgtttttggctggcctctaacaatttgcttcttgcattacctcattgccttttaagtttgaaacttgttgaggttaaagcacaaaaccatttatgtgcttttcttaatcaagtgtattgtctgtttgtttacggatcatgaaacttagtgtatctcattgctcttggtgtaactaaaattaggccgctaaaaaagccaaagaagctaaagaaaaagagaaaaccaaacgacccctgtaaaaaaagttagtgttgtttaatttaaacgttgaaaatgtctagtttaaggtgcagttttgttttgtatacatatatatatttactcttattaagaaaaagcatgtgttccattttgcagagcattccagttactgtgataacgactttgaatttatattccaaaatttattcaaagaatctcgagattcctattattcaacacatagagagaaggaacataattggtggtatcactcttcatggtcttctaattactctagcaactcttggagatcgaaatataacttctatgaaggaggagaagaaaaagatgagaaagaagaagaaaacaaagaagatggctatggttcaagaaaatccagaggctcagtgtttgagtcaattgaataccaagcctctcatagacaaacacttggtctgagtccttggggtcccttaaaactcgaagatgtcaaaaaagcgtaagttattttactccaagttcaaacacacaacacatacattcatgaccaaacgtgttgtttattttcagatatcgaacttgtgcattacaatggcatccagatcgtcatgaggaatttaacaaggtaaaccaatataagatcttcttcaatctccatttatatgtttttatctcttgtgttaatccttgactatataaactgacaggaggcagctgaagaaaagttcaagctctgcactgttgcttatcaatctttaatcgagaagttagcagtcaaataagatttttgtgtaacgcaagagagttagataggttttgattactcttataacaaagaatttcctacagaaatgtttttattatgacacctgatcaaccaatatacactacaatgtttaagcatttgctatatgtattgccctgtgattctttaatgtttgttttctctttagtttacaagtacatgtgactctataacactcactcagctctgcttttgtgtctgaaccggttaatttggtcaaattaaaccggttgttgggtcttagtgaaaccaataatgccggacctttggctaagttaaagagtcacttcattcaacaaatctcctcaaatgtcaaatttttggaacgaaatagattggccatcgagagaggagcttcattgacaaagagtcctatagccggaagtgaagaaatttccggtgcgtataatg

SEQ ID NO: 14157 - DNA, 3000 bp, Unknown
  misc_feature (1)..( 3000): cDNA_ID_3021988_gDNA_ID_2214703_Annot_ID_189754 3000 nt of promoter + ATG
agcctccgattgaaaagatttgatcggtgaaaatttccattcgacgaatcggagttccaaaagctcgctgacgagttctcaatagtaacctctccggcgcttatcgtgaaaaaccctatgttccagacttctcttacgctttccttgcaaaatctgcctcaattttggattgaagacaagagcttgaggctttttctccaatcttaattgaaactttggggtttttctcacggggattttgcgaattagggtttcggattggggattttgttacatcgaaaggactttggagattcagcgttgggctcggtaattgaagaatgcagaattcataaacaccgctctggaattttactttttaggtaatctctcgttttcttctgctgagtttaaatttgttcaattatattatccattgacagtggttattgaaatggttgagtttagtggtataaaaatccgccattgatttgttttttagttttagcgtcttctttatccatatgtttatggttttgtgtgtgaaacttgtttggttctatgtcatgcttcattcttctagtctttaatataagataaggtttgattatggtttcttttcaagcaggataacaaaggagggtcattttatctgttaattgatgggtgaagagatatctagcactgtgaacctggatttgaatctgggtcctgatcctgagttaggtctcgagccagcgacgaattatgctcggtctgattggggtaatggacttgctgctagggaatccgaatctctgagaaggtttagaagtcggtaccggtcacgtttcagacggattgatatgcttccggttcttgctgagacacatagcccggcgatggaattgagtcagttgttgatcacttctggaaatgtagttgctttgcctgctggtgagggaagcatggctagtggagaaagggtcatcgaggactccaaaaagtgcgagaatgggagcaaagtgatggcagaagacaatgtaacagaggagaaaagagatgttgagaagagcgttggcagcgatgggagctttttcgattgttatatatgtttggatttgtccaaggatccagttgttactaattgtggccacctttactgttggtcttgcctttaccagtggctacaggtttcagaggcaaaagaatgcccggtttgtaaaggggaggtatctgtgaaaacagtgactccaatctatggacgtgggatacagaaaagagaatctgaggaggtttcaaacaccaagatcccttcgagaccccaagcacgacgcacagagagtttgaggactacacttaacaggtcaggtcatataccaacggaaatatttagacatttgcaggataggcttgaaagggaatctagtacaggagaaagacgcgccagaccatctcttaaccggtttatgacttcgaggggagttagagcagaggagaaccagtctagtgaagcactggttgaaccttcatcagatgagattaacgatattgatctgatcttaaataatgcccctgaaaatgaagaggaaaacgaaaacctaagctcgtcacgtgctttggcaacccagagacgatgggcacagatgtatgggagggtgtcgtcgtttactttgagctctgctgaaagattagcggatacttatttgataacacatgcattggggaggaaccaagaacaaaacagcagtcctcctgttggtgttgaagacagggattcgttctcaagcatagtaggtgtgataaactcggagagtcaagttgaaacggcggctgagattaattcaatgttgactgtatcgacttcttcgtctgttagaagacatgagaacagttcaagggtctctgatgttgacagtgcagattctcgtccactgaggagaagaaggagattagcttagaagagaatggaggagaagaaagaggaagctagagtaataatctgtagtagaaagcagtgattttattggttttttcagtttgttttttatatgggattttggatttttgttgtttcagtttttatgctaaaagactaataaataaatacatcaataggatatatggttttttcaattcttttgatctggtgaatgaattcggttgttggcagttgttgacttgttgcggcagagttttgacttgtgatagaatataaaagtttttgttgttgactggacaaaacgtcgctttggccgagtggttaaggcgtttgcctgctaagtaaatggggtttccccgcgagagttcgaatctctcaggcgacgaattctattttacatttttatcgacgcggggtttgtaaattgtaaccaacctgtgtccctctgttcatgcaggagctagatagccaattgaagatagaagcaaaacgtaaatttttttataaatagattgaaaaatctgatctaaaaagtttgttaatcaaaatactatctgaaatctagtaagaataaatatttgaaggttgaataagggaaaaaatgagcaaaaaaggaaacgaacttggtgaatctggaacaaacgtcaataacttgtcctacctccttgtttaatttcctatcttggtaaatccgcgtttctttgattaatagaaatccgcgtttctcttcttttccaatttcttcattgattcttcttctcgtgtcgatcaatacaataccaagccaaaatctccataactccacgcttgcaaatttcttcccaggtagattcctccctctccctctctttgatttttcttcatatttgggtgttttatttgttctcaatcgggaaaatccacgagctaaggaattgatatatattttggtttgtgttctatctttctgatctaaatcgcaagacgaatattgtgacgattcttatgatttgcgagtaatactacttgttgattggtgattgatcttgcttttgctttgaatctctctgcagaggaaataaactctctagatcagtagcttatatgcgttactgataatg

SEQ ID NO: 14158 - DNA, 3000 bp, Unknown
  misc_feature (1)..( 3000): cDNA_ID_2706138_gDNA_ID_2214703_Annot_ID_189751 3000 nt of promoter + ATG
agatgtcaacatgaaataaacgaagaacgaaactcaagaatgaaccatattttacagatcaggacgtaagaaagaaaagcaacaaacctgatgaattggaggatacattaaatttgtacaaaccggacattcaaggagctcataaacaccattgctcgaatggaattttccaatggagccactacctgattttgttggtttgctattagcctcaacctttgccatcttaacctcataatctacgcctgtcgagttagattctagagcttctttcaatgcactgccaccaggagccatagagagtccaaacctagccaaaacttgttttatttctaacagcaagtaagtgaaaatccctagtcctctcttgttgcagatgatgtactcctttcgatgatatattcctttggaacttcgttcttctgcaagaaaaacaaatgatggctaaatatacaacatttaaggaaatgttatcaataagcaagcaggtaacatgttagttaaaaaactggagcaaagtaggttaggaagtagatacgtggtgcacttgatcaagttcttttctttctttccggaaaaagggaccaatgatctcttagcagtacaccatactgcaaatccagtcttataccgttgcggtccaagcatataaaacgtagcagccacttcgttaggaaaaaaggatagtcttgtgaattaatgtgactaagttcattcccaatcaactgaaagttgccaacacatctttctttccacgagcctgttgcgtctcaggtccctcgattcttcacaatcctttctaaatgctagcggagtaaaacagttatgtaacaagtcagactttttaattcaaggagaaacagttcatctatgaacaatgctaaaaccttacaagttccaatattttaaatggttataatataacaatcacaggctattcaaacatcaaaaatagagctgtcaaatgaaacgatctgtttttattttgcaagacataacttttcaatgtaaactatacaaaagagaaattgattcaacaggaaaacacaacaagtagaacaaacaaacatcaggtaagttcaaactcaagatctcataaaaatggaggaaaaaaactcaaaaaatttaaaacaagtagcaaattttgaattatgaaaacaaattgaagctgaactcaattttcaaaaactttgtacccacaaaattattcaaaatcacctcatcagcgacaaaagttatttccgattacatgaaatagttaacgaatccataaactaagcaattcaaagacaattgacaagaggaacataactcattcctaaaagacttggccagattcgtcacaataagcacccctgaacgaaaaataaaaacacagaaccaaaaacctagttcttaattcctaagctcgtgtttttttctcgattctgatttaagaacccattaaagaaaaaacccaaatttgaacaataaagagagagagagagataattacccagggagaaatttgcaggcggtggcgttcgagttatcgaggttttactttcagattcacatgaggattgaggaagacgaaaatatcaattaataagagattgaagaagaaatgggctttgaattaggaagaagaagaaacgaattaagacggcagggagagggaggagatagttgtgtcgtgtcttgttgttggtatcgatgaaagccattaatggtgctctgtttttattacagcttttcaatttgaatttcacccaatttcgtttttcttactttttggtcccttttgtttttctaaatagacaaatgtcgtccaaaagtattctttaggggtcaattcatcaaaataaatgtaggtggtgtcttaacaacaaaataacgaaaaaggtgtcctcatctcacaatttgtcaaatgtattgttaattttttctttgtttcattattgtccatcaattcgagtttacaataaaaatcttcatttttgattgatgtaattctcaactctcaagatataataatccacacaaacaaacaaaaaaatgtcaaccttacttattataaatagttatgtatcaaatgattctcttgtatggctatgaagtatgaacaatcagactatgcctcggcaagcagcaaatatgcttacactggatccagttgccaccttcagaatggcatacaaggcccataaattggtccaactgatccagggccagacacatttggaagtcaagctgagtcttgttgtatgattgtatcctatgcagtgtttgtgtatgagctcaaagataagatcattatctgagcattgaaagtttcttacaagttggacaaggccacatcattatgatcaatcaatagggaagagagttgtaaaatgatactctcacaccttcaatggcctgcagagcctcatggaaatgtgatttgttaaaattggaaaaattttaagttctgaaacttttgcatatactatagtaaaaatcggaaaatgttacattgggtcactatcgattacataaggaagaggtaatgtgaatgggcttgtagttacctaccaagtaccaaacagagcaaagtaaagaaaacaataaatgcaaaaaatctaattccttctatttattgaagaaagagtttttcaaatcttcaaagacattctgggtaactctgtcaccacagttgactgtctcatatccccacgcgctaactcctgaacgtcaaactcaccttcctccatctctaaactctgtgttttagccacgcgtgtaatcgcgtgagtaagaaccaccaacaatgggaccaacttgcttaaaaagatttatgggttttcgcttttattacacactctcccaaatccaaagaagcgtttgtgtttagatacgtggtggtgggcaaagaaaagaaccaaacacgccactaggagctaccatctctgttttattgctgcttctgcttcctcttccattactcgtcttaaaacaaaggagaaagagtcaagagac

SEQ ID NO: 14159 - DNA, 3000 bp, Unknown
  misc_feature (1)..( 3000): cDNA_ID_2706134_gDNA_ID_2214703_Annot_ID_189750 3000 nt of promoter + ATG
gtcgtctccgtcgttgatgtatcggcgacgttcacggatggacttgtaagagaggagagcacggtcagagaagcgagaggtggatgactcacgggagtgatggattggtgagcaatggtagtaatgtggatgtgtaggtgaacccattaggctgcaaccagaaccaaatgacatcttctccacgtcatggtttgatggactctgtacatagtaaagaggtctaatcgctgaacgcggcggagacaaagccgctgcgtcgatgcttgttgcctccgagtctgtcttcgcatgcatgtctcttgactctttctcctttgttttaagacgagtaatggaagaggaagcagaagcagcaataaaacagagatggtagctcctagtggcgtgtttggttcttttctttgcccaccaccacgtatctaaacacaaacgcttctttggatttgggagagtgtgtaataaaagcgaaaacccataaatctttttaagcaagttggtcccattgttggtggttcttactcacgcgattacacgcgtggctaaaacacagagtttagagatggaggaaggtgagtttgacgttcaggagttagcgcgtggggatatgagacagtcaactgtggtgacagagttacccagaatgtctttgaagatttgaaaaactctttcttcaataaatagaaggaattagattttttgcatttattgttttctttactttgctctgtttggtacttggtaggtaactacaagcccattcacattacctcttccttatgtaatcgatagtgacccaatgtaacattttccgatttttactatagtatatgcaaaagtttcagaacttaaaatttttccaattttaacaaatcacatttccatgaggctctgcaggccattgaaggtgtgagagtatcattttacaactctcttccctattgattgatcataatgatgtggccttgtccaacttgtaagaaactttcaatgctcagataatgatcttatctttgagctcatacacaaacactgcataggatacaatcatacaacaagactcagcttgacttccaaatgtgtctggccctggatcagttggaccaatttatgggccttgtatgccattctgaaggtggcaactggatccagtgtaagcatatttgctgcttgccgaggcatagtctgattgttcatacttcatagccatacaagagaatcatttgatacataactatttataataagtaaggttgacatttttttgtttgtttgtgtggattattatatcttgagagttgagaattacatcaatcaaaaatgaagatttttattgtaaactcgaattgatggacaataatgaaacaaagaaaaaattaacaatacatttgacaaattgtgagatgaggacacctttttcgttattttgttgttaagacaccacctacatttattttgatgaattgacccctaaagaatacttttggacgacatttgtctatttagaaaaacaaaagggaccaaaaagtaagaaaaacgaaattgggtgaaattcaaattgaaaagctgtaataaaaacagagcaccattaatggctttcatcgataccaacaacaagacacgacacaactatctcctccctctccctgccgtcttaattcgtttcttcttcttcctaattcaaagcccatttcttcttcaatctcttattaattgatattttcgtcttcctcaatcctcatgtgaatctgaaagtaaaacctcgataactcgaacgccaccgcctgcaaatttctccctgggtaattatctctctctctctctttattgttcaaatttgggttttttctttaatgggttcttaaatcagaatcgagaaaaaaacacgagcttaggaattaagaactaggtttttggttctgtgtttttatttttcgttcaggggtgcttattgtgacgaatctggccaagtcttttaggaatgagttatgttcctcttgtcaattgtctttgaattgcttagtttatggattcgttaactatttcatgtaatcggaaataacttttgtcgctgatgaggtgattttgaataattttgtgggtacaaagtttttgaaaattgagttcagcttcaatttgttttcataattcaaaatttgctacttgttttaaattttttgagtttttttcctccatttttatgagatcttgagtttgaacttacctgatgtttgtttgttctacttgttgtgttttcctgttgaatcaatttctcttttgtatagtttacattgaaaagttatgtcttgcaaaataaaaacagatcgtttcatttgacagctctatttttgatgtttgaatagcctgtgattgttatattataaccatttaaaatattggaacttgtaaggttttagcattgttcatagatgaactgtttctccttgaattaaaaagtctgacttgttacataactgttttactccgctagcatttagaaaggattgtgaagaatcgagggacctgagacgcaacaggctcgtggaaagaaagatgtgttggcaactttcagttgattgggaatgaacttagtcacattaattcacaagactatccttttttcctaacgaagtggctgctacgttttatatgcttggaccgcaacggtataagactggatttgcagtatggtgtactgctaagagatcattggtccctttttccggaaagaaagaaaagaacttgatcaagtgcaccacgtatctacttcctaacctactttgctccagttttttaactaacatgttacctgcttgcttattgataacatttccttaaatgttgtatatttagccatcatttgtttttcttgcagaagaacgaagttccaaaggaatatatcatcgaaaggagtacatcatctgcaacaagagaggactagggattttcacttacttgctgttagaaataaaacaagttttggctaggtttggactctctatg

SEQ ID NO: 14160 - DNA, 3000 bp, Unknown; identical to SEQ ID NO: 14154
  misc_feature (1)..( 3000): cDNA_ID_1034283_gDNA_ID_2214703_Annot_ID_189747 3000 nt of promoter + ATG

SEQ ID NO: 14161 - DNA, 3000 bp, Unknown; identical to SEQ ID NO: 14159
  misc_feature (1)..( 3000): cDNA_ID_2706134_gDNA_ID_2214703_Annot_ID_136910 3000 nt of promoter + ATG

SEQ ID NO: 14162 - DNA, 3000 bp, Unknown; identical to SEQ ID NO: 14158
  misc_feature (1)..( 3000): cDNA_ID_2706138_gDNA_ID_2214703_Annot_ID_136911 3000 nt of promoter + ATG

SEQ ID NO: 14163 - DNA, 3000 bp, Unknown
  misc_feature (1)..( 3000): cDNA_ID_3021988_gDNA_ID_2214703_Annot_ID_136913 3000 nt of promoter + ATG
aatccgaatctctgagaaggtttagaagtcggtaccggtcacgtttcagacggattgatatgcttccggttcttgctgagacacatagcccggcgatggaattgagtcagttgttgatcacttctggaaatgtagttgctttgcctgctggtgagggaagcatggctagtggagaaagggtcatcgaggactccaaaaagtgcgagaatgggagcaaagtgatggcagaagacaatgtaacagaggagaaaagagatgttgagaagagcgttggcagcgatgggagctttttcgattgttatatatgtttggatttgtccaaggatccagttgttactaattgtggccacctttactgttggtcttgcctttaccagtggctacaggtttcagaggcaaaagaatgcccggtttgtaaaggggaggtatctgtgaaaacagtgactccaatctatggacgtgggatacagaaaagagaatctgaggaggtttcaaacaccaagatcccttcgagaccccaagcacgacgcacagagagtttgaggactacacttaacaggtcaggtcatataccaacggaaatatttagacatttgcaggataggcttgaaagggaatctagtacaggagaaagacgcgccagaccatctcttaaccggtttatgacttcgaggggagttagagcagaggagaaccagtctagtgaagcactggttgaaccttcatcagatgagattaacgatattgatctgatcttaaataatgcccctgaaaatgaagaggaaaacgaaaacctaagctcgtcacgtgctttggcaacccagagacgatgggcacagatgtatgggagggtgtcgtcgtttactttgagctctgctgaaagattagcggatacttatttgataacacatgcattggggaggaaccaagaacaaaacagcagtcctcctgttggtgttgaagacagggattcgttctcaagcatagtaggtgtgataaactcggagagtcaagttgaaacggcggctgagattaattcaatgttgactgtatcgacttcttcgtctgttagaagacatgagaacagttcaagggtctctgatgttgacagtgcagattctcgtccactgaggagaagaaggagattagcttagaagagaatggaggagaagaaagaggaagctagagtaataatctgtagtagaaagcagtgattttattggttttttcagtttgttttttatatgggattttggatttttgttgtttcagtttttatgctaaaagactaataaataaatacatcaataggatatatggttttttcaattcttttgatctggtgaatgaattcggttgttggcagttgttgacttgttgcggcagagttttgacttgtgatagaatataaaagtttttgttgttgactggacaaaacgtcgctttggccgagtggttaaggcgtttgcctgctaagtaaatggggtttccccgcgagagttcgaatctctcaggcgacgaattctattttacatttttatcgacgcggggtttgtaaattgtaaccaacctgtgtccctctgttcatgcaggagctagatagccaattgaagatagaagcaaaacgtaaatttttttataaatagattgaaaaatctgatctaaaaagtttgttaatcaaaatactatctgaaatctagtaagaataaatatttgaaggttgaataagggaaaaaatgagcaaaaaaggaaacgaacttggtgaatctggaacaaacgtcaataacttgtcctacctccttgtttaatttcctatcttggtaaatccgcgtttctttgattaatagaaatccgcgtttctcttcttttccaatttcttcattgattcttcttctcgtgtcgatcaatacaataccaagccaaaatctccataactccacgcttgcaaatttcttcccaggtagattcctccctctccctctctttgatttttcttcatatttgggtgttttatttgttctcaatcgggaaaatccacgagctaaggaattgatatatattttggtttgtgttctatctttctgatctaaatcgcaagacgaatattgtgacgattcttatgatttgcgagtaatactacttgttgattggtgattgatcttgcttttgctttgaatctctctgcagaggaaataaactctctagatcagtagcttatatgcgttactgataatggataatcacggtcctcgttatccatacccttacggtcagtacccatacccttacccatacccagctccttatagacctcccagttcagagccatacccacctcctccaaccaatcaatacagtgctccttattacccttacccaccacctccatacgcaacaccaccaccatatgcatcaccaccaccgcctcatcagcacacttcgggttcgcattctggaccattagactatagccacaacccacaaccatcatctctcgcggctgctcctccagagtatcacagacattcttttgactaccaaccttctccttacccttatcagccccaaggtaactttggtgcttatggtcctccgcctcctcactattcgtatcaagagccagctcaataccctccacctgaaactaaaccgcaagagcctctgcctcctccgcagcaaactcaaggttttcaagaatatcgtaggcaagattgtctcagtaccgggggaacaggtcatgataatgtaagcaattctggatcttcttatcctcctgtggatgaacttctaggtggtctgcatatttctactaaccaaccaggtccctcagttccacaactatcctcccttccttcgaactcttggcaaagccgccctggggacttgtatggttaccctaacagctcgtttccaagtaactctcatttgccacagttagggagagtagattcctcaagttcttattatgcatctaccgaatcgccacatagtgcggatatg

SEQ ID NO: 14164 - DNA, 3000 bp, Unknown; identical to SEQ ID NO: 14156
  misc_feature (1)..( 3000): cDNA_ID_2706095_gDNA_ID_2214703_Annot_ID_136918 3000 nt of promoter + ATG

SEQ ID NO: 14165 - DNA, 3000 bp, Unknown
  misc_feature (1)..( 3000): cDNA_ID_2706099_gDNA_ID_2214703_Annot_ID_136919 3000 nt of promoter + ATG
aataacaatttatttaccaaaataaagactctaaattaagaagaaagcacaaagagcactcatcaccaggacgaatctcggtatacatgatatgctaacaaacttagacgcattttctgtgaacaatcgccgctccatgttcttcatattcatccttagttatccacatctgcaatatggacatcaaaaaatttagattataacaaccccaaaaaacttacactaattaactttaaaaccacattttatatcatcttatttacctggtgaaaggtgcttagagaagccaaaatggagcctccaatccaaacactacactcactttccggaggaactacaactttaactttcatactcgacggtacaagtgcatttagctctttggtcattctttctttaatcccatgtaacatcgtcgtgccaccagtcatcaaaatgttaccatacatatccctcctcgtatcaacaggacacttcaagatggaattgcgagtcgcctcgtgaataccagaagattcctttccgatcacagacggctggaaaagaacctcggggcacatgaatctctcggcttctatcgtgatctcttgaccatcgggaagcacgtaggttttatcgattgtccaaccctttgttgtcttctccatttcttgctcgtagtcgagtgctacgtaacaaagcttctctttgatgtctcggactatttcccgctcggcggatgtggtgtatgtgtagccacgttcggtcatgatttctatgaggtagtcagttaggtcacggcctccaaggtctagacgaagtataccgtgtgggagtgcgtaaccttcgtatactggaactgtgtggctcaccctctctcctaaatccaacacaacacctaaacacgtagaaacttaacatagtaattaagtcatggattgtttcacacgcaaatacgcaattcatgcatttgcgtgtattatagtgaccaaaaaagttcaacagcaaaaattcacattttagaatataacaacattcgctgtttgcatttgatgttctaacaagatccactgctaaattatgagactccaagcttataaactaacaaaatattaatttctcttaatttatgacattttggattttggttgcttacctgtggtacgaccactggaatagagataaagaacagattgcatggagacgtacatagcaggaacatcaaagctctcaaacatgatctgagtcattttctcacgattggctttagggttataaggagcttcagtgagaagtacagggtgttcttcaggatccacacgtagctcgttgtagaaagtatagtgccaaatcttctccatgtcatcccaattgttaacgataccatgctccattgggtctttaagtgtgagaatatctctgttggcatgaccttcttctcccacataagattcgttcggattcaatccatctcttggacgacccacgacacatggaaacacaacctttggtgcttcgtctccagcaaatcccgccttcaaaatgtttcaccaattaattggcacttaacaaaacgtttcacgagaaatactccagagtataggtcaaaatatggtttattttaatataaacgcataaatagtgtttagtaaaacaatcgaagccttaacgattaaccaaaaaaaaagtgtgtttctttttaacgtacctgcaccattccatgtcccttgtcacacacgataggcttcatgtcctctgatgccgaaataatctaaagtaaacatatataatgcttccacaaaaaattaagtcataaaaaagttcaaacgcagcattaacagcagaactgtaagaatcaaaatcaaatcacaaacacttggggaagaagaaaagggttcaatttgtatcacaaacttgtttctttggcttgtaatccattattgattaaaaacattatccacttttattttactaacgaaaaccgttttaacaaaaaaaatagcaaaaggtaaatcaacttggagagagatcaaagaggaacaatcgttacgaatcttactctcaaattaaggtggtgtctctctctctgtgtcttgttcttcttcttcttccttctctcgtctcgccaacaagaatgtgtttcaagatcctagtacgaccttgttaatttctcttataaagggcatgcaaagactaaaaagaggcatatgtcctacactaagtaggactctctttttttttcctacaaaagtaaatttgcattatttttactttttagccttccaaatagtgcaattctttcctaatctttgattttttttttattgataaaaactaaaacaacctaacaaaattgaaatgagaattaatgtgccaattcagcttataaagactaacataaaaactaaactagcttcaatttattgaaaaattaaaagttactcatttaactcaacaaaattatactagatgaataagacatatcttgttttgaaatcccttaattaatgatttgattttaattatcttcaaattccatatatattatgtgaaagatttaaggggatattgattaatgaactgagatttcactaattttaatttagtttttataaaataaaatagatagttgttataaaataaaataaaataaactaaaaacacgtattggagggtaactcaaattgaatgtttctcattagaactaaaattaaacattctaattaaccgattaaaaacaattaatttataacctttctagcctattaaaaatcattctaatttccaagtggtttcactctgtttgcggtgatatcaacatattcgtgaggcagagaaaataaacaagtaaatagaggaaaagtaaattgttgttaccggcggtaaatattaaaatgcccttttccgggtcagatcgactgagtcaagcccgagtcacgttacccacatcggcttttggtttcttcctttgcaaaacggcgaaaaagacacaaacttttctcctccgatctcacagagatg

SEQ ID NO: 14166 - DNA, 3000 bp, Unknown
  misc_feature (1)..( 3000): cDNA_ID_2706146_gDNA_ID_2214704_Annot_ID_136922 3000 nt of promoter + ATG
aagactcaggggaggtttcaatagccgggaacaagctgtaagacgaatcttgatcgttgatcttgctcttgttgaaacttgcagatacaagaagaggaggaggagtcaaaggtttaagggatggcttgtaaagtgtctttcttttactcatcttttttgtgtgaagagagtttcttggtgagttatggtgaggaggattgttagctactaagctgttggagaaataagagtgttgaggaagagaatctgaggaaggtttcttcttgctacaagtgtttgaggaagaagaagaagctttgtttttgggtttagagtgtttagtcacgtctttgagcttgtggaaccatgcatttgggagcatctctgaaattctgaacttgtaattccccatcttgtctctctctttttcacaaaagtttgtgatatttctcttaagaaaactctgtttttgtttccttagataaagaagaaggtgagaaagcaaagttctctatgtgacagataaagaagaaactgaagattaaaattggaaactagtggggctactactagaaaaagcttaaagaatgtcttttattagtatcatcatcattcatcatcaacatcaacttgagacatcacatttacacgcttgtgctcacataattaataaatttattttatggtgaatttttaaaattggttgactaattgaaattgtatttggtgaaaaactgaaaatcataagaacataacttttatctaaaatattatataattaagggaatagtacaaaaataattataaaacagagaatcagttgcttctgatttctgacagatttctatcatcatttcatggagattttactcttcatcgaaatgataaaataactgaaaaatgtaattagcgaattataaaacagtagcaaatgtaaacagttttaaagaatacacaaaaaggttgaccaaatggcaattacaaaagaaaaatacagcttcttttcctcgaagtatgctttttgattgaaaatattaaaacgtttctaaacggacaaatcaatttaataaataaaaacaaagttttcacaattcaactaaaagtttaacatatgtgaatctatctaggttaaagactcaaagtacacgttataatgaagttcaatagtttcatttcgatgcttctttgaatttggtaaagtgtgaaccttatcttaagtttttaggtagaaataatttagtatagtagcactttatgttatattaaggtgatacagatacacaaatgatgaaattaagataatcaaatatgttccattttctcctctgaataaagtgggatcaacttttgagtcataataatgaatatgagaaattttttggtctactttgtccactaacgccgaacattttgaggacactttttttcttcttctatacatttccactttccagatcaaatgttttggcaactacttatcttttaacttcgagaaggaaaaaaatgatattcaaaaatcaaaataaaacattttccatccttactttaaataagcacaagtgattattcatatttaaaaaatggagatattttcactagacgtgggactggtttatgttcaacaatgttgacctaccaatatatcaacgactttttgagtatacaaaaacaaaactatctcatcatattggattttgtttataagcaagagccaccaaacatttgcaataagaaaaccttttctattctccattgtttttaaaaacttcatgggactccaccatcatgatcagtttcacacccaaagacgtgaactccacgcaacacaagccaatcctctaaccttatacacaccaaaacaaaacaagaagccaaagaggatcacaacaacaacatcatcaccaaaaaagcttcaagacaatgagagtgaaagcaactttgattaacttcaaatcaaagctttcgaaatcatgcaacagatttgtctctctcttccgcttccgagttaaaagacctgtctttattagacctcttcgtgcccgtcatggcaatgtcaaacctagacatcaacatcatcattccaagaagccaatctgttcttgtctctgtttcctcaattcaagcaagaaccataagatgagcaacgccaaacatagaagttcctcttgtaagacaacttcgctacaaaatctgttttaacattgaaattttatcagcttcttgatctctttgttctcttattttgccattgcagttagtgtgaacgatgatgattactccaagtttatgcaatcacctcttacgccagcaacagccaagaagctcttcacttcacccatcacgacaccttactcttcacggaccaggaaatcgctgaacgcaagagatacatttgaagacaatgctgtggaagatgcttgtagaagctttgaaaactatctgattcatctgattgttgaagaagggaaaatagatgacttaatggacatagaggaacttctcttctgttggaagaatcttaagagtcctgtcttcattgaacttgtctcaagattttatggagaactctgtagagacttgttttcaggtgaatgaacagatctagttaaattgatcaaaacaaaaatgttttaaatctgtatctgtcagtacttgtggtttgacaattattgaatacaacatctaaggtttctaagtttaaagttgggaacaatgtgtgaagactataaaagattgtatgtttcggtcaataccggtcggaccggttcaaccggatttacttaccaaactcgtctcttgcaattttattgttgaataaaaaaattatcacaactgtgtggacacgtgtggttctccgtcctcactcctcaagcccctttcattttatcccaactgtgtctggtctgattaatgaaaaaataaaacaaattcgaagaaatataaatgagatttttgtagctagctcctccaaatccaaatcgttgcgttaaggtttcttcaagtttcaatctttttgcaatg

SEQ ID NO: 14167 - DNA, 3000 bp, Unknown
  misc_feature (1)..( 3000): cDNA_ID_1816028_gDNA_ID_2214704_Annot_ID_136929 3000 nt of promoter + ATG
tgcaagctgggaacgtgagccccaattacagctgtgtgtgtgtatcaggcattattgcagtttctatcagttgattctgtttcttacatgccgtcctacaaaatcctttgcatgttaattaattacttaaaaaatatcctaactatattatttatttctaagtatacataaatattagaaaataacatgattatgatgttgtgaccagagaaaaaaaaaatcttcaagatcacgagtttgaataccaatgacaaaacaataactctttaacatgttttggtcccgagtgtgaattaagaatattgcagcttatgtttttggttaaaagagaaaagaagaaaggtgaatcaagaatattgcggctgtttgtttctcatgtgcaacatgtgtggtacgagattgatgattcttgttacgttagccaacatcgcgtgatgacaactattctaagacgaggtttcacatggccgaaacattaaagcttcgcttaatcatatcaaactccagaatttagtatacttgatcattatttagtatgcaattatgcatgtagttcaaactaatcattggattggatgtattagtctagatttcaaacgtaatttttttccaaggttatgctgatttatatgtttgtgacttatccgaatgtttttaacaaccaatatacaaatattcgaaatttgagaatcatcatatcctattatcctcactaccagttaaaaaatgtcatttgtggaattatatggaaacacaataggtgaaaaaagaagaagttcattacgtgctttgaattttatagttgaatttctatttcagttttataatccagttgtacttgtatgatgcgaatctaatctagtggttcggactatccaagtcagtttcatgaattaaattatgggggaaaaataaaactatttattacaaggataagggcaaagtggccctaagttgattatatatctcttttgcatggtaaaagattatttccacatatgaaaatatgcaaaaatccaaaaaaggattatgtctatatattttgctgtcaacaagaaaattccataagtgtataatgaaatttaggataatacatagaataccactctttttaccagacggcgacattttacactgagttaaaacttataagttttttactcgttccaacagtagtcaattactcgataggtgttacaagcctagctatatataaggtcaaaaaagggagtgaaaaaacgtagtaacttaatagtagctcgttgataatatagaagattccacccaaaagagagcgattccaaaagatatggtgtcattttagttagatttaaatttgaactaattagatagaaaagattaaagatttaatgggaaatacgaagtgaatagagcatgcatgagtaaaagttagaacaaatagatgatatattcttgggtagtaacgtgttatttgacagaaaatcacatgcatatataaaatcgtgtgaacacttatactgtatgtttatcatgcgcatggactattggactccataaatagcaaggttatggttaaatgtagtaaaatggcaaaaaaaaaaacataatatattatatatatatatatatattcaattaactacaaatccttcaaaagtattaacaaaaaataaacaaatcctacaaaatatattgtgttgattttttgcatatttctttttgtcgatggtattttcttcagtgtaggaaaaaaaaattcaatttaagcaagaatgaatttttagtttatattccaccaattcttcccatttcgtttgcaagttctctataaatttggtatcttattttggaatatatattctaccataagactacatgtttgatatgaatcgtcaatttttacttatctatcggtctcaatccactctaagttttagggtattcggaactcaaatttggttagaatacatatacagagaatgacgacaggtagagtatatagcatatacatgtacgcgatcgcaaatttctattataatctttaattagataagtagaatttatgtactattattttcttttcttaggataatttttataacttttacaaacttaaattaaaatgatttcttagagtaattgacaataacaaaccaagaaagtcaaaagagaaaaagaagaacctcaaagtcttttgtgcatgtgtgtgttagtgtcatgcatgcactctatatatttatgatttgcaaaaagaaacatatatgtttctattgaataattctttcttttcttgatgaaataatcaatatttccttatataaataataccccaactgtagaaaggaaaatacctataaattagttgaatacatataaccaaatattaaaattacgtcaccatactattttttttccaaaatatatgattcctaccaaccctaaatttcatttctatatatattatataccaaaaaaacatatcttaacaaagtcaaaaaaaaaccaaagtctttcactttgtgtctgttctaaatctctgcgagttttcttacttttcgagttttgtgtgtgtcttcaagtgtcgtgcatgcattttatgcgtttcgttcacttgcatgctctctccctctttctctctctatctcacccataaaagttttaatttttcacatcgataaattaaattgaaacaaaaaaaaaaattcacccaaaaaaaaaaaacctcgttgccttcttcttcgccgttacagtcctctttctttcttcaattcgccgtcaaaatcttctctttctcttcccccgccggtccttcaccaatcctctgatctctctacacacgaacctttgattttgaccaacgtcgatgcatgttcatgactagtctcttcctcaatccttcaatttcatcaattcacgtcgatttcgtatccgattcgttgttctagctctttgtgtggtgttagggttttaagattttggaattggggtttggagtttgtgatgtttgaagtcaaaatg

SEQ ID NO: 14168 - DNA, 3000 bp, Unknown
  misc_feature (1)..( 3000): cDNA_ID_1976561_gDNA_ID_2214704_Annot_ID_136931 3000 nt of promoter + ATG
gaaagctgaaacagaggagaagcttagaggaggaactgagaaaatcagcggaatgagagacgagagcaatgtgctaagagaagagattgggaagagagaagagaagataaaggaaacggaaaagcatatggaggagcttcacatggagcaagtgaggctgagaagacggtcaagtgagcttacggaagaagtggaaaggacgagagtgtctgcatcggaaatggctgagcagaaaagagaagctataagacagctttgtatgtctcttgaccattacagagatgggtacgacagactttggagagttgttgcaggacataagagtaagagagtagtggtcttatcaacttgaagtgtaagaacaatgagtcaatgactacgtgcaggacattggacataccgtgtgttcttttggattgaaatgttgtttcgaagggctgttagttgatgttgaaaataggttgaagttgaataatgcatgttgatatagtaaatatcaatggtaatattttctcatttcccaaaactcaaatgatatcatttaactataaactaacgtaaactgttgacaatacacttatggttaaaaatttggagtcttgttttagtatacgtatcaccaccgcacggtttcaaaaccacataattgtaaatgttattggaaaatagaactcgcaatacgtattgtattttggtaaacatagctctaagcctctaatatataagctctcaacaattctggctaatggtcccaagtaagaaaagcccatgtattgtaaggtcatgatctcaaaaacgagggtgaggtggaatactaacatgaggagaaagtaaggtgacaaatttttggggcaatagtggtggatatggtggggaggtaggtagcatcatttctccaagtcgctgtctttcgtggtaatggtaggtgtgtctctctttatattatttattactactcattgtaaatttcttttttctacaatttgtttctgactccaaaatacgtcacaaatataatactaggcaaataattattttattataagtcaatagagtggttgttgtaaaattgattttttgatattgaaagagttcatggacggatgtgtatgcgccaaatggtaagcccttgtactgtgccgcgcgtatattttaaccaccactagttgtttctctttttcaaaaaacacaaaaaaaaaataatttgttttcttaacggcgtcaaatctgacggcgtctcaatacgttcaatttttttctttctttcacatggtttctcatagctttgcattgaccataggtaaagggataaggataatggttttttctcttgtttgttttatccttattattcaaaaaggataaaaaaacagtgatatttagatttctttgattaaaaaagtcattgaaattcatatttgattttttgctaaatgtcaacacagagacacaaacgtaatgcactgtcgccaatattcatggatcatgacaataaatatcactagaataattaaaaatcagtagaatgcaaacaaagcattttctaagtaaaacagtcttttatattcacgtaattggaatttcctttttttttttttgtcgtaattggaatttcctttatcaaacccaaagtccaaaacaatcggcaatgttttgcaaaatgttcaaaactattggcgggttggtctatccgaattgaagatcttttctccatatgatagaccaacgaaattcggcatacgtgtttttttttttgttttgaaaaccctttaaacaaccttaattcaaaatactaatgtaactttattgaacgtgcatctaaaaattttgaactttgcttttgagaaataatcaatgtaccaataaagaagatgtagtacatacattataattaaatacaaaaaaggaatcaccatatagtacatggtagacaatgaaaaactttaaaacatatacaatcaataatactctttgtgcataactttttttgtcgtctcgagtttatatttgagtacttatacaaactattagattacaaactgtgctcagatacattaagttaatcttatatacaagagcactcgagtgttgtccttaagttaatcttaagatatcttgaggtaaatagaaatagttgactcgtttttatcttcttctttttttaccatgagcaaaaaagatgaaataagttcaaaacgtgacgaatctatatgttactacttagtatgtgtcaatcattaaatcgggaaaacttcatcatttcaggagtattacaaaactcctaagagtgagaacgactacatagtacatattttgataaaagacttgaaaacttgctaaaacgaatttgcgaaaatataatcatacaagtgccagtgattttgatcgaattattcatagctttgtaggatgaacttaattaaataatatctcacaaaagtattgacagtaacctagtactatactatctatgttagaatatgattatgatataatttatcccctcacttattcatatgatttttgaagcaactactttcgtttttttaacattttcttttgttggttattgttaatgagcatatttagtcgtttcttaattccactgaaatagaaaatacaaagagaactttagttaatagatatgaacataatctcacatcctcctcctaccttcaccaaacacttttacatacactttgtggtctttctttacctaccaccatcaacaacaacaccaagccccactcacacacacgcaatcacgttaaatttaacgccgtttattatctcatcattcaccaactcccacgtacctaacgccgtttaccttttgccgttggtcctcatttctcaaaccaaccaaacctctccctcttataaaatcctctctcccttctttatttcttcctcagcagcttcttctgctttcaattactctcgccgacgattttctcaccggaaaaaaacaatatcattgcggatacacaaactataatg

SEQ ID NO: 14169 - DNA, 3000 bp, Unknown
  misc_feature (1)..( 3000): cDNA_ID_3022046_gDNA_ID_2214704_Annot_ID_189794 3000 nt of promoter + ATG
cagcaacagcaacagtttcatgaacggttacaagctcaccatcttcatcagcaacagcagctacagaaacatcaagctgagcttatgcttaggaaatgcaatggtgggataagtttgagtttcgataactctagttgtactccaactatgtcatccactaggtcctttgtttcttcacttagcatagatggtagtgttgctaatatagagggaaagaactccttccattttggggttcctagttcaactgatcagaattcactacattctaagaggaaatgccccttgaaaggagatgaacatggaagcttaaaatgcgggagctctagccgatgccactgcgctaagaagaggtcagttccatatttttgtttcgttttcatagcctctctttactaagatggtgtagttaatctgattgggaaattgacaggaaacatcgggttaggagatcgattagagtaccggctataagtaacaaggttgcagatatccctcctgatgattattcatggcgaaaatatggtcagaagcccatcaagggctctccttatcccaggtatacacttcttgatcatattttgttatgttaagaagtgataaagattgatgtcacatgcaaagaaccatccttttaacattaaggcttttgagttttgatgagaaaaaagagtctaaaaatggctaagagatgacacaagtaagatgagtccttttaaggaagtgttgtattggatttttgtgtgcagaggatattacaaatgtagtagcatgagaggttgtccagcgaggaagcatgttgagagatgtttggaagatccggcaatgcttattgttacttatgaagcagagcataaccacccgaaattgccatctcaagctataacaacttaactctcgtttatctttgcggtccagcataaaccttctcatgtatgttgttctcttttgtgcgcgatgatcggctttggggttgctgcaatgttgtgatatatggatcggggtaagtgcttttgttggggtggatttgcttgtgagagtttgctgcaattgttggattttgagctatatatggggtaaatgtaggattggtcaagactctttttctgtttctcaagtttattggtcttaatgattaaaagtttaatggtttgtttctggctatgtatcttttttttcttctcaagtggctttttcttttatgattggtactgttagaatttggagattgttgctaagtaacttaatcatttagcaaggtagcttaaatctaagatgattagggataaagaatattggattctgttctgagtttagagaatattggattctgttctgagtttagagaatattgaattcatgtatcaagcataatgaatgaaacttattttaagacaaaattgagtttgagattccattttaggaatagacaacaagtctacaaagtgctcacttatgtactaatataagaattcactaagttagtaaacctatcattaatcccgaaaatgttaagtagtttgatgaaaatcagaagtatgcgtaaaataataacaaagaatgagaaaatctgacacgtttaagcgcatttttggtaaatttaatctgaatattcatctcattcttttttaaagaacacttacactaattacattcccttttcttctccatttatcatgtattttatataatattctcatctaaaagatcattctcattaatagtatagattatttaaaagtgggtgttgaaacctacaaaataaaattaaaacacatttcaaaactttaaaatggatgtctcttacatatgtaacagaaatcacattgtccaactatctactatacttatgtgaaaaaaacatacatatgcccaaaattgttatcaaaccaaaatgttctggaaatagcccattggacatctatttataaaattgcatacactttagctaaaaaaaagtacttcagtttgttgttagaatattcaaattcaagaattatttttgaaagaattgtgtgcagaatatcaaagaaattttgaaataattcagaattgtgtacacaatatcaaaaaatccatttcgaaaatgctttgtacacttgtgttttggcttgtatttttattttaaaagtatgatatgtaaaataaataggaagtgtaggattattctttttcttgtctaataaaaaataaaaaataatcatatgcatttatgaagataattaaacttttaaatactttttaatatttcatacatattatccatttctcattccaaaaaaagagtttaattctcagtttcagaataaaatgtgggccttatacagatttagttggcccattaatgtacaggtgacaataatccaccaactcgtttctcctgacacaaaaaatatctcatcatgtcttcttcttcgtattcgtgtctctcatttccttttttgactcttctttccaaaaaggattagatctgactcactattacgtgtcacgcacagttcattaggtacgctcggaaaattttatccacacatctaaatatctgatttatgatcaaatcacccatttttatttttccttttgtagcttctcaaatcttttgtctttattcgatttaaaagttgatgtactctgcatctgattgttttgctcgtgttttattaccacgttgtggttgaaatttgacggcggaagttcatggtggggtatgaagccagttggattcagatttttttgccaagttgattgctttctagctgattcattgaaaataacgttcctttttaaaaacccatttgttatcattgtcttctcaaaacgtatgatctggtttttcaaaagtgagtctggttgagttctatgtgtttgtgaaaatgtctcaatgagtgaaattttgtttctttttatgtttttagtgtctttgtctttggttatatagatgttgatggcttgtgggtttggaaatattgtaggtgaaggcaagagattttatgaagaaag

SEQ ID NO: 14170 - DNA, 3000 bp, Unknown
  misc_feature (1)..( 3000): cDNA_ID_3022050_gDNA_ID_2214704_Annot_ID_189793 3000 nt of promoter + ATG
tttttgcatttgtttctagatatttctaaactgttgggaaataaaaaaatttgcacacaaaacatagttaaattcacgtggtatttatagagatttacttcaaccaaatttggattttgggtcattgttttatggacggataaactatccattagtcaaatttccacaaaaataatatgtgaattagattcgacaaggctaattcccccacaacatacgatactagaacaaacgtacttgactacttgacgtaacaatgtttctcttactgtcttgaaaataacatataactcgttcatcaccaattttcttgtacatgattgattaagtgtgtaagcatctttttcgattaatgatgatgatgttaattggagaaacaaatttttcataaattcccttatagacaaagtcttataattttgttaaattccgcatatattttaccaaaactttgtcgaatggaaagacacgtcaaatgtgctaattagaaactgttgtattgagatttcaagaggaatcaataataaggtactactagggttttatttcaattaggtttgaatcttgggtcattgtgacgaataaattatctacttgtcgattttctacaaaaagcacacatgaattagattcaacgtggccaattcatctaacatatgttactaaaacaagcgcaatagacgagttggcgtaattttattttatactatctataaagtaacgtatgattcgtctatcaccaattatcttgtaaatgatggtaaaatgtctaaattcgtttgtcgcttaataatgatgatgatatacgttactttaattaaaaaaagcgaattttcgatagatactctattaactaagcatgcacatatcacgttgtgattgatttatgcctagtaaataaaatttatctccagcaagaataattgaaacttcataactaattttgaatgctaaaatgttaaattgatatatgggaaacaagttatgatactcaagaagtcaccaatatctagtattggaatcgctgtggtgtttgtttgtagatatttttctacatttagcaatgtattacattatgattgcaagaggaagcaatattaaggtattaataaggtttttacttttaccgggttagaattttgggtttgtttattggatgaagaaattatccacttgtcgatctttcataaaaagcacacgtgaattagtttcgacatagttatatagttctcctaatatacgttatttgaacaagaatacttgactagttgatgtaacgatgttttcttaacgtttcaaaagtaacgtacgattcttccataaccaaatgtcttgtatataatggtagaatatatattttgttttgtcgcctaatgattatgatgtgcgttactttaatttagaaagcggactatttaaaaactgctatattgaaaccgcaagagaaagcaatagtaaggtattaatatggttttacttcagccagatttaaaccaccaacaatactttaaaccattggtcgatctttcaccacaaaaaccacacgtgaattagattcggtgtggctagttccctaaacatacgttactagaacaagcgcacttgactagttggcgtgacgatgtctttcttactaatttaaaagtaacgtatgattcgtccattaccaattgtcatatacctaatataaaatataaattcgtttgtcgcttaataatgataacatgcgttactttatgttaaaaagccaattttcgatagattttctattaattgtaacgttataattcattatacataacaaaaaaaatcttcaacaataatatattgaaatttcataactaatggatgctaaaatgttagattaatagatagagaaaacttataatactcaaaacatttaacaccaaaatttccaatatctagtaatggaaatgtaatgtttgttagtatataaatttctgcatttagcaacacttatgcttaaaaacacatcattgatccgtagaataaaaagacacctcaagtgtactaagtaaccgttagaaactgcgtaaaaaagtttggtaccactttttcttttactttttttgttttgtcaagttacttatcaaaaacttggaaattaactttctctctttttttttaaactcgtgaataacaatgaaacattcgtatatttttatatcataaaagaaaacaatacggtattatatgaacaaaaaaaacttaaagataaaagaggtcaacaaaatgtccgaagtatgatgatgctaagtttgattagttatcttttttatgtcagagaacaattaaatttgttttattattatactaaaagaagaaaaacctaaactgcaaaaataataattacgacccgagtcttcgagtaggacccacctctgaatctgtgacagacgccggtttcgttctctctctctcctttttttcctctctttgcttttccaaaaaataaagttgtctttttttatttataataaaatgatttgttgtttcacagtgtgttgtttgttttggggtaaaaaagaaaatcataaggatgctttcaatatttgttttgttttggttgagtgattgctgaagccaacttaaaagagagagaagagaagagtgactctgtgtgtgtgtgcaagaaagtcttctctttcacacctttcgttttctcgaacctctcctttaaagatggtggaggaatcttgggtttgacaactcattaacactgaccctctttttagctctacaagcatccaaggaacccctcttacttttccctcttcttcattccctctctctctatatctcccaattccttctctttttttaaccttgatcttcttcttataagagactcagagctgttcttcaagatgggattgtgtaagcttgaaacttgactatctgggtctctcccattttctgttctcttttgtattctgagtgaaagttttgttttctgggggaaaaaattagggttcttag

SEQ ID NO: 14171 - DNA, 3000 bp, Unknown
  misc_feature (1)..( 3000): cDNA_ID_1570474_gDNA_ID_2214704_Annot_ID_189790 3000 nt of promoter + ATG
atcggggaagctttcttatctttagataccatgtatttcaggaaataatcacaaaccaaaggaggaacaagcagtttcacagaaaaccacagtaagctcgaatgcggaggtacgtagtttaatccagttgatttgaagataaaaggaacttgattatggattagttagaagcaattgactatgagaattctagtatctttttgtcaaatcacaggacactttcttcaatgggatttgctaacacttgttaatagaaaatcgaatttagaatttgcatccagatagtcatagcatatgctttaattttgtaatgtatgttccatttcctgtctcaggtgaaaatttcagcaagagatattcaacttaatcataaaacggaattccgacccccttcaagtaagagtgaaaagaatacaagggttcaacttgaaagagcaacagatgagagggtaaaggagatcagagacaaaattatccaagcgaaagcctatctgaatttggccctacctgggaataactcccaaatcgtaaaggagttgagagttcgaacgaaagagctggaacgggctactggtgatactaccaaggataaatatttgccaaagaggtgagcacagctgattgattcaaagggagtcctgttccatcctgtaaaaagttttggcctttacttatgaagctaaatcttaatgaatattgtgttaatttagaagagtcatacataaatgttttgtttcttttcagctctcctaacagattgaaggccatggaagttgcgttatacaaggtcagccgtgcctttcacaactgccctgccattgctaccaaactccaagccatgacttataaaaccgaagaacaagctcgggcgcagaagaaacaagcagcatatttaatgcagcttgcagcaaggactaccccaaaagggcttcattgtctctcaatgcggttgacaacagaatattttaccctggatcacgaaaaaaggcagcttttgcaacaaagttataatgatcctgatctctaccattacgtagtcttctctgacaatgttttggcctcttcggttgttgttaactctacaatctcctcatcaaaggtaaatgtttcacctttattctctttctttcaacatgttgtggttcagttcctttatactcctgaatttgatatctggacaaatgctttaggcttctactgtggttagtaccatatataggatattgtctagttatgaaactaggaaaaggaagttacattttgtgtgctctttgttcagtgaataactttatctttttttaaattacagttgagaaaccttgcattgttttatgttttcatgattcaaaacttatgccccatattgcaagcatcttacacttgttaattcaaaactcaggtatcattttaaatcatgttgcaagcatcttaaacttgttaatgcaagattcccgatccaaacttgtgtttttaatgctcttttccgaatctctgctgaagccacatgtcttttaacaaatgatattactgcttgcaggaaccggataaaatagtattccatgtggtgacagattcactcaattacccagcaatctcaatgtggtttttactaaacccaagtggcagagcttcaatccaaatcctaaacattgatgaaatgaatgtcctgccattgtaccatgctgaattgctgatgaagcaaaattcaagtgacccaagaatcatttcagcgctcaaccatgcacgcttctatctcccagatatcttcccaggtctaaacaagatcgtactcttcgatcatgatgtagtagtgcaaagggatctaactagactgtggagccttgatatgacggggaaagttgttggagctgtagagacttgtcttgaaggtgatccttcatatcgttcgatggactcattcattaatttctcagatgcatgggtttctcagaaatttgatcccaaggcttgcacttgggcattcgggatgaatctatttgatctcgaagaatggagaagacaggagttgacttctgtatacctgaaatacttcgacctggtacaacattttatcaccttttagttctctgcatcaaaaattcacactgttaccttgatgagttttgaattcaaaatggttaatgtggcttatgtccgtcaatagaacatcttacatatgtgtatgttgtgaaattgttgttttggttgcagggagtaaaaggacatctgtggaaagcagggggattgccagtaggttggttgacttttttcgggcaaacgtttccgttggaaaagagatggaacgtgggtgggttaggtcacgaatcaggactcagggcaagcgacatcgaacaagcagcggttatacactacgacgggatcatgaaaccatggctggacatcggtatagacaagtacaagcgctactggaacatacatgtaccttaccatcaccctcacttacaacggtgcaacattcacgattgattttttgaaacaagttaccacaaaacttagattcaattcgattcttttcttctttccaaaatgttataattagcttcattctttaaacgatttcttgtgtaaatctttgttctttttgacacaacacacaaaattctcagagcagaatatcagatatagttcacagcaacataggtgttgttcgttctttgggttgttatatattgcaatctggatgcagtttattatgatgtatcagtagagaagagagaaaaagattgtgttggagggaaagagatgaaatatgacacgtggagggcgtcgattggtggagtatggatagaagcatatccaagttagatggcttgtgttggttcgaacagattttttatccaccacatatttatgtttgatccaaaagccaacacaagcaaagaaattaaaagtgttcttgttgctgtagaacacaaacagaacaaacaaaaaatcaattgaagagtctctcagtcgttaggggaagcaaatagagaaatg

SEQ ID NO: 14172 - DNA, 3000 bp, Unknown
  misc_feature (1)..( 3000): cDNA_ID_3022070_gDNA_ID_2214704_Annot_ID_189784 3000 nt of promoter + ATG
gcatacaaattaatggtttagctgtcaaatacaaaaaacatgattttatccacaatgaatctagtaacaatctacaacaacaacaaaaagaatctagtactaaaattggggtcaaaatctattgttaaaacttaatcctcttatttgaaacttcatcttatcttaatcctcttattgctcttttagttgaaacaactctcccacttttggaatttataaataaattttgcaagcttcacatggagtatagtgtgataaccatataaagtcacatgcggctagacttgagagtcgacacatatgtttatgtgcaatgtattggttgggcttcttaattatgaaacaaatgggctttgcaataacaagttaagtttctcgatcaagctaagcaatatctcagctcgtgtgttgattgtttcttttcttggtcaattccatcaagctatatttcttctagtcacggtttcgtaccgttgcctctatccgaatccatgcaacctccccaaccatatataacagataagagatttgcacaaatgacagcgaaatgtgctaaactcgtctggcgtttcctaagaagacgacattattgtgtgaattggaagaagcgtgattagggaaacttgacgtggactttttgggctattgacaaataataaccaactttggcccaaactgttcgtattaatttgtggttcattttgttttctagttgcatcttttcttagcctttgtcccctcggtttagccgctgtgaggtcgggaccgttgttaattattgtaacaccgcataattacataataatataaactcgcaaaataaaaaaaaacctatgagcaactatatacatttatttgcaatatgagtttttagtaaaaaaaattacttatatatattaggtaaaaaattttgagttttttttgcattttactaaatgtatatcatggatatgatctgactagaattagctccaatgccttttttgaattcaggtgtgtagaaattgcatatccttaatcagaaaatagcattttggttctacttaccgaatcaaaccaaaataaaccacaatcctatatgtcaatcctctggatgtaattaaccattatgatcgaaattgttgattgaaactagacggcaatacagctcagggtatttgtacttttgttaatagattgatagcaccatcctcttatggtccaacctatttcctaacatgaatttttcatctgaataatttagacttgtattaagaccttgccttagcacctttttacaaaatttaattattattctctctgaattaatgaaatttatatgtatatcgcctactcatgatctagtggacatctactgtttagctaattcaatattttacattcggatattgtgttttgatgcaaaaccaattacaaaaaagaaatctagggtttggaagtttttgcattaagatttaaacaaaaagttaaacacctcacaaaatttatcacgatactaaaataattttcttatcaaatcacatgttactatgtcagccggagaaaaaagactcacatgacatattatcacatcgattcacagaaacttacatcaaaatagaaaaatcacgaaaactggtaagggtttttaactttttatgaagacccattttgtgaatcttcacattcaaactacaaatagtcttataaaactagtcgcaccggcagaaaattattagggcaactaggcaatgtaagagacgtgagatatctttaaagacgataggaacacgtgtataaacatgattggaagacaaaactgaaactggattctgatggatgatttgacgacgtagctaagccaaacaccacgaggttctaagatgaagcacgaccacatatttggggtgggccttatctatgacatgttcctacttccctaacttccatggtcctacttctctctaatcgtacatccacttttaatttcgtttcttatctgtcaattattcacatgcgttgcttttttttctatattcatagcattgtcttcctttaattcagaatttttaggcttttagcatgtgaaactttaattttgctatcatattctcattaaccaaaccaaaaagtaagattgtttttttctttttgaatgagccactctacaaattgttgccaacaaccaaatatatgaatgatgattggttctcactaatcattatactttataaaattttctaatcatcaccatatgcatgttatgaaatcaagaatttagatccgttctgtacttctggtctgtcacacactcacactttgtcccggcttctatgtccttgtacgatgagattgcttacacatagcagctttatgataagaaagattttcatgttcgtcatattactataatcattgttatcctgcatgttttttgtagtcttttaaccttgaatatcactgtaacatttactaaaataatagttgataatttgaatgtagttagccaaatatcaattagtaaacgttcacttttcttttaattttaattttaatgataaataaatacatttactaaataaaagcgtagtaaagcatgttacttacagagatatgtttattaatgttatctacaaatcaccaagatcgagatctctgttagtctattatcaaaaagttggtgaaacatatatcggtatatatgtggaaggtctaaattacataaaatagccgtcgatacaagtacatatccaaatagggaaaagttaaaaggaaatggtgaaaaggaaagtaaacgacgaagacaaacacaaggattagagtgagttaactaaaagagataataaacacatcagaaaacgacaaataaaaacttagaaaaataagatagaagaagccaatcacaaatattattacattagcaattgggtggattggggggacccatgctaaagaaatttcaatatatagacactctccaattatgcttccatctccttcaatagagaaccaaaaaaaatg

SEQ ID NO: 14173 - DNA, 3000 bp, Unknown
  misc_feature (1)..( 3000): cDNA_ID_3022074_gDNA_ID_2214704_Annot_ID_189783 3000 nt of promoter + ATG
tcaatctctcggatatacccggaggtcctgagatatttgagaaagctgccaagttctgttacggtgttaacttcgagatcaccgttcagaacgtggcggctcttcattgcgcagccgagtttcttcagatgaccgataagtactgcgacaacaaccttgctggtcggacacaagacttcctttctcaagtagctctctctagcctctctggagctatcgttgtcctcaagtcttgcgagattctccttcctatttctcgtgatcttggtattgtccgccgttgtgtcgacgtcgtcggtgctaaggtattattttactcagaactcattctcacttctttgtaagtgttggatctccattttggctagtgtttatgtttttcttttctacctatgtagtagtaactgcaataacccaatctagtaagttagtacagttttaggtatgtttttcaataaatggcaagaatatctggtttagttattccataggtttcaaatacagtaatagtttgaaattgattttaaaatttcatctatcaattttcctaagaaaaatcagtttgagaccattgttcttcacttcttttgttctagtgtttattattaaaaacaaaaatctattttaatattaaagtttagatctatgattactgttgtcagactatgattgcgatttagattcgataggaatatttcatatttaattcggtttggtttccgaatcttaaattgagcaaatcatacttctaccctattccagttccgtgagactcaagtataatatctatgtaatgcaaaatgaattacgagtttaatattttaacatccatgaatttttgtaatgcttggttacagtatctgatacgttttttatatctatttcttttgatatttgaaaggcttgcaacgaggcaatgtttccatgtcgaacaccaccaaattggtggacagaggaactctgtatcttagacgtcgacttcttctccgatgtcgtatcttcaatgaagcagagaggtgtcaaaccttcttccttagcctctgcaatcatcacctacacagagaaatccttaagagatctcgtcagagaccattcaggcagaggagtcaaatattccgatcccggagataacgaatccgacgaaagatcccaacagagagatcttgttcaatctatcgtctctcttttaccttcagacaaagggctgttcccagtcaatttcctctgttctctcctccgttgcgcggtcttcttagacacttccttgacctgcaagaacgagctcgagaagcgaatctcagtcgttctagaacacgtctccgtcgacgatcttttgatcccgtctttcacctacgacggcgaacggttactagatctcgatagtgtcagaagaatcatctctgctttcgtggaaaaagagaaaaacgttggtgttttcaacggtggagacttcaacagaggagtctgctctgtttcactacaaagagtagctaaaacagttgattcttacttagcggagatcgctacttacggagacctaacaatctccaaattcaacgcgattgcgaatcttgtcccgaaatccgctagaaaatcagacgacgatctctacagagctatagacatcttcttgaaagctcatccgaatctagacgagatcgaaagggaaaaagtgtgtagctcaatggatcccttaaagctttcttacgacgcacgtcttcacgcttcacagaacaagagattaccagtaaacattgttcttcacgctctttactacgatcagttaaagctaagaagtggagtcgcagaacaagaagaaagagcagtagttgttctccctgaagctttaaagacacgtagccaactgcaagctgatactacgttagctaaagaaaacgaagcgttgagaagtgagctgatgaagatgaaaatgtatgtttcggatatgcagaagaataagaacggtgcaggagcttcttcttcgaattcgtcgtcgttggtgagtagtaagaagagcaaacatactttcttctcttctgtttccaagaaacttgggaagttaaatccgtttaaaaatgggtctaaggatacttcgcacatagatgaagatcttggaggtgttgacattactaagccaaggagacgaagattctcaatctcttaaaagaaaacgtttgatctaagtgcttttgtgtgttgtgtataactcttttagactagtgtgcttattgttcccttcttgatgcgtgatttttttttttgggtgtgtgtgtttattgtttaatgagcttggttaataaaatgaaaatcgaaaccagattgatttactaattttttgtattaattagcaatctcataaaagatgatctttagttggttaataaaccgttaattaaagaggataattagcggtagacgtactaagcccaatagtattttaatttaagcccattaaggcccaacattgaagttccttatgcccgcaaattctgtttctcttccggcgacgatcaaatcgaaacaagtgatacaccggcaacgacaactgttcgccgttgatttccaccgaatacctgactatctgcgctgcgacggcaagaaattgaaaattatggcttacggttagtcaaattttcaatttttatgttggggatattcatgagtaaagatagattcataaaggtctagtctttttgggatctgatagaattcaaagtgagaagtcgtttggtagactagtgtaggcaaattcggtgaatgtgatataagcttgttacaggaaaaatgggaacttgctatatttagaacatttgaaatttaggtttttgtatgacataggatccaacaatagattaacgaatgataactgttggaaagagccagccttgatctattgttaagagaattatgacccttgaacttatcttccaaccagcttccttgtgatttgagagagaaaccaaatctgattttcatgaaatccaaaacagagctccaatg

SEQ ID NO: 14174 - DNA, 3000 bp, Unknown; identical to SEQ ID NO: 14168
  misc_feature (1)..( 3000): cDNA_ID_1976561_gDNA_ID_2214704_Annot_ID_189782 3000 nt of promoter + ATG

SEQ ID NO: 14175 - DNA, 3000 bp, Unknown
  misc_feature (1)..( 3000): cDNA_ID_3022086_gDNA_ID_2214704_Annot_ID_189779 3000 nt of promoter + ATG
tatagagcacaagaagagaagaactggggaaagccaggcagcaaaaagtcagcaagaaccgtgtggtttggacgcactggcgagtgcagcagtcttaggagacacaataggcgagccagaggtagcgaccacgaccagacatccaaggcacagggctggatgctcttgcatcgtgtgcattcagccaccaagtgggaaaggtaggcacaagcctacatgtggctgcactgtgtgtagcaccgtgaagagaaggttcaagacgcttatgatgaggaggaagaagaagcagttggagcgcgatgtaacagcagcagaagataagaagaagaaggacatggaactggctgagtctgataagagtaaggaggagaaggaagtgaacacagcgagaatagacctgaacagtgatccatacaataaagaagatgttgaagctgttgcggtggagaaagaagagagtcgaaaaagagcaataggacagtgttcgggcgtggtggctcaagacgccagtgatgttttaggagttacagagttagaaggagagggtaagaatgttcgtgaagagccgagagtttcaagctgatatggaaggaaaaagggaaagggtaaaagccaaagtcatagccagttttattaatatgctgagaccaagagtaggagaagaagaagagaaagagagagagagagagagagagagaagtacagttttgtgtttgattctgtcatagttgtaggaaaaataagtttctggttctaaacagcgacaatgtcccatcttttgttttttgtttttgtttttgtatttttatggtatcgtgttgagtttggggtttatagtatgtctccattaatctaggttttgttgtagaaggcaaatggagctttgtgcttggtgatgaaacagttgagttgatttttttttttgtaattgttttcaaccaaatgcctagttggtttaatttttttaaaagttgtttcttataatattgttaaacacaaattatgacagttgttgaaaactgcatgaagtagacttgtaaatggtataaggagattaattaagaggttaaatcattttaccaaaaacaattacgataaaacctctacaaattaataatattagaaacgaaaaattctatatattcataaatatattaatttatcgataattttaataattattaatttatagtgaggtttactaattttgtaattaaaaaaataatatctaaaaaacaattttttctttacaatcaatatatttctaaaacagttacaagtagaaaaacaataataagtttagaataaaaaaacaacataaacttttttacatgtagtaagcatatttgaaatgaactctaccagaattaatattaacttaagaaaaacaaacaatattaagtcatactacactaaagtttttacatataatatatatatatatatgatgtcatatataaaatactattatatattataaatattaagttgtatatatagcaataagtttaacaattgttaatttatgatatgatgagataatatgtttacatagaattttcaaaaatgacttcttaaaattattttattgatttatatcatttatgtcataaaaaattattaatatataaaaaataataattcatcgattattaattgattgaagttttacgtttattgaactaattttgtacatggtacttcgctcttggtcctcatccattaccgataggatagagatatgttactacatgatttaatggctaaacaaagatactttcggtttcttcggaaaaatctaatttcaaaagaaccgtctacttttactttaggtaagtatgtattcttgaaaaaaatttgatttcgtatcaaagttaaaggaacctagatttcgacattaggtaagtgtgcattactttgtttttgctttataactttgcatcatcaatttttcaatttgataaactaattttgtttttcaggtgtcgatttcatccgaatgaataagattataattaatgtggccacctttaatatatgatttaacttcttcaataatctctttatacaaattatgagcttagattgaactacgaggcacttaaattgaactaattatgtgtttgaaaaaaacttaaataccacatgcaaaaagtttagttttattttaaacttttaagcaattatgagctacttctcaactgtccatttaaaatgacatgttatatgttctttttttgttgctcatagttatgttataattgtttttttattattattatgagattgtattaaaagctcaaagagctaatgctatagtttttttttttctttttttgtcatcattttaaaacgagaagtgtagccaatgctatagttaaatattatatttaatactacacaaaaaatcaaggttattcaattcaaaagaaaaccacaatggacaatatatgccacatttgcacctgagaaatgaaatacatccatgttttcaaatttacatttagccccgttataatattaattacatataggacccaattttgacgtatggtgaatctcttggaatttacaaaaataggcttcttcttccaaattcacagattctcttctcctccattagaacttgtctgattctctcaaggtctctctctccattttctctccttttcttctcctgaatctccgttaaactattttttatcttcatcgatagatctagggtttattgcttcaggattcttcgactttacactatccttgttctgcttgtaatttgacgtgttgttattatcttccattggtgcagttcagcttctcctgctttgaattctctcgcattttcgtaaatgaggttccttttttcttctccgcgttgctcttacagttacttttggttttgattggctaagcatgtgatgtgagtttgattcctccatactgtaattgttggttttattagatcatcgtagatcgtgatagaagaagcgagcaaatatg

SEQ ID NO: 14176 - DNA, 3000 bp, Unknown
  misc_feature (1)..( 3000): cDNA_ID_1027695_gDNA_ID_2214704_Annot_ID_189774 3000 nt of promoter + ATG
actctcttcacacaaaaaagatgagtaaaagaaagacactttacaagccatcccttaaacctttgactcctcctcctcttcttgtatctgcaagtttcaacaagagcaagatcaacgatcaagattcgtcttacagcttgttcccggctattgaaacctcccctgagtcttttgtgtatagtttctacgaagaggatgatgatgatgagttcgttgaattttccaacttcaagatcaacacaaagaacaaagctttcaccaagcagaaggtcaaagtgattgattcggtagagaaagcttgtactgcaagcaagccgattaagaaaccgcagaaaagccatctttctgtgaaaatttcaagagatgaagatgataatgaatataaagccgagaagaagtaccaaaggcaagtttctagtggaagaaaaccatctgctgggataaacctcaaaagagtgaattcacctagaattcaactctcaggtactcgtagaagcacttctagaagatcagagagcaaacaagatgttctagagagcttcgctgtgatgaagcggtccgttgatccaaagaaagatttcagggaatcaatgattgagatgatagaagagaacaacatcagagcttcgaaagacttggaagaccttcttgcttgctaccttactttgaatccaaaggagtatcatgatcttatcatccatgttttcgaacaaatctggcttcaacttacaaaaacaaagtaaagaaaaaaataattcttaatgtaatagtagttaacctaatggtgaaagtaattagtatcattctgcttgtgaaattgtagttgttgacttgttgttgatgttcataagaagttagatggaactgtggagattctctctttgaatcccactttttatgtattgttttctttatttatctttttggaaaatgtaagcaaataataaaagttgttatcatattgtcgttttaatacaaacatgatcactaagggcgtgaaaacactgttaattaagacagatttttttatcactaattaaacatattcttgtcttctctatgattatgaacatataaaactactcacaaaagatgatgcttcaagatttgattatttcttagaatatgaagatggattaattgcgccaatatcatttgaatattttgaaaatacaaagttgaaaatggcggtaaacagcaacaagaaaaagacaacagtgaagagacatgaacaatttgaaaacgcaacaagtacggagtttatatatatgcatgaagaacattggataatcgttgaaggtagagagaggaccactgacacataaaactgagatgtgattaaagaagaaagaaacagtgatgagatttaatccttaagggtttttttttttctgtgaagaagggaagaatgaactcatgaagaagaagaagaggaccactgttgcaaattccatcccctaccacagttggcttatgaagtttcagcaaaagacatgtgatatggtatggtttctgacttctgagtgaacataagcaacaaatattcaaatcaatgggcctaaatgatcttgcagttttggattataaagttaagaattaaaaagaataggtgatatatgtatcataattttaagttttaaacaagtatgtcagacaaaattctacattctaattttatacatagatatgagataacctcataaccataaactacaccaaattttcatgaacaaaatatgattcacacgaacttttttctatcttgatcacctagctaacttgacaaattagttgttcgtctaaaactacacaaacattcaaagttcgttttaaattcaatatatttaaaaataacagttaaagttttattaaatggcattccaaatattgattccttctagaaaatttgtgtggttttaaattgtgaaatttggatctagaaaaaatagcaagtgtggtttcttgtgacctatggttgttagtgtagttgtataccattttttaaagttacattgtaatttgtaaaccatttttgtgtggttgacaaaaaaaaaacctatgacaaaattgctccgtttttattttcaataacaaattataatgtaaattaatatgtatcatagtgtttttaataaaaatatttaaaattaggattgattgttctgaaaaaaataacgcaactaatactttgttagcaaatactaacgtttacgtaccaaaaaagcattatgtaaatccattcatccatcattgtatacttgactttctacattattcttttgttgtatcaaatttaaaattaatgaatgaacttgacataataaaacacaaaatatatacttaaattgtacgatataaaagtttgatttacatattttatatctataaaaaagggtaaataaatgaaataaaacttttttttttttttttgtcaaagaaatgaaataaaactcaaattacatttttatgtcgtaatgcgagcacacaagtgagtgcatatccagtattaagttttttttttaataattcagaattgaaagcaaaggaaaaagaagaaatcgaaatcggaaactgtatattgttgttcttcgattcctcctcgctctacgccgcgtcctctctctcaaattcatcggaagcaaccttcttctcccatcatcgcctggttcgtttctaaaccctacttcttctatttcacagtatatcttcctttaattttcaatcgaatctagctttgtgtcgatctcaatgtagatcggaatcaagtaaaagaaatcgatgaattccaaaatgttcccgatctattgcaatgcacgaatcgtagaattatcacctacattagtcttgatctaatcgccctatttcaatttcaaattcgacatcgaagtttaaaggagatcgcaaaacctagttatagaatcgttgcgtttgagttgtttcgctggtgatgtagaaaccctaattttggttgtcctgtgtttggtacttgctcagaatcca

SEQ ID NO: 14177 - DNA, 3000 bp, Unknown
  misc_feature (1)..( 3000): cDNA_ID_2706146_gDNA_ID_2214704_Annot_ID_189770 3000 nt of promoter + ATG
tttcaatagccgggaacaagctgtaagacgaatcttgatcgttgatcttgctcttgttgaaacttgcagatacaagaagaggaggaggagtcaaaggtttaagggatggcttgtaaagtgtctttcttttactcatcttttttgtgtgaagagagtttcttggtgagttatggtgaggaggattgttagctactaagctgttggagaaataagagtgttgaggaagagaatctgaggaaggtttcttcttgctacaagtgtttgaggaagaagaagaagctttgtttttgggtttagagtgtttagtcacgtctttgagcttgtggaaccatgcatttgggagcatctctgaaattctgaacttgtaattccccatcttgtctctctctttttcacaaaagtttgtgatatttctcttaagaaaactctgtttttgtttccttagataaagaagaaggtgagaaagcaaagttctctatgtgacagataaagaagaaactgaagattaaaattggaaactagtggggctactactagaaaaagcttaaagaatgtcttttattagtatcatcatcattcatcatcaacatcaacttgagacatcacatttacacgcttgtgctcacataattaataaatttattttatggtgaatttttaaaattggttgactaattgaaattgtatttggtgaaaaactgaaaatcataagaacataacttttatctaaaatattatataattaagggaatagtacaaaaataattataaaacagagaatcagttgcttctgatttctgacagatttctatcatcatttcatggagattttactcttcatcgaaatgataaaataactgaaaaatgtaattagcgaattataaaacagtagcaaatgtaaacagttttaaagaatacacaaaaaggttgaccaaatggcaattacaaaagaaaaatacagcttcttttcctcgaagtatgctttttgattgaaaatattaaaacgtttctaaacggacaaatcaatttaataaataaaaacaaagttttcacaattcaactaaaagtttaacatatgtgaatctatctaggttaaagactcaaagtacacgttataatgaagttcaatagtttcatttcgatgcttctttgaatttggtaaagtgtgaaccttatcttaagtttttaggtagaaataatttagtatagtagcactttatgttatattaaggtgatacagatacacaaatgatgaaattaagataatcaaatatgttccattttctcctctgaataaagtgggatcaacttttgagtcataataatgaatatgagaaattttttggtctactttgtccactaacgccgaacattttgaggacactttttttcttcttctatacatttccactttccagatcaaatgttttggcaactacttatcttttaacttcgagaaggaaaaaaatgatattcaaaaatcaaaataaaacattttccatccttactttaaataagcacaagtgattattcatatttaaaaaatggagatattttcactagacgtgggactggtttatgttcaacaatgttgacctaccaatatatcaacgactttttgagtatacaaaaacaaaactatctcatcatattggattttgtttataagcaagagccaccaaacatttgcaataagaaaaccttttctattctccattgtttttaaaaacttcatgggactccaccatcatgatcagtttcacacccaaagacgtgaactccacgcaacacaagccaatcctctaaccttatacacaccaaaacaaaacaagaagccaaagaggatcacaacaacaacatcatcaccaaaaaagcttcaagacaatgagagtgaaagcaactttgattaacttcaaatcaaagctttcgaaatcatgcaacagatttgtctctctcttccgcttccgagttaaaagacctgtctttattagacctcttcgtgcccgtcatggcaatgtcaaacctagacatcaacatcatcattccaagaagccaatctgttcttgtctctgtttcctcaattcaagcaagaaccataagatgagcaacgccaaacatagaagttcctcttgtaagacaacttcgctacaaaatctgttttaacattgaaattttatcagcttcttgatctctttgttctcttattttgccattgcagttagtgtgaacgatgatgattactccaagtttatgcaatcacctcttacgccagcaacagccaagaagctcttcacttcacccatcacgacaccttactcttcacggaccaggaaatcgctgaacgcaagagatacatttgaagacaatgctgtggaagatgcttgtagaagctttgaaaactatctgattcatctgattgttgaagaagggaaaatagatgacttaatggacatagaggaacttctcttctgttggaagaatcttaagagtcctgtcttcattgaacttgtctcaagattttatggagaactctgtagagacttgttttcaggtgaatgaacagatctagttaaattgatcaaaacaaaaatgttttaaatctgtatctgtcagtacttgtggtttgacaattattgaatacaacatctaaggtttctaagtttaaagttgggaacaatgtgtgaagactataaaagattgtatgtttcggtcaataccggtcggaccggttcaaccggatttacttaccaaactcgtctcttgcaattttattgttgaataaaaaaattatcacaactgtgtggacacgtgtggttctccgtcctcactcctcaagcccctttcattttatcccaactgtgtctggtctgattaatgaaaaaataaaacaaattcgaagaaatataaatgagatttttgtagctagctcctccaaatccaaatcgttgcgttaaggtttcttcaagtttcaatctttttgcaatgaattgcccagccatg

SEQ ID NO: 14178 - DNA, 3000 bp, Unknown
  misc_feature (1)..( 3000): cDNA_ID_2711040_gDNA_ID_2214704_Annot_ID_136932 3000 nt of promoter + ATG
ggtgttgacattactaagccaaggagacgaagattctcaatctcttaaaagaaaacgtttgatctaagtgcttttgtgtgttgtgtataactcttttagactagtgtgcttattgttcccttcttgatgcgtgatttttttttttgggtgtgtgtgtttattgtttaatgagcttggttaataaaatgaaaatcgaaaccagattgatttactaattttttgtattaattagcaatctcataaaagatgatctttagttggttaataaaccgttaattaaagaggataattagcggtagacgtactaagcccaatagtattttaatttaagcccattaaggcccaacattgaagttccttatgcccgcaaattctgtttctcttccggcgacgatcaaatcgaaacaagtgatacaccggcaacgacaactgttcgccgttgatttccaccgaatacctgactatctgcgctgcgacggcaagaaattgaaaattatggcttacggttagtcaaattttcaatttttatgttggggatattcatgagtaaagatagattcataaaggtctagtctttttgggatctgatagaattcaaagtgagaagtcgtttggtagactagtgtaggcaaattcggtgaatgtgatataagcttgttacaggaaaaatgggaacttgctatatttagaacatttgaaatttaggtttttgtatgacataggatccaacaatagattaacgaatgataactgttggaaagagccagccttgatctattgttaagagaattatgacccttgaacttatcttccaaccagcttccttgtgatttgagagagaaaccaaatctgattttcatgaaatccaaaacagagctccaatgtcggagctgcttcctcctcctcctcctcctcctcctcctcctcctcctcctaggagggattcaggatttggagatcctgcattggtattccctgagtttgctgccaaacaatgcggtctcgaaaaagttatagaggaagaaggagaaggggaagatagtagctatggcaaaggttcttttgatctgagttcaagattctcaagcccttccatttctcgaaacaggtttgatgatgttgaaaacccgaaaaaggcttcgtcttttaagcggcctccttctgcgtcgagactgtctggctttcgagaggaagaagaggccgatcggagtagaaaatcgggttcctttgtggatcatatcggtcaggaggacaagagaatatgcgcctctggatgtttcagaaaatgctgcgcttgcacctgcatgtttgtttctgttgtccttataatcgtcttgttggtaggattgtctgcaaactcttcaatcaaatctatactacctcaggtgcttgtcacaaacctcaagttctcgagattggatatcgccaaatcatcgacagatcttctgatgaatgcgaacttgaacacggtgcttcagctctctaataataatgacaagacggtgctatattacagtcctatgaaagctgatatatcttctgagaacataaacctcggaaagaagacactttctggattcaagcaggacccgggaaatgttacctccttgaagatcctcacaagactcagaaaatccaaagtgtatgatgttgatgctacattgctgacaaacaaagagaagacgcttgaagctttggttgatgtgttcttgagagggaaactgagtgttgattggttgggatttaaggttcatataccaattgttattgcgtgcgagagtgtgaagcagagtgatgtgataaatggtctcaaaccagcgtgcgatgttcgaatcttttccgaatgaaaacaatgagagctattgatacacaaagaccctctgatctttgttttgttctgttcctttttgttgttgctaatttactcgttgtagattgatgaatacatagaaagagagaagtgactcaactttgtttctctaaacttaacatcaagaatccacaagttatctaccttttttttttcttcacatcatcagtctatgttttcttcatcattgacttggcttgtaagtgatatagttacgtccataagtttgttaaaggttggtttgatctctttctctttctatacctagagagatggatcaaaactcgaatcacgatagagccacatgcaaaatcttgggcgttgaagatacgccattaatgctctcttccatatcataccacaattattgagtctttggaaaaaattgtaaaaaaaggaaagacttttgaggagattaaaataagcaggtgagtcataagtagctgtggagttaaagacgtgtagagaaagcgtgttcactttcttggccgcgtttccaattatcaagattcttgtgagaaactaacttcttgattagttttttttgttttgttttagagaccgtgaaaaaagatgattagactaatgaatcatcttcaacggaaagaggtaatataagggactagagaggccattatattgtcacaagcttcttgtcttcttgcatcatctgtgtaaagtaagcttttttctctctgcaatttttgtctcttcttctttctttctgcaacttaccattattttattagcttcattgatttctctgctgaataaaatgtggataaatgcttctaacttatctctagattttctagagatttgtgacaaatgtcaaatgggttgttgaatcttcacgtgtcctcttttctcctcttatctcatctaatttgtttctttagttttgttcaactcaagcacatccgagaaagtcatagtctttgaacatcaaattgccttttgtttgtcaaatgacttaagttcttgatctttttcttgtagggtttttttctctgcactccacggtcatggcttcgtctacggtatgaaaccttcgtgatcttcactatataagttcattagatccttgtgtttagtctcttggtcctaacatttagtcactttgtctgatg

SEQ ID NO: 14179 - DNA, 3000 bp, Unknown; identical to SEQ ID NO: 14172
  misc_feature (1)..( 3000): cDNA_ID_1807153_gDNA_ID_2214704_Annot_ID_136934 3000 nt of promoter + ATG

SEQ ID NO: 14180 - DNA, 3000 bp, Unknown
  misc_feature (1)..( 3000): cDNA_ID_1534667_gDNA_ID_2214704_Annot_ID_136937 3000 nt of promoter + ATG
atcggattagaatcttacaatttatgtggaccaagcttttactttttctctcgaagaatattattttgttcaagaatcatgctcagatgaagggtgtgggtgtgagatagcccaaagtggtggggaataagcagagagatatgcttattcttctcttgattgacggtatttttcgcagccacgaaaaagagatcaggctgggtttgatggattggatcgtgtgtgtgtcaacaattaaaaaccctattcttgaaacatgtcactatacaacaagatatgattgtctttgtgagattctctcaatctcacttctgatcatgaaggaataataactcctatcggtttcttactttctcttgtgtgccacttccctttcaacaatttgccaagattctttcccatttaccacttgactaaagtaaaccagtgattatgagatcccatgtcagttgaagtaagcttagacctagagtaatatgtataggacatgaattaatttactaacgccaattgattttgtttaaagattaaggaacttatttggtccaagtaagatatgttgtccttcatagaatgagaacaatttgagttggaccaagacaatcatcacctcgaaagataaggattagagttagaaatccatgaaacttaacatagttacaaactcagcatatatttggaattgatcttcttgattcttatattaattatatatatgaccatctgaatatctatgttaaccccctcttccattaccaccaaaaagtgcttcccgtaagatcggagacttgccctatatagaaatatttgttttggtttggtaaaaagctttctagggattataattaatgattgaaaaagggttagtagctaagtgaggttatatggtcactcacacgatgaaaccttgaagaagtggccataaaagataatggcaggctggcgataatggctactacaaactcccttataagccatgcatgatcatagattcatagttactctttctctccgataaatttatatatttatgtttcaaaagctaataatcttttaagcagttttcagaagtgagttgtttagctttaagaatatacaagaatttgaatatttagagggttcattttcggatatggtctaaagaaatgggccgggtatgcattgtctcgacgactatgaccaaactgagaagaaaattgaacgtgcaacctcctagctaagtgacataccaatgacttatagaaatctcatatatgtttaataagtcataacgcaaaaattatttctaacaaaagcaaatgggttgattttggaactatatttaatggcatagaaaacttcttcgaatcagaaaagaatataaaatacgtgtgagttaggatgtcaccatagaaaatctccacaaaagcgtgaactcgattctatatatataacattcaatcattcttactaaaaacatctatatatatatattttaaacagtatggatccattcattctgatctgtaccagattgcaaaaattagtaagatatcacaattaaataaatgaaatacaaattgagttattttggattttcagatgaaaccaccaaacaaatacaagttgacttgaatgttctccaacgctatttttttctctattatattttataactaattaattcattaaatcacatgtccaaatatttaatgatgaaacataaagtaagtaagctagtgacgagagaaggacacctcattctcattacataatgtgacgagattgagctgtcgttttgttgtaaatatatggtcgggggtcaattattcatatgcagttttaggtcatttataaagaccattaaaaacgtctttaatatttcaacaatcttataattcaattattaagaagcatctagatatggattcacattagagttcgtattctttgacagcaaattcacattagacttttgatatatatattgtacatttgtaatatagtatacgaaaatattacttgaaaactgatgttatgtgttgccatgatgccattggtccatgacttttccacacgaaggccaaagcatactcttatattatatgagttgagtcattcttttttccttttgacggcaagttgagtaattcaattctcttgtcacttaccggtgatataagagttaatcttataaatagttttctgaaacttaatatactataacaatgtaaaagtcgtcgctttgttatttgaagtgaaaattaagcaatgttatgatatttttactaattaactcaatatgaaaaacaaaaatcctcttaactaaaacagaaacataaaagacgacttagtttttgctttagatctagactcataactcaaaaaacaatttcattataaacttttgtagatcttacaattttaaaataaaatgtacattaatgttgaaaagcaaaatcttaaattagtgtatactactactttttttttatcaccgtgatagatcattagatccttaacctcaatccctagagcctgcttattgcctttaagcattgtgcaatcactaccaaacacactcaaaactaaataaatataatttataacttatcaaataaaataaatactatcaagtgtgtatgaaatcgatgacaatttatttattaccttattaccatttgtgtcttgaagtacacgttaagctatttttatgtgttataaaggcttcttcgtcaaccaattacgaaatcaagcttttgaagcttctcaacaatggcggctattccttcccacaacaaccttcttaccatcaaccacaaaaactccataaccggttcttcttccctaaataccaatttctcagaaatcaattttcccgccaaattccgagtagctacgagagctttgtccagaaccgacgagtcgtctttatccgccgtgatttctcgcctcgagcgagaaaggcgggaaagacaaggtttattaatcgaggaagcggaaggagctggagaactatgg

SEQ ID NO: 14181 - DNA, 3000 bp, Unknown; identical to SEQ ID NO: 14171
  misc_feature (1)..( 3000): cDNA_ID_1570474_gDNA_ID_2214704_Annot_ID_136939 3000 nt of promoter + ATG

SEQ ID NO: 14182 - DNA, 3000 bp, Unknown
  misc_feature (1)..( 3000): cDNA_ID_2706173_gDNA_ID_2214704_Annot_ID_136940 3000 nt of promoter + ATG
caaacagcaatactgaagagttcctggtgaggattagaacagaaggatctaagctcaggatatacgtacaatgtcggataattcttcaatgaattctcctctatctgccagaaaacaatcaatagacaaaatcaaaacagctttcagaagcgtaatccaaaagctgagactaaatcaaacaaaggtaaatccagtaacgaattccagaaatctaatcaacgcaatctgcaatcaagtaacaactcttcactatactatcgccatatccatcaatctaacatccctgagaccaaaattagaaagcgaattgaagaaaccgcagaagtagaagaagctcaccgacggaagtgatgctcttgagccgattcgaaacgaaaacaatcggagctaaaacagataacaatagcagcgagaggatcagaatcctctgccaacgacgaacttgattcatcaatgtgcgtaacttctcagagaacgcttcatatattttatctccgttgcgctttaatcgttctccacgaagaagaagaagcacattcccagagggaagaacacagatctcggagattctctgcttcttcaacaagcaattgaagaaaacgatgagcagattagggttttcagattcttctgcaataggattcgataaatgcgagagtctgtttctacgatttcatatctggagattcagagcttcctcgtgcatgtttagagacttctgctcttttattttttttcgcttaactcagattttttaatatttataaatcaatgtatttatttgatttttatacggagaggattaatgttgagatacagatatagtgcggcgcggtgtacatgtgctagcaaaattactagtttactaagatttgacttcttttgattggcttagtggaaattctcccaagccaccatagatgttttgacacgttgatagaatgtactgtcaatgattttcaagagtgggaaattcacagctttgtactttggagtttggaggaacaactggaatgtttgaggtcgaatttgggaattgaaatttttaacccctggatgagtttatatttgattgatctctctattatggggtgttgaatgttatttacaaaaaaaaaatagtcattgttttatggacgaataaattatctacttgtcgtttttttaccgaataacgcataaattagattcaatacggataattcctaaaataaaataaaaacggttagttcttctaacatacgttactataacaaacgtacttgacgagttggcataaaaatgtatttctactgttttaaaagtaacgtacgattcgtcttgcatactgtgacgaaatatgtaaattcttttgtcgcttagtgatgatgtgaattattttgattcataaagtagaaactcgatacatacctattaactaaacatgtattatgttgtgattcatttttgcctaacaaataaaatttattagcaagaaccattaaaatttcatactaattttggatactaaaatgttagattgatatataagaaaagtatatactcaaaaagatttaacaatttaccaatatttagtattggaatcagtgtagtgtttgttagtacatgcttttctacatttagaaacagttaaattataattgcaaaaggaagcaatattgaggtattaataaggttttacacttttacttcagctagctttgaattttagaagttttatggactattaaattatctacttgtcgatctttcataaaaactgttggctcttgcgagagatatgtgaccttccaattgatcgcgaagtgataagatgtattcgattttttcagcttatgccatttttacaacttttcggaaaaatgtttcaaaatatccattatgaatttgacatccaagttataaattagataaaatttacttgagataacatatggacatatagattttacttatttattagagttcattaacgaaaaattattgagttaaatatagacatctttaaactcgttaattttaaaaagaaataataaacaatatatatatatatataaatattttattttcaaattttatttatttaaagggttttaatttttattaacagttataatatttatgattgtttccggttactttgatgctattttctcgtaattcccttttgtacatatatatttagaaccaaaaattcaatcattgagaagcatactctctgtcaagtgtaattgattcctcctcttcattttttaattcttcatttcttaagttttattaattaattgactcacctcttcatcttgtttatttccaagtaattttcctaatgatgtcaataaacaaaaataaaaagattaaaatcacgcaatatcagtaaaaaaggagagagggttaaatcggtggtggactttgcagccctaaaccattgtttcgcctcggaaaagcccatttacacaattgggaaataaataaaaacagagtaaagaaaggaacgtcttttactctttacggtatcgctcgcttctcttctttctcctcaacacgaagacccctcttgcctctttattagagagaccccttccttcttcttcttcaccttcaccttcttcctcgattcagatcgtctcctcctctgttttatactcaccctattccttcgaatctctctccatttttatccccagattctcccttcttcaacctcgtcgactcttcttcatcactctatttcttccgattgagacttctttcactctgattttcttcgaccctttacggatatattcggtcttgagtctccatcggatttggatttgaatgtaggtatctcgcacgagagttgttgtttaacgtaaatctgggttcttttttttggtgggtcgttgtttttcttctacatgcagttttggggatagtacgtgcgattcatcgatcaatcctcgtttagatagacatcaaggatttaaaggagtcgttaagagagcaatggaaggagac

SEQ ID NO: 14183 - DNA, 3000 bp, Unknown; identical to SEQ ID NO: 14170
  misc_feature (1)..( 3000): cDNA_ID_2706176_gDNA_ID_2214704_Annot_ID_136941 3000 nt of promoter + ATG

SEQ ID NO: 14184 - DNA, 3000 bp, Unknown
  misc_feature (1)..( 3000): cDNA_ID_1383514_gDNA_ID_2214704_Annot_ID_136943 3000 nt of promoter + ATG
atatagaaacgtgagtgtgtttcctgtgacacataatcatatcttgctgtggaagcaagtggattgccgtgaagttagaggagatgagtctggtgacgagaaggttgtggaggaagggactggttatgattatgaacaatggggacttgggaatttcttggagagttggcaattatctgacacagtcttccttgttggtgaagaggaaatggatgtccctgctcacaaggttatattacaagcatcaggtaattttcctttgagatcatctgatggggatgtcattcaacttcgtggagtgtcgtacccgattcttcatgctcttcttcaatatatctatactggacgaactcaggtaatttctcatatcctcttcccttgacgtaattgtcccttttgcctggtgaaatgctttgttaggaacctttttatttatttattagtaaacatggagattctatatcttcgtcataatttccttcaaacttttgttttgatgtagattttggaatcagaacttgctccattgcgggatttaagttctaagtttgaagtgatgtcattggtgagacagtgtgaagaaagtatagaccattttaaattgagcaaaacagcatttgactcctgcagaaaagtcaaactcttgtgtcctatttctcacccgttatctggctttatgttcccaagtgctttccctgttgatgttgggaagctggtaaagttgtactcaaccggcgaatatagtgacataaaaatctacctcagtgaccatagtctcactttccaatcccacaaagtcattctaagtctttggagtgttgcatttgcaaaggtgagaatctcttttagtgtcgcagttctgatgtacatgaatatattgattctcaattttcttatttattctctatgaacatccagatgtttacaaatgggatgagtgaaagccattcatcaacgatttacctaaccgatgtatcaccagaagcattcaaggctatgatgaatttcatgtatagtggagagttgaacatggaagacactgtgaattttggcaccgagttgattcatcttctctttctagctgaccggtttggagttgttccacttcatcaagaatgctgcaaaatgctcttggagtgcctctcagaggtaatttttttcttttcacaatcctctagagtaaatgatacgtctcgctgtcattatcatgtttcacttcttttccagtacatctgttacaatatggtttctgtatgatagagagcttaatgagccgtgaagtgggttgcggtttcaagccttctgaaactaaaagagaaaagaaacgaaataccacattcaaactacagagtaaaaagaatattaatattgtgtcatgtatatattacatgcagggatggcgttccgttttggaagaaggtcatacaacaagaataattcttttatgcgagtttattgggcgtgggagcagacaaacttgagtcttttctcaagctaacctctgaactttgttgcaggattctgtatgctcagttctccaagtggtttcgtctatctcatcatgtaaactcattgaggagatgtgcaagaggaagttctccatgcacttcgactattgtaccactgcaagtttggactttgtcttgttagatcagaccaccttcagtgatattcttgaggtgtgttttctctttcgctaacgtactatttcttataagaacatctgaacccgcttggagacttgcccaaataaactgctacaacgtgttgctcatgcactgaccagtgattagttatcgtggaaatatatatgaacaatggaattgtaatggatatcaccaagagtgatgaatgacgtctcctttcgttatggcatgtattaaatcctggaattgcagtctgcagatctgacggtgacatctgaagaaaagattctgaatgctgttctcatgtggtgcatgaaagctgaggagtcgcacagttggggagtaatagatgagatgatgaactatgctgaccccaaaagtttgttcaaagaaaggcttcagtcacttgatgacctgttacctcatgtacgcttctctttgttgccatatgagttacttaaaagggtaagtggatcctgaccctgtatatgctgaatgaactttgtcattttctgttaaattaatttcgctgatgccatctatgctttgatgatgacgcagttagaaaacagcaacctaagcaaagaaatcccagtattcaatcgtcttgtaagttcttaacatcttctatcgatttggggattatttaatttgtcatttcaagactgattttctctccaagccctcacttattttgtcttgtgtacagttgaaggaggctgctagcttcctaacatccggattgatatccccaggaaatgaaccgatgtatgaattacatagtcatgtatcttaggattgtaaacatctccaggtttatatttccagacttctcaattattaaagcttttcacctctagttcaagattccaacatcggagatcgagtttcaaggagcttcagtacatacgtgatggggacagcaatggggtgctgcactttgtgggtacatcttatggtagtcatcagtgggtcaaccccgttctcgcaaaggttaacctcacttttatcttactttctttattcatattgttggaaatccaattaccatgacaaggaattctgctggagaaaaatatttccttatttgagttctttatgttttacagaaaatcaacattacatcgagtagtcccacatccagattcactgatccaaaggctttggcttcaaaagcctatgcggtatggtccacccaagttcgctcggattatatgactagaatttggcttgaactacaaaattgacgaagcataaaattaattgaagtgaaccttctttcctcttagatacagtatttaaccatatgatttcatttttttggcaccagggtacttcctttgcagggcctagg

SEQ ID NO: 14185 - DNA, 3000 bp, Unknown; identical to SEQ ID NO: 8343
  misc_feature (1)..( 3000): cDNA_ID_2994335_gDNA_ID_2214705_Annot_ID_136944 3000 nt of promoter + ATG

SEQ ID NO: 14186 - DNA, 3000 bp, Unknown
  misc_feature (1)..( 3000): cDNA_ID_2706207_gDNA_ID_2214705_Annot_ID_136948 3000 nt of promoter + ATG
ttgattatatatacgaggtgattggattttacaagtatgactatgggtttcgaatcactgcaagatctgctctcgttgagatcatcatatttatgctagtatctcttcagtcctacatgttttcctcccaggagtttgattatgtgtcgcggtatcttgaagcagagcaaatcggtgctattgtgcgggagcaagagaagaaagcagcacggaagaccgagcaactgcaacaaattcgtgaggctgaggaaaaaaaaaggcagcgaaatttgcaggtggaaaagatgaaatctgaaatgctgaacctacgtgtacagcttcacagaatgaattctgattctaattttggagttgcttctccgcgcactgaaggtctaagaaggaggaagagtccgtatctaattccagatagtggtgcagccagtcctgagattgacggagtggtccacaggaaagaagagcagcctattgacgaggattcacagtatccttttgaagcgcatgagtttccagtgagtaccactccagaagcactagattctccagagtattcatttggagcatctccttgtgagataactgaagttcaacaggatcttgatgtgatgtctatggaacgtgaaagaaagcaaaagtctgagggaaaggagaatccattaatttctgcggtgcaactcatcggtgatggtgtttcccaggtacagtttattggaaatcaggcagtaaataaccttgtgaatttcttaaacatctcgccggaaaattcagatacaaatgagcagtcttctgttgatgatgaggtgtatgatgaaatggaaagtcagaaaagaaaacacacacctttcgaacggtcaacatctctacaatctgacaggagtagtgatggcactagttttcagataggaaggatctttcgtcatatatggtctaggatgcagtccaataacgatattgtttgctattgctgcttcattattgcgtttctctggaatttcagtcttctttccatggtctatctagcagcactgttcctatacgccctctgcgttcacactggccctactcacatcttctgggtcatcatgctaatgtacacagaaatttatatcctgctccagtatttataccagattataatccagcactgtgggttaagcattgatgcacctcttcttcatgaattgggatttccaacgcaaagaatcaaatcatcatttgttgtcagctcgttgcctctgttccttatttacatatttactctcatacagagttctataacagtgaaagatggtgattgggttccttctgctgattttacttcgcgccggaatgcccgtggtagccagaaggatcttacaagaattagattgagccagagaatcttggatgtgtttaagaagctaagagatagtgcgaaattggtgatcagaagcatctaccgatactggatatctctgacacgtggagcagaatcccctccgtactttgttcaggtgacaatggatgttcacatgtggcctgaagatggaattcagcctgaaagagttgaatgtagaatgaatcagttgcttaggcttgtccataatgagagatgcgagaagggaaaccctgatctctgcccttactctagcagggttcacgtacaaagtatagagagaagtacagaaaccccaaacgaggccttagttgttctcgaggttgagtatgcttctcccacaaatggctgttcttcagcagaatggtacaaatcacttactccagcctcggatgtggcgaaagaaattcgtaaagctcaacatagtggacttggtgaaggaactggatttccttaccccattctctctgtaattggcggaggaaagagagatacagacctctacgcctacatttttggtgctgacttgatagtcttctttctggttgccattttctaccaatcagtcattaaaaataaaagcgagtttattgatgtatatcagctagaagaccagtttccattcgactttgtcattattcttatggtaatccatttctataagtctagtttatctgttcacacccgttttgtatcagtgccctaacccgatgaaatgcttttatggcaggttatcttcttcctaattgttgttgatcgcgtcatctatctttgctcatttgcgactggaaaagtggtatactatctcttcagtcttattctcttcacatatgcagtgacagagtatgcttggagcatatatcctacccagcaacacgctgctggcttggctctcagaatcatatttcttgccaaagcaatgtcactagctctccaggccatacaaatccgctatggactacctcataaaagcaccttgtatcggcagtttttgacaagtgaagtatcacggatcaattactatggttacagactttaccgtgctcttcctttcctgtatgaactgagatgtgtgcttgactggtcttgcacagctacatcactgacaatgtatgactggctcaaggtatgtcgtctgatcccatgcatttactttctggaacccttgctatgatcatggatcattcatgttagtttgaacatactgccaagggcttaagttttgttcgtttgcagttggaagatgtaaatgcgagtttgtaccttgtcaaatgcgatacagttttaaatcgagcaacacataaacatggggagaaacaaacgaaaatgactaaatgctgcaatgggatatgtctgttcttcatcttgttatgtgttatctgggctcctatgctggtaataattttcttacaacacaacttttataatgcttttgtaaagtttttcatttggaatctgaattatcaatacgttcttgggatgaatagtactcatgatgcttgtatttataggagaaagaaaaattatgtgctagcttaatccaacaattctctgtgatgtcttacagtttgagtatttggtgagtcatttgtttgttggcaatggctgctttatccttgcagatg

SEQ ID NO: 14187 - DNA, 3000 bp, Unknown
  misc_feature (1)..( 3000): cDNA_ID_2706203_gDNA_ID_2214705_Annot_ID_136949 3000 nt of promoter + ATG
gttctttatatctacgcaggattcaacattgtcctgctttacctctatcaactaccaataaacttttccgatatgattcgttggatagcaagctttataggtctattcagaatctccctggaaactgaaggccctgatatttgttctggtcttttccttgtgttgttctacatcatggtatgtcttttgtttttcgaggattagtattacttggtctcactcaagtgtaaaatgataaactatattactgaaccatataattgatgaactgtttctcaaaacaactgtcaatatgtggtgaccgtgtttggggagttggttatgaacaccaacagccagtgtagtttttccttcaagtgaactgacttacccgccttaatctgttaacgagctaccactatgttatacctgtaacagtcttgacatgcctgtcgttctgctattgcagctatcctatgtaaggtcagacctcgaggatatggactttatcatgtccacgagtgaaaataacttggcagagcggcttcttcctccaaaatattcattttttattcgagaatcaaggtattctatatagatttttgtttagtttcttcctactgggagctgttgtggttttaacatagtatatcagtttttcaagggaaattttagtttttctgtttaattttttcttacttatgttaattaatttatggttgaatatgctcaaagaattgtgttcaagggtcggcactaccaaacgtggaagcctaaacactggacagttttatgaacacaaagttgtgattggtttctctgctaatagaaactatggggttgggtaaagattagtactcccttacagagtacaactagttcacacattctaatggatgttctcttggctgggctgtacaagattagcattgtagatggataatagttacactcaacttaatgtgttaattttttccaaattttcagggccggtgtcaggcacaccaatgttttactgaggggagctgtgtttaagactttcagtattaatttcttcacatatggttttccggtatatatttgtatccctggtattaaagtgtatgtgtcagctaaagcaacataatgtgtcagaaactcacactctttttatttgcgttcatgattgccaggtctctctatttgctctttcgttctggagttttcactttgcgagcttgtgtgcttttggcctccttgcatatgttggttacattatttatgccttcccgtcattgttccagttgcacagattaaatggccttcttctcgtatttatactcttatgggctgtcagtacgtatatattcaatgtggccttttcttttctgaacactaaggttggaaaggtaatatattctcgatgcgcaaaatcttcaactactttaagaaaactaagatgtaaattaacaactagtgtcttaaatatacaggacatgcaaatttgggagatggtgggactttggcattatactatacctggattctttttgcttgcacagtttggtttggggatgttggtcgcgttgggtaatcttgtaaacaattctgtttttctgtacctgtctgaagagagctccagatcttccaatgagagatcttacgttgaaggtaattgcctcatattcggttctgcaaagcaagttatctgatgttttccaacttccagggttgtcggaactgtaaagttgagaaaatgggtgtacttgtttatcgcgatcaacctatcatcttttctgactgaaaccatctaaagacaattaaagagttatcacgctatccaaaatatattttaaagaaatttttgatatagaatatcatggaaaatgttatgtactgtgtgattttgaaggagaaaatcttaaaattactattatattggcaagcttagtttattccgggcttagttttaggttgcgatttcaatcttctgctatttattcaattttttcttaacgactgaaattaccatcaataacagctgatgaagaaacaaaggtgttggtcgtcgcgaccattgcttggggattgcggaaatgctcacgggctattatgcttgcactgatttttctcattgctatgaaacctgggtttttccatgccgtatatggtatgattatccccctcccatttgcttttataacaaggattcatgtatctgggtgtttgtgaaaaacattgttcatgatactgtatcttaatggacttctttcagtgatattcttccttatgtatctgttgagccacaacatcaacagaaagatacgcaagtccttgattctactatgtgaagttcattttgcacttctctacattcttgagattgacctggtgtcgaactccttaaagcaggaaggctctgcgagcagagaagttctatttcagttaggtacgcctctctttctgtatttttcaagttataggataaattcacggatttccctttgaaagttagctgcaaggtgatcttggatttgcgggaaaaaaggattagggaagagttctcactgacaactctctgtatgaatctttgcaggtctccttaggtctgaaagctcttgggacttcttggagatagccttgctagcttgcttctgtgctatccataatcatggttttgaggtgctattttccttttcagcaattgtacgccatacaccaagccctccaattggatttagcatattgaaagctggtctcaacaaatcagtcctcttgtctgtctattcgtctccatcttcaagttatagccaggataataccacttacggtacaacacttccttcttgtctttgaagtgaacatttgaatgagtgacatatatccgtcttagatttttacttcaactccaaatccttgcttccattgtcagctattttttctggcattttgcgtgcatgccaattagtttcctttaatgcagttgccacaccattaatcaaacatatcagttttatttcctggtcctcatattcttttatg

SEQ ID NO: 14188 - DNA, 3000 bp, Unknown
  misc_feature (1)..( 3000): cDNA_ID_2706199_gDNA_ID_2214705_Annot_ID_136950 3000 nt of promoter + ATG
gggcacagactcggggtcgataacgatggcaacttcagaggctcactcactctcccacttaaggaagggtaatggaaacactcccccgatgttgattgtatccgagttttctttctaatcagaaaatgaatctcgcaggtcgttgctggtgatgaggggtaacagtgcagatatggctaggcatgtaatgtgtccctcgcccaacaaaagagtcgcaatcaccttcttcaaactcaaaccggactccggtaaggtccagccgccgcccaccctatggagaccaggcaccccttctcctctggtgatgctagctccggcgcccaagaggctagacgctggcactggagttttcttgccgtggacaccgccagtgtcaagaaaaccagccaagcatctcccgccgcgtgtccagaggctgcgtctcttgtcatcatcaaagtcagtggcagatagtgagtcatcgtcgccagagataggagtgagttgagttggaaagtgtcacacacggaagctctttctttttcctttactttttttttttaaagcagagtcttttggttgtacacttgagagtttagtgggtttttcttgtttcttcctaacattttgctttccttttatttggtcaattttatagaacgaagattagggtattatgctacatcatctactgttgttacatgattcactatttgtattaaaaatctttaggatatgccccaccacttgccattaatttcaaatatcttcagcttcaatcaagaaaagaggaaacttgattgatacaaatattcctgaaactgcttctcagttaaagtaaaagaggatgaagaaggaagcagagagattctggttttcttcttcttttattggataaaacgacacatagcttccactggctcaatttccccatctaacaaaagcgtagaatcaaagcaaacccgatataccactactcatttcttcatatacaccaaaaccactcctcaagcacaataatcctggagagaaaagaaaaatacctttctgtttctgcagtcttctttttgacagagaatgcacataagagaggatgatgacagcatcagctctctgcggcctcggggcatttgccgtcggctgtttcgatttgtggtggctaaactatggatattaggagacaaagagatgaatgaagataagcctgagaggaacaaactgatcaagaagggatcaatgtctgacatcactattcatttcaagcaattagaagactcggaggataacaattcccctgcctcgtcaagtccagaatcagagagagagacaatgattacactagttaatggtagtaacggcccaaagaagaggttacaggagaacggggaaaagagcatgctgggtgagcccagccctaagcaacaaatcactcagcctgaagcagggaaaccaccacagcctcatagacgcctggggcccctactaaatgatataaataagaaatcagatgcttttatcgaaagtacactcgagaagatgaggaaaggcttagcctagaactaaacacatgagcctccttcttctctcgctttctctgtcgaatagaagaaccaacagacactgggatgcaagaattatctatatactcaattcttttactttgtttaaatttaccagctgcattcttgataacaaaacgtatatgtactcccacttgtattttgaacaataattcatctcagaactttaagatttacaagaaatattccttaaggggctagttcatatatcattctagagcaatgttcacattcatttgccttaaacccacgtacctaacacgataagctgaatgaagtaccattctaaggaagaaaagacaaagaatcttcatgctctaatcccatcatgattcacgagtagtccctactctgttctttccagccatccaagctgaagtaagaggcaaaaagtgaaaaaaataatctgagcaagcacatataactatataagcgcccctcaataattaccattcgacataccttccaggcatacatagcaaagaaggcaaccgtgtcagcagaccagacaagagcaaatgatttccaaaagaagggaatagcaacattgagcaaggggacgatgagaaagaggtagttaagagcctctttctctttacttggacagtctcgtgcccgaagagaaggaatagctggaaagaaagtaaaggattaggggcaaaaatgcagccttggaataaataaagttagaagaaagtagagaaggagacatactgaacatccaaatggaccacatgcccatcaacctccataaatcaggttcgctggagggaaagaggaggttgaaagaaaggacacctccgaggaacatcgatgcatagccttgaacctcaaaaactttgtaaagagtagttccagggagagcagggtttttactggcggtggaagctctaggggcaaaggttgcagcagtcttgttaacaacctgcttgaattgaaaagtcataagcttgagcaactctttcaacaggttcaagcactagagaccaatctaacatggtgcattttcattttcatgtcttcctatggtttcaacagaaaaatcgtaaatgatatagaaaaaaggcggacctttttcaagtctttaccgagagcagaggatgaggaagggagaggagattccggcgggtcgtccttgggttctaatccgtcagaggtggcgaaaatacggaaggtggatcttcttctatggcgaaagccataagtgagagctatggaagaggagaccccatgggtgctgcagagagaccaactcattctctcctccaataatcgcgataaggaagaagaaacttgttggctttattgaaccggtccaattctcaaccgaactccggtattccaaattaaaagccagcaatcaataattgaatctcgagcccacgacggtttgattggtttagccatttctcggcgctaaatataatttattaaaatgatg

SEQ ID NO: 14189 - DNA, 3000 bp, Unknown
  misc_feature (1)..( 3000): cDNA_ID_2706195_gDNA_ID_2214705_Annot_ID_136954 3000 nt of promoter + ATG
ttttgtctattgtgcatattatgcatctgctggagtcaaacttgactcttgatcgtcggaaagggacttctccatttatgtattataatggacgtaaacaaaaattgtgagttatcgacacaacttcagaaacacctctcatttatggtatattgtgaataaacgaataagttatccattggaaaaattaaatcagtagctagtagaaacatatatgaaaaaatatactgcgacagacagtatattaactgggaaaggagaaaaaccgagaaagaaaagaaattgtcaaaggaaatcaatcgtatttaattaagaaaaggaaatctcaactgaatctgcccttttttggttaagggggcttcagattaaaaaagagttatcgcttcataatgaatgaatgaatattcagtacaggtcacgacgtcatgttacgtacgactaaaaccgcccattttcagaatcagagccgatcggggtattgtttaataacggatttaacgatcgtgcatgtcatttcgttataattccaagctttctcatcattatcattttattatcatctttatcaacttaaacagactcttctttggcggcccattcacagcccatataatgattcttaagaaaagaaaccactcgctaccgatgtaacaacaaaattattaaaatgatcactagtattatagttttcattaaaacgacaaatccatgtccgtacttgtcaacacacaccacaaaacatatacatatatatcaatctctcaggccagaggattattcaaatcattaatttgtcgaaatccatcacttgaaagtcgggttagcacgagcaatggtggaagaggaactgagcttcatctttgccttctttatgtactcagagaactgatctgatgatctccggccactactacctacgtgagagataggcacatggtggtgaagatgatcatgacgtgtctgatctgtttcatcacttgtctcccacgcatcctccttcatcatatcaccgacattcgtcatcgcccttatcttcagcttcgctttctttatatactcggtgaacctctcgtccgttttgatcgtagtatccactcgagcgatcaccggttccacctttgtaatgggtttggctgccctaggcctagccgatgtctctgcaaatttgacgcgaacagcctctgctggtgaagatttggtggagatgcgacgaacggttcggacaggactagtcactgctctgaagatcttctcgcacactctgttttcttgcttcttcttgctactactctgtgatgatgagttctttgccatggatgtcaccttgggaagtactaaaggtgatctgtgcagagaagatagtgacattaacgagctttttataatgcaaaatctatgtgattttatctttgttaattgcagaataacgtgtttcaacatgcaacaagcgaagaaattacaacttgttgaaaagaggaaagttggaaacttttacaagtttttcaaaaaaggaagagtgatgttagaaagggatcggattctgattccactatgttttctttctttctttcttcttcgttgtttttgtttcggattgttacgttcctgtcaggatttgagaatcatgcatcagctgtcactcctctcaggagggggagattatatctacttgtaacatactaatcttccaataaataagcacttcacatattattaaaatacagtagattctcataattaggccattttccataagcttttgtttacttatttcaatccactagtatgcttttcacattattcttttcctgcaatttagcatgaatcatgtatgcaatttagcatgaatcatatatatgaaacgggggtttactaaaactctatacataaatttctaaaactctaacccactccaacccggttttttctgttcgggtatcgggtccggtttttttttcgcaggccctaattaagacattcaagaaaacaagaagaagcataagaagaggcctaaatgcccagagaattaaacaaatgggcctttaacaatattttaaacaacactgaacaatagatgagatctcaacttcgaaaagctaaagccttaatataaaaccaaacatcaatctctcgccgttaaggttacatctgtcgccgccgctgagaccgccacttaaggccgtctcctccgctctatccatatccaaaacagctataaagataaacttccagagcttggtgaaggagcagcaaccctagttttcaatccctaaaggtgaagtttttgttcttctttttctttgattctactcttttttcgtcacaatagcgcagtagcgatctgggttggcgtttttattgacggattttggtgggtttgggttcgtgttagattttactttcacagattcaggtatgtatttgatcttatttagctttggtaatactcaaaccaactagtatttgatcttaattaggtgacgttgatattttgtgtgttgtgggtcaatcatccactctaggttgatctgcgtctatgtttagtcctaattttgaagaatcattctaattgctgatgtttatttatgacaattttatgtcttacttcgaatttagctaagataataaatctagacgagtgcctttataaacagtttatgtatgaacaatgcttcgcttgtgggattgttgatttcactacatttgattaagaatgtacatactattacaaatgttatcgattaaaaacgtcattttcagatattagttctccagcgagttgacacaaaacccgattacgtttcatccggcgactcgctttgatattccatggattctcagttgaatccttccaagagacgcaagataaggttcgcgtctctcatcttttccccagttttttttcttattcgaatcacttaaggcttgagaaattagtggttagggtgtgtaaattgcgtttgatatagtgtcaggcacagatgcgttgcgtgctataag

SEQ ID NO: 14190 - DNA, 3000 bp, Unknown; identical to SEQ ID NO: 8347
  misc_feature (1)..( 3000): cDNA_ID_1836205_gDNA_ID_2214705_Annot_ID_136955 3000 nt of promoter + ATG

SEQ ID NO: 14191 - DNA, 3000 bp, Unknown
  misc_feature (1)..( 3000): cDNA_ID_2038970_gDNA_ID_2214705_Annot_ID_136957 3000 nt of promoter + ATG
tgttgttgctgttgtttcctgggaattaggatagctccggcaaggacctgaatatgagcatttaccaagggaaagtcctcctcatcgtcaatgttgcttccaaatggttcgtctcttttgttcttttgctattttcttattcacctctaatccttagttttgtgcgcaaacagcggtttcaccgaaacaaactatacacagctcaccgaactttaccggaaatacaaggaccaaggtcattgattatattacggccttttttgttatgcagttgcaagctcatctcctttgttggttttaccatttcatgctctctcgttttcagattttgagatcttggcattcccttgcaaccagtttctataccaggagcccggcacaagtcaagaggctcatgaatttgcctgcgaacgctttaaggccgaataccctgttttccaaaaggtacgtagggatcaagactcttggaacaagtttattatcttattatgttaggctgctgtgacttgtggtatgttcgtttataacaagaaattcataaacatgcacttaacaagtcttgatttgtgaatgttgggttaggtacgcgtaaacggtcaaaacgcagcaccaatctataaattccttaaggcaagtaaacccacctttctgggttccagaattaagtggaacttcaccaagttcttggtcggcaaagatggcttagtgattgatcgttatggcacgatggttacaccgctatcaatcgaggtatccgttctttatatatccaaagtacccatgtaataaatgttgtcattgtcagtgatccgatttccttcttttgttagcagaaagacatcaagaaagctcttgaagacgcttgaaaacaacagacgagattgccaattaacaatcacggttaattttgtaatgtaaattgcagcttttatgtcgaaatttctttttggacatgtttctctgtttagtgtataaaaaaagaattccttttggaagagtaggttgctgttttcaaattttttttccaaaaactattcttaatgttccggagttaatgatcgttattgattgatacaccaccgactcataattaattttagaaattagggatgcatctttatttgtataccaattaccaaacactctatatatcaaataaaaagaaacactctatagagaatggcgaccaatctccccgtttattcatcatcttcaataacctaacatgatatctaacactctgttagccatcatgttaggttaagccaagaaatttgaacacataatagaaagaataaaacagaagagaagagctaacgacattttagacattttaaatttccaatatatcgcggcaaaccaaaaaaaagaagaagaaaaatacatgcatgacaggcattttttgaaataatttatcagagtattgaaatagtattttttttgctgaaatcatgtgtaaaaatgaactcgtaatgaaaatatctgacaacacatgcataacaggttaaagactttacacgtcgattgggcttataagttcaacaggataagagatatgaaaagcaacgggagaaatggagaagtagaagattgagcgaggccggtgggttgcatgggctgatctacgggtcgaattcctgatttagttgtgggtcccgttggtccatccgcgggagtatccggtgcaggtgcctgtgttggtgttgtccccgccgccttggacgctgatcaagtgtgtccaaaagaaaatcaaaccctaaaccttaaacgcataacaataaatatgattgtcgtagctaaattacttacctcccgggctaaaagcagacacctgaggtggtggagcaatcaaaaatggaacctgacctgcccaatacatatatgtatataaatctatgcatggaatcaactggaacttatatacacatgcaaatagtttgttttgaatcttagatacacatatagtttgtttataaaggaaaagcaaactatatgtgtatctaagatccaaaacaaatttatatgcgctcgctttaagaaccactagcctaaaactttgttgttatgtataatagttagttagcggttttcattgtatacctggagctggtagaggagtccccgcagctgtaaatcaagcaatgagtcaatcgtggtgttaaaaaatgagaaattaataaataaaaaagagtatagtagattaaaaaccttgacattgaataggtacaccgcccattttgcaggctcgaggtagagcaagcgccagagtccgattgatgaagccagtaggcagcgggacgttagcagtgaggatgaggcaagcacagcccatgccagtgttggtcaacgtcttcaaggagtcgcagcagccggcggtgggagtgacggaaccgccgctgcttccggtgatgaagttgagacatggagtgaaggtagagatcatggaggaggtgcatggcgtgcttatctgctgaccttgccctcccaacataaagcttgacatcatcactactatcaatgttaagccttccattttaattggcctgcttaatcttccggtgacgatgctttatagatatacaattattcagttttatatatgataaaatgggtgcattggagttcaacaacttccaactaatatcctttctctcaatctcttatcaacacacaatttttctttttatttcattaattaacaaagagaaaccaaataaaaagagaaagtagctgagtttggtatactcctagtaattttgtaacttaagtaattacaatctttaattagttctgaaaaagtatactggttcatgtctacgtggcgttgtatatattgggatgcatctagaacatagatatgtttgataaattaaagccatataaaccatgtaaagtaggtcatccaaccagacctgcctctttgacattttctggtcagttcctcctataattaaaccaaagcaaaaacaccaaagttgaacaataataactcaaattatg

SEQ ID NO: 14192 - DNA, 1705 bp, Unknown
  misc_feature (1)..( 1705): cDNA_ID_2711048_gDNA_ID_2214705_Annot_ID_136960 3000 nt of promoter + ATG
taaaccctaaaccctaaaccctaaaccctaaaccctaaaccctaaaccctaaaccctaaaccctaaaccctaaaccctaaaccctaaaccctaaaccctaaaccctaaaccctaaaccctaaaccctaaaccctaaaccctaaaccctaaaccctaaaccctaaaccctaaaccctaaaccctaaaccctaaaccctaaaccctaaaccctaaaccctaaaccctaaaccctaaaccctaaaccctaaaccctagaccctaaaccctaaaccctaaaccctaaaccctagaccctaaaccctaaaccctaaaccctagaccctaaaccctagaccctaaaccctaaaccctaaaccctagaccctagaccctaaaccctaaaccctagaccctaaaccctaaaccctaaaccctagaccctaaaccctaaaccctagaccctaaaccctataccctaaaccctaaaccctaaaccctaaaccctaaaccctaaaccctaaacccgaaaccctaaaccctaaaccctaaaccctaaaccctaaaccctagaccctaaaccctaaaccctataccctagaccctataccctataccctataccctataccctataccctataccctaaaaccctataccctataccctaagtccctaaaaccctaaatccctaaaaccctaagtccctaaaaccctcaaaccccaaaccctaaaaccctcaaaccccaaaccctaagtccctaaaaccctcaaaccccaaacccacagaccctcaaaccctaaaaccctaaactcacaaaccctcaaaccctaaactcatacaaaattttatggttagtgtatatcaacatatatgtttgtttgagtgtcgcattttgaaaattgaagttataaatagatttacttgtgtgaattgacatttcccattaataaacccttttaagttggacaatttacttagcaaatattttaggagtcaaagaaagaacattcaatgcgagtggaaacattgatgtcgaagttcccacagatgtttccaccaaagcaaaccacttgagctgttcaataaaagccttgcaacacttgccatataatcggaaaatagataacaataaaacgaacctctgagatattcgacaaggtatttcttaacttgagtaaggtctgaaacgatttaactactctacctttgatttttatttttggttttgagaagatgattacagttgtgattttggtggagacaaaaatgtccatctctgtatgttgctagccatcttttgtccaacaggccacctaacactttggaaaaacccgttcaatcttaaatgggccatgttgagccactaatgggcctcaatactatgagattttaagtgtcaagtgttaacctacgcagcagctagggcgcacgttaacaaggaccattcaacaataatatcatcagttttttttttctaggttcgtgtgtgaatccccttcttccgcatcaaaaaaaaaacaatctacagacagacaatcgtcttgtcctggattagggtttcattttctccactgtctagcaaacccacttcttctgattggggcggggattcaatgcctgcgagttcatctggggaacctgtcaccgaaaatcctatacactcccaatctcgcctccggttcttgctttacttggagtgttagaattcgcttctttacttgatg

SEQ ID NO: 14193 - DNA, 1705 bp, Unknown; identical to SEQ ID NO: 14192
  misc_feature (1)..( 1705): cDNA_ID_3022115_gDNA_ID_2214705_Annot_ID_189820 3000 nt of promoter + ATG

SEQ ID NO: 14194 - DNA, 3000 bp, Unknown; identical to SEQ ID NO: 8341
  misc_feature (1)..( 3000): cDNA_ID_1397961_gDNA_ID_2214705_Annot_ID_189819 3000 nt of promoter + ATG

SEQ ID NO: 14195 - DNA, 3000 bp, Unknown
  misc_feature (1)..( 3000): cDNA_ID_2038801_gDNA_ID_2214705_Annot_ID_189812 3000 nt of promoter + ATG
tacaagtagatataatctccccctcctgagaggagtgacagctgatgcatgattctcaaatcctgacaggaacgtaacaatccgaaacaaaaacaacgaagaagaaagaaagaaagaaaacatagtggaatcagaatccgatccctttctaacatcactcttccttttttgaaaaacttgtaaaagtttccaactttcctcttttcaacaagttgtaatttcttcgcttgttgcatgttgaaacacgttattctgcaattaacaaagataaaatcacatagattttgcattataaaaagctcgttaatgtcactatcttctctgcacagatcacctttagtacttcccaaggtgacatccatggcaaagaactcatcatcacagagtagtagcaagaagaagcaagaaaacagagtgtgcgagaagatcttcagagcagtgactagtcctgtccgaaccgttcgtcgcatctccaccaaatcttcaccagcagaggctgttcgcgtcaaatttgcagagacatcggctaggcctagggcagccaaacccattacaaaggtggaaccggtgatcgctcgagtggatactacgatcaaaacggacgagaggttcaccgagtatataaagaaagcgaagctgaagataagggcgatgacgaatgtcggtgatatgatgaaggaggatgcgtgggagacaagtgatgaaacagatcagacacgtcatgatcatcttcaccaccatgtgcctatctctcacgtaggtagtagtggccggagatcatcagatcagttctctgagtacataaagaaggcaaagatgaagctcagttcctcttccaccattgctcgtgctaacccgactttcaagtgatggatttcgacaaattaatgatttgaataatcctctggcctgagagattgatatatatgtatatgttttgtggtgtgtgttgacaagtacggacatggatttgtcgttttaatgaaaactataatactagtgatcattttaataattttgttgttacatcggtagcgagtggtttcttttcttaagaatcattatatgggctgtgaatgggccgccaaagaagagtctgtttaagttgataaagatgataataaaatgataatgatgagaaagcttggaattataacgaaatgacatgcacgatcgttaaatccgttattaaacaataccccgatcggctctgattctgaaaatgggcggttttagtcgtacgtaacatgacgtcgtgacctgtactgaatattcattcattcattatgaagcgataactcttttttaatctgaagcccccttaaccaaaaaagggcagattcagttgagatttccttttcttaattaaatacgattgatttcctttgacaatttcttttctttctcggtttttctcctttcccagttaatatactgtctgtcgcagtatattttttcatatatgtttctactagctactgatttaatttttccaatggataacttattcgtttattcacaatataccataaatgagaggtgtttctgaagttgtgtcgataactcacaatttttgtttacgtccattataatacataaatggagaagtccctttccgacgatcaagagtcaagtttgactccagcagatgcataatatgcacaatagacaaaatcgatcgtatatttaaattaaaaacaaaaatgaatacgacgaatctcatgattggcccttatgcaatttaaattcaaattaagtaataaaactacattcatatgtcaactaaatctgacgttaccaaactggtttgaaaaggaagaaaaaaactcgaggacgcctagtgtttagactattttacaatttagcaaacgcagacaaattaatgttttgtttcctacattttattatgagcaatcgggaataatttggtttgataaatcaagtagtcgacatggtgtaagcgaggcactggacggtggcacgataggtgagtcatgatgactcaagaaggcctcacgttactcacagtggctggatcattttattatataattactctctgagttgtataaatcctaatctataattaacaaatgtatagtctatatataatttgtctgttcgttcactcagtatctatcgtcaatgcccttacaaaaggcaggcacaaaaattacgaacaaatcaatgacccctcagtgacagagagaccaatcaaaatcgctttatttatttatctggtgaactcattgtgctcttcatacataaaaaaaagagttttatatattgagaaaagaaaagtttactacctacacgtggaaaacgtagagggaagtcgactttatggatgattagaaaaaggtgtagaaaaattgcaacaggtcttgaatctttctttaattgagtaaaaaaaacgtaggaaaatgttttggaaccgtgaaaattacgaaagagagagaggcagtcatattatagcagattaggagacaataataaagatatatagagagaggcaaggccagttatggtagataattagttccaaaccatgcatctctgtaaccatggatggatggatggatgatacgaacgaaaacggcctagtagagaaaagaaagagatttttgtcttttccggcaagcgagaggactcttctcctgaggggcaatgtgggaagaagaaagctaaatgatatggccacaacagactcgatcgaaggacttgttctcctcactttcctccaacttaattttatttttttaagttatggtttagtcaataattacgatggagtcgagtcgagttgagtttgtccctcccccccccctacctatatttaaacatcatccatgcctagagctttttacttgtattattaattttgtggctaaaccaaaaccaaagaaacatttattattacaaattttagtatccaacaaagcattcaagcccttaaaccccccaaaacctcctccgatcccattctttcgttaactgatg

SEQ ID NO: 14196 - DNA, 3000 bp, Unknown; identical to SEQ ID NO: 8350
  misc_feature (1)..( 3000): cDNA_ID_3022131_gDNA_ID_2214705_Annot_ID_189809 3000 nt of promoter + ATG

SEQ ID NO: 14197 - DNA, 3000 bp, Unknown; identical to SEQ ID NO: 8343
  misc_feature (1)..( 3000): cDNA_ID_2994335_gDNA_ID_2214705_Annot_ID_189805 3000 nt of promoter + ATG

SEQ ID NO: 14198 - DNA, 1145 bp, Unknown
  misc_feature (1)..( 1145): cDNA_ID_1808527_gDNA_ID_2214706_Annot_ID_136961 3000 nt of promoter + ATG
ggtgagcatgtaagtatcaccctcatcgcataaaacctccttagcttcaatttcgaaaagggaattgttatatactgattgaacaaaataaagatattctatagtaaacacatgttatatagaacaacatttgagattgatattgtaataatggagagaggtagcttctaatgagtatactactaaagtactaataagaaaactaaatttggctgtcacatcttatctatttgtttatgtggcccaacatttccaatatatattacaaaataataataatggataggcattgccaccggttagattataactcttcgtttgagtgcgacatatttgtaaccagagacaataattaggataaggattgaaccaaggaactaaacaaaaatttgaggatgaaacatagtccaaaacaaaatccatttaatttttgggacaagaacatagatatcataacacttaaatatgtgcctcaaattggtccaaaatgctctcgtgaatgaacgtggattttgcaccactcaacttaattacttactttgtcccatttaaaaaaaaaaaattataaaagcaaaaatattaaggaaaatttttcattataaaaatatcatctaatattttaatttaaaaccctaccataaatcatagaaaatactgcagcatataaataatcataaaattaaatagaattttacagtgatttcatataaaatactacagaagataaataatcataaaataaatataattttgcagtaatttcatagaataaaatgctccagaatttaagtaatcataagaaatctaataagcattttgtaaataaaaaaatccaactttgtctccaattgaattctgcaaaaaatccaactatactgcaaaacaaattccaattatgtctccaaaacgaatttgaaaacaaattgtgaagaaaaatatcattatattttttgtaaagtaaataaaattaaaaacacatttatggtccaaaaatttagttttttttgtttttttagttaatgtgtattttggcatgatataaagtgcgtcgtgtctcgactatatcatctctcggtttcactattgaacgtgtaacactggtcgaaagaagacgaacataaactcgtctccggtaaccaaaaatg

SEQ ID NO: 14199 - DNA, 3000 bp, Unknown; identical to SEQ ID NO: 3118
  misc_feature (1)..( 3000): cDNA_ID_2142994_gDNA_ID_2214706_Annot_ID_136962 3000 nt of promoter + ATG

SEQ ID NO: 14200 - DNA, 3000 bp, Unknown; identical to SEQ ID NO: 3108
  misc_feature (1)..( 3000): cDNA_ID_1819534_gDNA_ID_2214706_Annot_ID_136965 3000 nt of promoter + ATG

SEQ ID NO: 14201 - DNA, 3000 bp, Unknown; identical to SEQ ID NO: 3109
  misc_feature (1)..( 3000): cDNA_ID_1819530_gDNA_ID_2214706_Annot_ID_136966 3000 nt of promoter + ATG

SEQ ID NO: 14202 - DNA, 3000 bp, Unknown; identical to SEQ ID NO: 3110
  misc_feature (1)..( 3000): cDNA_ID_3022153_gDNA_ID_2214706_Annot_ID_136967 3000 nt of promoter + ATG

SEQ ID NO: 14203 - DNA, 3000 bp, Unknown; identical to SEQ ID NO: 3111
  misc_feature (1)..( 3000): cDNA_ID_1819518_gDNA_ID_2214706_Annot_ID_136969 3000 nt of promoter + ATG

SEQ ID NO: 14204 - DNA, 3000 bp, Unknown; identical to SEQ ID NO: 3114
  misc_feature (1)..( 3000): cDNA_ID_1819514_gDNA_ID_2214706_Annot_ID_136970 3000 nt of promoter + ATG

SEQ ID NO: 14205 - DNA, 3000 bp, Unknown; identical to SEQ ID NO: 3113
  misc_feature (1)..( 3000): cDNA_ID_2143028_gDNA_ID_2214706_Annot_ID_189849 3000 nt of promoter + ATG

SEQ ID NO: 14206 - DNA, 3000 bp, Unknown; identical to SEQ ID NO: 3114
  misc_feature (1)..( 3000): cDNA_ID_1819514_gDNA_ID_2214706_Annot_ID_189848 3000 nt of promoter + ATG

SEQ ID NO: 14207 - DNA, 3000 bp, Unknown; identical to SEQ ID NO: 3111
  misc_feature (1)..( 3000): cDNA_ID_1819518_gDNA_ID_2214706_Annot_ID_189846 3000 nt of promoter + ATG

SEQ ID NO: 14208 - DNA, 3000 bp, Unknown; identical to SEQ ID NO: 3116
  misc_feature (1)..( 3000): cDNA_ID_3022153_gDNA_ID_2214706_Annot_ID_189844 3000 nt of promoter + ATG

SEQ ID NO: 14209 - DNA, 3000 bp, Unknown; identical to SEQ ID NO: 3109
  misc_feature (1)..( 3000): cDNA_ID_1819530_gDNA_ID_2214706_Annot_ID_189843 3000 nt of promoter + ATG

SEQ ID NO: 14210 - DNA, 3000 bp, Unknown; identical to SEQ ID NO: 3118
  misc_feature (1)..( 3000): cDNA_ID_2142994_gDNA_ID_2214706_Annot_ID_189839 3000 nt of promoter + ATG

SEQ ID NO: 14211 - DNA, 1145 bp, Unknown; identical to SEQ ID NO: 14198
  misc_feature (1)..( 1145): cDNA_ID_1808527_gDNA_ID_2214706_Annot_ID_189838 3000 nt of promoter + ATG

SEQ ID NO: 14212 - DNA, 3000 bp, Unknown; identical to SEQ ID NO: 3113
  misc_feature (1)..( 3000): cDNA_ID_1819510_gDNA_ID_2214706_Annot_ID_136971 3000 nt of promoter + ATG

SEQ ID NO: 14213 - DNA, 3000 bp, Unknown; identical to SEQ ID NO: 7036
  misc_feature (1)..( 3000): cDNA_ID_3022241_gDNA_ID_2214708_Annot_ID_189857 3000 nt of promoter + ATG

SEQ ID NO: 14214 - DNA, 3000 bp, Unknown
  misc_feature (1)..( 3000): cDNA_ID_3022237_gDNA_ID_2214708_Annot_ID_189858 3000 nt of promoter + ATG
aacattaaattcaaaaaaaaataacttgaattttgtagaagttttgatccatcagaagattacgtaaaaacatttaggatcattgaaacaaacatggtaggtgaaaaactaaactacttaactttgggttggtcgtttaaaaactgaaaaactaaaaattataatcaaagcagtgattatttattcgttatacatatagatatatacaaagtggcagatcaaattgttttaatgaaattaaaacatgaaaacgaagtgtatcatgaagataaataaaaatctctacttctatccatactaaattttaaagaacacttattgttctacgccattgacggcttagttttctcagcccaccggtgaaaaggcttatattcacttggctataaatgaatcggtaatcgctgtttagcagcatgtatattcttctttaaggtatcatttaagtgatttctcaaaatcaatttatcgcttcattgatttcaaaagcgtcactaattttgctaacatctatagaccaattgttatttgcttccatattttttatatttttttttgtcacggccaggaccaatgttataggatctacattctcgtaactcttaaacgtttttactttttacattcaaatccaaaaaaaaaacattcattgttagacgaagactagttaacaaatatcacaattatgaactcgttaatggtttcttgagctcttgcatatttgtatcgaaagttataagaatgataaaagagaggttgatgagaaaaccaagtgtccaactatttccagtgagaataatctcaacaagtacataaaaggccctaagcaacaaattcgtatataagaaccgagttttctactctttggtcaaaaactgaaagtaacaaatccactcatgccgctggagcataatcttagataatgtcgtcatcatcgtcgccgttttccacatatgcaacctgagggtattcaaattctccattattgtaagtaacatctcctcggatgaatgtttcaccaacttggtcccatttgcacagaacaaacttgtaaatagaaaacatattttttttggttaatgaagaaaacaaaatactaaataaagcaaataggaaacagaaagaggtttatgaggttggtgaaggaatatgagatatcgctgggatatttatatatgcaacaaaactcacaaaggttagaaattttttggactcattgtgtctctggtcaacctcagtaaagtgtgtgatatgcttagaaacaagtgtgcttggcacaaaatacttcttttataccaacacatgtaaagctagcagcacttattcaattaattacactataaaaaataacattagtttatggaagaaaccaattggatcaagattgaactcgaatatggaagtttcatccctcactaaagcttcccctactactagaccacaaatacttcggcgacaaacgacattatgttgccacaacaaataatattctcatgagataaaaagctttaacttttataactttccttcttttaaagtagccaaacaacaagtgtaaaccaatatgtgtgggcggacgtgtcagaataaatcccatgtgtcaaagagtgtagtgggattcgtaatttttattgtgctattccacaatttataccagcatgtcacactccttattgaggtcagtagaagacggaaacgagtccaaacatacatccacttttgtttcacctataaagagtccaatgatctcttgttttctcatcaaactcaaatcaatcttttttgttttgcattttctcttcgacgcttgataagcatttcgtttccaaaaaaaaaaaaaatggtttctgtctccgaacttgttctctacgtacatgagaatgtctacgaaacatgcattggagtcaacatcgctaacaatgatcaagtatttgagtatgctcaaactgcatttgtcgaaaacggtgacaacgatgatgacgttatctatgattacgctccagcagcatgaatgaattttatctctattaggctaaagcgtagtgaaccaaccatgattttgtacttcgtatattaattatttaacggccctagggcttcctttatgttttgtctacttaacactttcactataaatcgtcgagcattttattctctcaagctcacttgatttcactttatttattttaatgaaaaaataaacgaaaatagtgcagtatcattacatatagcctgtaaattgtgatgatcatggtagttaaagtatcatgataccatttaaggagtcttctagaaaccaaaacttcgttttgccaaaaaaaaacaaaaaacaaaatccttctttaaaattttaaaatataatattaaaattaaaaaaatattttgataaatcgaattacaatattatttaattttaaatgcacaattgatacaaatatataaattaacatattatgcttgtcacacttgtttaggtttcacacgtattgattatcagtttttttgttgtgccaaaattctttaaaatcttctctttacaatatcttttcattagttatatgcgagtgatgaacataaataattctttttactttgccaaaaaaaaataaaaaaaaatctttttactgcagtgataagagttatgcaattttttttctatatatgtaaattttagagttcatcttctaaccatcacaataattgaagataaatcaaaattcaaaatatctatctaacattaacatagattggaatgttatattgtacactaagtatatatatagtataacttactataatgatctaaattcaggattgtaataaactcaaaagtcaaaaaagtatgaaaagacgtactaataatattcacgtagtttaattagatgaatcaagttttatacaataagatttactcaattagcttgggcctatgatagagaaatattgtaacagcaatatggtatgttttgattcaacaacaccaaattactaaaagaaatg

SEQ ID NO: 14215 - DNA, 3000 bp, Unknown
  misc_feature (1)..( 3000): cDNA_ID_3022193_gDNA_ID_2214708_Annot_ID_189871 3000 nt of promoter + ATG
tgtcaaaccggatcaaacccaaaaaagctgaacgcctatctgtaactttgcagataaggttagtttgcataccgtcccattatagggttacgtagatattgtgacaggcactccatagtatttacccttctctttgatccacataccataggaatagatcaccagatgcatagccacatgaaatttgtcggtccctactaggatagtctgtattttgttttggagagaactttatatgaaatttggcagctgatacaagaaacgagaacaacagtgtagagggaagaccagcggcgacgtcttctaggatttggaggaggatagctttctccccaaggttaaaagttttttccaacaacaaggtttttttttatcaatcctaattgagtgttctctctctcttgagtgtttctttccaagcaccctgatgatttagtgaatagattctcaaaatactaattttcatgctcaaattttgggttttttaaaattatgtgcagtaaaagtaaaaatttattccttctttatccttatctagtttggtcatgagaatatatttttttttttttggacacaagattggtgagaatatgtttgttatatgattccaaatgaaaaagattaatcacgtagaccttatatagatcaatattagttctatttttggtacaaaattaggaatatgacggaattatatcaaaaattacgttaaatagtaaaacaatttaggaatattgtacaaattcctcctaatttgtttccttagtaacatcactaattatagcaacaaaaatcttgtttgtcaaagtcgtgtactatgcgttaaataaattgccattttcatgctccaagatacaatatttacgcacctaaatcaccatgtaaagataccaaaaaacgtgtttataaactctaaacgataaactgatcatcctcacatcaaaaacatgacggcattgagaagaacaatctccatcattttcgttttctatctctcatgttagcttctcactcagtcactctatatactacatatctcttacattttgattaatcgatctataagacctaataaaatatggtatgtgtttgcaattaataggtacgttgttcgtgaatatctttggagttcaagccagaaatttatgcaagacagatgaagattgtgtgttgcgatgtcaagatccaggtgcgaactgtattcttggaatatgccattgttcgcgccaacaagttgagactgagctgaccaaggtgataagatgcaagactgatcgtgattgtcctgattctcatcaatgccctaaagattattattatgcttgccttaataatggagaatgtacttgtatctctgtttgagaaaccttaaaccactctaacaaataaaagagaaaccttaaaccatgattgttcagattctcatcaatgccctctattcaatatactaaacctttaaatagaactaaagctcaccctatatacaatattcaaagaaaataatagggtgggttaaaccgccagctggatgcttgaagattaacacggatggtgcgtcacgtgggaatccggggctggcaaccgctggaggagtgctacaggataatgaggggcgatggtgtggcggtttctctttgaatattgggagaagctcggcaccaatggcggaactgtggggagcatattacggtctctacttagcttgggagaggaaatcatcacatatagagttggaagtagactcggagatagtagttggttttttgaagacagggataagtgatcatcatccactgtctttcctggtacgtttgtgccatggcttcatatcgaaagattggagagtccgaatttttcacgtgtatagggaagctaatcgttttgctgatggattagcgaactatgttttttctttaccacttgggtttcattttgttccgaatgttgttgatttattttggaaagaggataaccttggggtaacatgtccaaggcaaatcccagtccattaggtttgttttcttaagttactttgaatagaacgggaggctccgcggcccgatcgcttaccaaaaaaaaatattcaaaaaaaataattataaatataaaaatcaaaaaatatattataaaatcagaacgttaaacagaaacatccatgtgaaaatcaatataatgttaaatcataaatagaagttaaacataaatattcattcaaaaaaatataaatctttataactatgtatatgaagtccaaaaatataaatctttataattatgtatatgaaaaagttgaagaaaagtgtaaacgaatgaagccttttaaatcagtaaatggcttcatttttttctctcccttgttgaacatttgtgcatgtttatttggtttgagttatgtgtaatttttttgtcctttatgtagcactcagtttcagtttcggttaagacctatttcaatctatacaatttttgtcatactttttttacaccaactttgatactcttaacatgaacgtgttttggtgtggcaaatttttattcccatcatatcgatctctaatttgtttaacaaaaattaataagaaacttttattcgacctaatttttactagcacggaacaaatttatatatatgcacttggaatgacgtaattgaatatatgaatggaagttaggataccaaaataactatgtagtatttgaatcttactagctcactcgatgagaatggaagtaggggtaccaaaataaaaaatttggtccaccacaaccagattggtaaaattcgaccggacatttattccggttagatctcaaaaacaatattaaataaatacccaataaggaaagtcgaaattaatgcgtttgataaaagatgatcgtctgaattagatacgcactaaaacatcaaagagtcactctaaactcatctctctcgccgaattctccccaacaatttccgccggaaacaaattctcagattccggtaactctaaaactatg

SEQ ID NO: 14216 - DNA, 3000 bp, Unknown
  misc_feature (1)..( 3000): cDNA_ID_3022190_gDNA_ID_2214708_Annot_ID_189872 3000 nt of promoter + ATG
gttgcgtttaggacttcaaatgcaactacgcaaatcaagacttcgtacttatcagatgaggcaatccatttatatgcagaaaaatgttattataaagctcacacgtacaggcagcatcggttcccaaatgatcttcttggcttaaagatccacaagttggagaaagttctgaactctttagggaatggaacacgacaaacagtgagttctgtaacagctaaactaaaggcatcaggaatggtacggtttcagttagagatcgagagaagtattgggaagaatgagagtgtgataagtaaaaaagtagcatggagaacaaaaccgaagatcgaacgggtttggtttgaagtaacggcgaaaatcgaaggagataagttgaaagcagtgaggctgagaaaagtagtgcctttcattgaagtggatacagaagcatggagcagtttgatgtctaacatgtcattcacaaagtttccatcattacttgttcctcaagaagctttaacactcgatgtcaaatggtaggcgcaacacttttatacgtttgataatcttccataaggcagaaaccacagtgtaacgatggattgtatttactcgtccttgtatgtatgtatatacttctggttctgtaaaggattatttatcacgaaaactggtgaaaggagttgttacgaatcattgcatattttgcatgaacaagttttggattttgagcatgtgttaattttacatattttttcttcacccctatttccatttcaaagtcataataaaaattttaaccgaaaaactaaactgatctagcttgaaataattaaccaaatatgtaaacataaaggttcactctccttattggtccacttgacaaattcattatcttaagatgaaccaatatgtaaacactaggcctgacccgtgccagtgttttatattttaagaaatatgttgtaataaaattttatttaatattgatttattttgttgttttggtgctatacattgtactattgtagtatatagtataaatgataatgtacaccgaaaagtgtagaatggtatttataatttttatgacacaatagctaatgttgtgcataagtcaaattttgaactttgaaactgaagagtaaattaaaaaaaatcttagattgaaatataatataggctagaatgatgtaaacaaatgtattttatttagtatttataacccaaacgtttatttttcagtttggttttaatctagtatattaatgttagaatatttgagctaatatattaaaactaaagacaaccgttgcttggatattccttgcgacaacaagtagatctagggttttctactttctttcttcttcgctgctgcttttcattcacaggttttgagacttcatcttgtctatgattcaggagttggtgggggagcacttctccgtctgcggtggtgtaatttttgtcatcgatgtggtcgttgctcaagattaacgaaggtggagtctcgaggtcgtggatcccggttgatgacgtcgtggtgtgcttcgaggatccccatggctcaacttttgtgcttgttgctaattttaaaaccgatgatatataattattgtttcttgaagtttacaattcataaaactaaataagaaatactgcatataatacctaagaagtaaaaactctatctttttgatgcaattagtttttttaaaacatctactattatttaggaacaaaaggagtaataaatttagatttaagacacccaatcttttttttttggtcttcctaagacaataaagacaccaaacatctttttttaaccaaataaaattaatttgtttaagatttgttttcctaaatactgtttaataatttttttttttaattgatttttttttgtcttgatgtaaaattctattatatgaagtacaattttgaaagttagtaactcacgagatcatgacacgtgtcaattttttcacgatcttagatttttgacacgtgtaaaataaattttcctttatttatttagaaaaagtatttataaggaaattaaatttatatatatatacaattttaaaaggtaaagaagacaattataaggaaattatatatctaattaaataaaatacaaaaaaattatttttatgtattatatcatgcatacatgatgacaaaaaataaaataaaatcatgcatacatattaagatcatgcatacgttggaagatcatacatatgttatatttatatgtttacttaaccaaatctttctcatatttctttcaggggtgttattggattctaatttatttcttgatgactttaataaaatcatagaaagtagtgttattggattctattttaaaaagaattttgataactttaataaaatcatgaaactagataaatgaaggattataaactattgattgagagttttttataatcttgttgattaggttttttataatcttgtaaaatttcctaaccaatctctctatttttatgatactactttttatgactttattttgtgaataaaagtgtagaaagcataaaccaataatacaataatttaattgattaacattcaaagattcttttgttttagttgaataacataaaaaaatcagtgattttattaaagtatgaatccaataactccaaattaataaaaaaaattgaaaagtctttttacaaatcaaaaactaataacaagaaactttaataaagtttaatcatattttgattgaataacacaaattctaaataatatttaaagtcattaaaacactatttaaatcccaaactaataattcttctttagtagatatcatcaactaaagcgaaatcttatttgtcaaagtcgtcctatgcgttataactaaattgtcgttttcatggtcgaatacacattatttaagcatctaaaccaccatgtaaggatatcaaaaacgtgtttatgaattctaaaccataaactcatcctcatatcaaaaacatg

SEQ ID NO: 14217 - DNA, 3000 bp, Unknown
  misc_feature (1)..( 3000): cDNA_ID_3022205_gDNA_ID_2214708_Annot_ID_189867 3000 nt of promoter + ATG
agaaaattaaaacgaaaaaaactaatacaaaactacagtcttatagatccagaattgaagtgatatgaattttaaaagaaaatttgatttgtgaaaatagttatgaaaacaaaagagcataaaactcatagataagagaacaaattgacatctagctaactccaataatcgtctctatcttctccttatcgtactccttctcgttcttctacttctttttctgcgttcttcttctcctgcgtacatatatggcttataagaatagttataagaacgtaaagattcttcgtcgtctgatgtttcgtcgtggtctgattgttcataatcttctaagttcgggtaagtatcttcatagatctttgacttgagtagctttgaatcgatgacgttaatatcttctacatggtctgctaaagcgtagaatctactacaatctttctcaaagacgttgtctacaaagacgcagactctactcctattgcccgacgcttcatggtattctccaaaacctcgaatttcaacacattgaagagtattcatttcagggttatagtagaaaatatagaagggttgcttagatgtataatcagccatcgacaaaacaatttcacccgtagcagtcactccaactaccgaaacataatgagccaaaaatatatcatcccacaacacgtaggcatatttcgaccattcatttttctcctcgtcctctagaacccaaagacgcaacttaatggtatcaccatcgtaatcatcataaaaaaccaaacccaactttcctttgtaatttatcagttcacaatagcttccagggtaaagaaagctgaatgtctcatacctcacatcaaagcaaactaccacaaaagaagtcaaaacctcagacgtatcacccaagtaatacacaaccccattgatgcatataccttcactcataatttcatgtcttaaggtacgttttaatcttctccaactcatttctccacttccaagtttcagaactttatgatgatcaggactacatgggtaagccatgatcatgaacaataccttgaattgcttgtcaatcggatcatacccgaaaaagctaaacgcttgtctaaaccttgcaatagcaggcaaggtcgcataatgtcccgttatagggttacatagcacaggcactccatcgtaatcatcctctttgatccgcataccatagaaatacatcataccagacgcatagccacatgaaaaccgtcggtcgttacgaggatagatctgcataccatctggagggaacttcatatgaaattcagcggtttctacaagagacgacgatgaagacttctcatatggagtaagatgctgaggcaacgagaagaagcttcacaagccattattttcgatggcgaataagagacgcggctgagttgaggacctggttaggaacaattctgtgaaatatggacgactaagcattgatgcccattgcttcgacacgcaatgaaacctagcaattgactttgtaatctcaacaatatctcgaggatgagttcattggggatggaatctgaaatcatgatcgttttatttgctggtcgaacacaaagagagagatatgttaaaacgtattatattaagaacaagacaaacctagctaccatgaaaatagagagaccatacctgaaaataaaaggaatcaaaatatgatttttttttgtttcttcaccaaataaaaaaaacagagaatttttaagactatttaaaactcacctaagagacgaacgcagtgtcttcgagggtttggaggagatagctttctagccaagcttaaaatttcacctagattataccaaccagggttttactgttcctaatttatatgtcgtgacaagtagaaaagtaaaaaaacaaaagaaaagaattctgaaaagccttggtgaaaataaaattaaaatagggcggtgctaacctaagtccaaaccgaaaaattaaagtcctaacctaagacttcctacttcttagtggttaataatagttactttgtacgtaaaagaacgggtgaatttttttattgtaccgttttctgtccttgctgatcgacgcaaaccttgttcgtcattcgtattacgggtcactattttgatttgctcatccccttcacgagaagcaatattcgttggaggtgtttgctgctctagtgaacgaggacgagtgttagtaaagttccatgaggctgacctcatttgtttctcaaaagaagctgctcgcctgtgagcctccgagacggttgtagggtcgaattgtgacaaagaattttgtaactgagagcgtaattcaccgatcaatcttgaaacaagttgtgtctgactatcattgatgtcattaaacgtgagtagtaggtagaattcttcagcatattcttccacagaccgtgtttcatgtctcagattttgcaacttgttatacattatttgaaggaagtggctcatattgttcttaaggaatgtcttaagtatgggagagactctgaagcattcagagggtttcatttcatgagttagaggaagagccaggtgagaagcacgtgtgttgactcgttgaagctgcaacggtcaatgagggcagttcggtaatttcggtgttcctctgcaattctttatcttcttcttctcttcttcgattctgttagagttgttgttgagtttgtttcgagagtaaagagagagagagattagagtgagaaagctctgagattgagtgattatatgatactttgttcccattaaagttctagtggattccggagataaactccgacgagatgtagcgttttccggtgaaggaaacgtgaactcgttaaacctctgtgtcaacattcttttactttctttgttacacaaatcgattacaaacaagagtcaagttcgaatcgagtgttagtgagctgagtttatagttcaaatccttacaaattgttattagagcttaaggtcgttaagcggattcgatttcgagatg

SEQ ID NO: 14218 - DNA, 3000 bp, Unknown
  misc_feature (1)..( 3000): cDNA_ID_3022213_gDNA_ID_2214708_Annot_ID_189865 3000 nt of promoter + ATG
ggttaaatattagtttaagtttatgaacgagtttagattttataatttaatgaggtaaaatgttggattcagtttataaaaaacggttaggggtttaaatttaataataaaacaaggttaaatatcgatttggttttataaaagaggaatatagtttagattttgtagttaaacgagattatatgtcagtttggagtcattaaaaattgtttaggattgaaatttttgacaattaaatgtgattaaattattgttttgtttggataaaagaatgattagagattagaaattagatttacaattaaattagtttttcttataattaaatttaagtgtttgattctgatgggtaagaataaaaagggtgaagaaaatgtttagtataaatatttatgtatagtcctaattatgaatttatgtatttggggagtaaaaacataagttgtaacctttaaagtgtaacaaatattattaagatatcattagaaaattgtaatagtgtaacgatagaaattcactaaataaatacacaggtcatgggtcataattcaggtttataaagatctacaaagattacatacagtaaaacatctataaattaatagtcgataaataaataacctctataaattaataaattattccgatctcgagttgagaccagtgtaaaaagtgatacaaatcgatacattaataagataataattttcctgaaaatcctatgtaaatatatggtctcatcaatatcataaattaataattatataaatgtatcaactacatatatatatatatatatatatatatatatatataagaaatttctttgaaattatatttctaatatttgtttgcttaaatttgtatttgttcttatttgaatttagttctaatattttacagtatcaaaaaattttggtgttgttttctaaacagaataattattttttactctaagctacctaaagtatttataataagtagggtctatacagtgtataatatttgaaatgtataagaataaaattatatatagtatgggtactatttcaaaatcaaagtattaaattgacctaaattatgtgtattttaaataaaagtatcattaacaaaaacaacaaaatgatgtttaaattcatgagacggatatatagggtgggacaggttttgatctatatttattcttcttcactaaacaaaacaaacaacaaatacttctagattaaaaatttgaaatttaatcaaattatatataatttaaataaatatattagttgaaagaaagaaaaaaatgatgtttagttatgacgagacgagtttatatggcgggacgagtttggataagacggatttatattgcaagatgagtttggatggaacatgtttggatgaatattaatatgagacaatatactacaagtggaatcctataattaacaatcaaattacaactatacaatcttaaacactattttttgtaatcttttaaaaatcaacattatatcaaaataagtgttaatcttctttgacacatctaaatgtgtaattgtaatacaaacttactaaattacaataattctacaagttaaatctataaacactgaaagttttagttatatatttttgatacaaaaatgtgaatataacataacagattaatattattttgtcttttaagatttgacccgtgatacaccaaaagataaacttattaatattgtaaacttatttctcactaaaaataataaacaaaattatcgagaatcattaatcaacacaaataacaacaaacattatacataaaaattcattttataaaaatcaaacataaataaaatatttgaccacgatatattgcggatcctatcctaatctctctctataaactcctaattcttgtgagaattcacaacccaaatgtgaaatcaatttattgtaaaaccataacataaaaatagaatacatttcaagatccaagtataaatagtcttttttttttttgtcgtactactacgtatggggtgtgttgaatttttggtgttgataatccgagatttgggggatgttaaaagccaggtcgaccacgtgagaactgaatacgacagcgtttcaatcagcgccgaataaaaacacacataacggtgcttattgctgcgagaacggcggaacatttttttttatatttttatttttattacttaataaacaaacaataaaaaaaaacaaattaaaaagagacagagagaagaaagagaacctcctcaccttcctcctctctttgcgcgttttctctcttctctctctcctacggctgttgaaaccaatggcatttctccacttcgccggaatttcgatcggaagatgaatcgtctccttcgtctctcttcgcttaatcgtcgatcttcttctgtcgccgtctaattgcaaatccaaatcgtaaacgcttcttctcttattcttccttcccccattgttatcgtttcttcgctcgatgtgatcatattcgattcttagagttttatcgcttctttcgatgagataatctgcgtttcacatttccagatcatttgattgcgtttgttttttgtgttcattcccgattttgaactttttatatgttttcactggatttatccgcgagcgacggagaattctcgaggacgcattctgattttgaatttgtgttgctcaaagaatttgaagatctaattcatgttttcttcgacgagatcgtttttttttcagagtttttttagtttgattctgcaatgtagatcggaatgttattgtaatttcacgagtatagattggatttatacattgaatttgactaacttggatttcaagtttcagattgttcaaatttagaggttctgattcttgaatgtttttttttcttttaattgtgtatcaggttttttgtatggtatagagatttggtgaagaactagacgcagcttagaggaagcttttatatttattgaagcttagggggaaaca

SEQ ID NO: 14219 - DNA, 3000 bp, Unknown
  misc_feature (1)..( 3000): cDNA_ID_2711121_gDNA_ID_2214712_Annot_ID_136977 3000 nt of promoter + ATG
tactcttcactatgtcttgtctcaatcggtttaggcgtcttaaacccttctcttcaagcctttggtgcagaccaactcgaccacgacctcgataagaatttcgatctttcctcgggtgatcaaaaggacgcgaaagctacccgaaagactcagtttttccaattgtggtactttggcgtctgcaccggcagccttatgggtgtcacagtcatggcttatattcaagacacttttggttgggttctcggtttcgccattcctggtatcgtgatattcctgtcgattttggtgttcatgtcgggttgtggaatttatgtttatgctccgggcgcccgtctgaagaagaaaacaactactacaccttttgagaagattcttaaattcattaaagggagagtagtgaagcagagaagcatatatacacttgcagatgagaaagatttggatgctatggagcttgagtaagttcggaaaaaccacgatatctcatgaaactaattagtcttttaagttttttagcgactaatgattacctgtttatgtaggctagaggagaggcctctctgtaaatgtgagaccgaagacattgagactccttcaacaacctccaaaggattggaagatgacgagagctcgaaaacggttttctctggaattgataatgttaagttagtgattcgccttttccccatatggatgatgcttctcatgttcgcggttatcttccagctaccagcaacctttttcaccaaacaaggtgtgactatgaagagaaacattgggtccaacttcaaaatcccacctgcaaccctgcaaagcacgatcacattatcaatcatcctgcttatgccattatatgataagattttgatacctattaccaagagaatcaagaaaaacggtacaggtatctctgtgatggagagaatgggagtcggaatgtttctatccatcattgccattgttattgcggcaatagtcgaaaggaaaagactagccataagccaaaagatgaagactttacctgattatgatccagaaaccgtcccactgagcatcttctggctgctgcctcagtacatcctcttgggaatctcagatatattcacagtcgttgggatgcaagagtttttctacagtgaggttcctgtaagaatgagaacaatgggatttgctctctacacaagtgtttttggtgttggaagctttgtgagcgccgcactgatctcaattgtcgaggcttactcgagctcaacaggtgaccgacaaaactggtttgcagatgatatgtcggaagctcggcttgacaaatactactggcttcttgctcttacaagtacaataagctttgtagtctacatatttctatgcaagtttttcaagagtagcagtgatcaaggcgatgaaaaagaagaagcccctaaatgaaagaagaaaaactttgattcctttgacacagtcgacttagataaccgtttgccataagattccacgaatgatctaactgtagtagtagctttagaactaactagcaaaccaaaagagatagacaactgtaagatttttattcataagaaacagtatcttataatatcaaatgcaaaagattcaacattattattatctcgtgtgtttgattacatatcatcattaatcctcccattgaccaacaacatttctaaaatggacagattcaaaacagacaaaaaaaaaaaagtctgaaactttgatttatacctttaatcatgtgagctgtttccattgagaccaacttctttagctacgttgctctcttctcgaacctcgtcttcttcatcagagtcaagtgtgaaagtacttaaattctccaactcagctccgagaggtcgatatttagaatgatcttgacggagataaccattcttgttagcaatgacagagaacaaaccagtagccacaactaccattagagccaaatgacagttaaattgaagagtagctatagcttttgctcggtgataatcaccgtgtcctttgcacttgatcgtgaaattgcctctgctcttctcgtgaaacgtacagttattagtgatcaaaccggtaaaaaacgatacacccatttgcagaaaccatgttccttgcagaatcagaccgatcccacgacctaatttcgcaaaccgatgcgtgctagagtcggatttgagctcaaaaaccgtggagaagacgcagatggcaatgggcacgagcatgagatcgtaataacgattctcgattccagaaacatctttcttttgcaggtagaacattaagaactcctcaatgaagccaaagagaagcaataaagttgtaatcgaagacggaagtgcaacaaagacagcgtttttggagttgaccagatatgttagaatggcgtaatataggaatagtactgccactgccacgatctgtaactggatcattgacccgacccgatcgcgagatccgattgagctgaagaaggagaaaaacgagttcgcaataaacagagacgaaagcaaagctacggggatggaagatgatccaacagattttggcggcgaagctctgatctgagccataggggaagatgaatcagcagtaccagaagatgaattcggatccaggttcgatgagtccagtgactcccacgcgccgattactgcaaatccaccgccggcgacggcgtaacttaatatacccatgactccaatcttcacaatctctgcgaatcaggttatacttctttcgaggaaatttggatttttccgccattaaagcttaacagaatcgagcttctgatctgataaaccggaaagatccgacccgacccgaataacccaaaatgggataggctagtagcccaataactcaatatgggcctactggggtcttcaaatagttcatgtttaaatattctaaccatcacgtgacaatcatgtgacctctatggatatgctgctgctgcatatagctccgcttgcgtaatccagtttgcttggagaa

SEQ ID NO: 14220 - DNA, 3000 bp, Unknown
  misc_feature (1)..( 3000): cDNA_ID_2181660_gDNA_ID_2214712_Annot_ID_189912 3000 nt of promoter + ATG
cacataaaaaaatacgtatcaatttgtgttaaaacgttaaagaataaagtattttccaaaaaagaaaaagaaaaaagataaaataaattttgctgccagtaaccgaataaaagaaaattaaagcatccataggaaatgacgtgtatttatcgacgtggaaaagaacgtgagacacgtggcagtatatatcagagcgagagagaaggttgatgcacggaagctgttcccttttaaaaaatttggtgcaagtctacgttgtggcactcactcacttaataaactccacttttctccaaagttgattttatcatcctttttccttttttaaaccattattggattcttataatttataatccgcatgaacatttaattaccataaattaatctctactgtatatcgtctttagtagttaattgtaatttcatcttaggtattttaagtctttctgtaaatcgccaaatattccggaaactatatggttctgagaccatcttatcttttactctcttaattatttcctacttttctatttatagagttaatactttgatagtcagaaagtaataaatctttatctctcttaatttttcaaatctctgctcagtttataatttctaccttctcattttctccgtactctctgcagatttggcctaatatattaagttttttttaaaaaatatatatatatatatatatattttttcgtgactggaaaaatgcagatctaatccaacaatgataagcctctttgataataaatttcaaacaatcgaggtatgagaggaaaaagaaaatgagtcctggtttggtaactccttggatattgaggaacatcggtttaaggccaacctaaagcttcgatggatatatttgcatcaaagattcgaataatggctcactgaagagcaagtctcggtaatacttttgctctaaacaattcgatcttatctcattcctctcttaaatccaccctataatggcaccaccacccacgttgcataagtttgtatataggtgtttctttcacaattgttttttataaaaaagaaaaatgtttttttcaaagaagaattttagataaatttaaaaacctttcgacaaaaaaagaaagattaaatttaaatattcaaaagaaaaagaccttaatccccaaagtcggtcaatgaggcaaaaaaaggttgttcaaaaaatgatagcacacttttaatggatttttgttttttgtgtcacgaacactttgaatttaaggaactaaatcgtaagaattgaatactataacgttccactacagtcagttttacaactatagaacagtttaaaaaaaaaaaatttatctataattccttaattacagaaccacctacaagtgttaatatgcatccgtttttatatgcgacgcctggcacgtatagagaaaacgtgttttgttcacgtattcgctattcgcaaaacgtatgccacgtgagatctacatgacgacatacttacttgtattgtatgtaacctcttcgtacatgatacctactaaattgaaatttaagtttgcttgaattttctttaaaaaacaattctaatgaaatttatcgaaatagaactatcattttttgtaatcatattaactttcatgagcttttcaattcgatactaattgctactaaatgagttgatctatcattaatatattactttagactttttgtattttttgatgtggaattctaacaaaccaaaaataaattaagttaaaatatagactaaacacttatcacgaaatgagctcacatcaatattttgataatcaaatgattttttctttttttaccaagaacaaaacgtttaggaaaaatagagaaattagaaacaaagaaacaaaagaacaaccttgtataaggaaaaagaatcgcaaaaaagggaatgcgaaaattatgtatataaaagagtatcaaatacgccaaatgtaaatgaaaggaacatataactttaattatagttatttctttttcatattgtacaagggtgaaggatgaattcaatgtagctaacagatagaaagctaagagctagatggtccattttagtgatatatactgcatgattttgcattttatcgacatatttataaaaaatttcctctttttctttcttttgtaaaatacgttaaacctcaatttaattaaaagggtgttgacctataaaaaaactaaagggtaagagatatataatagacttaatagtgtttaattataatagaacaaatctgcaaaaaaaaatggtttgcgcaacggttattaaagatataattcaaactagggtgcatacaaacctattgaatttcctaatctacttaaaccaggtttcatttaaaccattttcatgaaactttccaattcacatatttctttaagaattcaattagttagtttattttggttgacatctacaatgagtgtttttttcccctacataaaactccatcatttggtaaaaaaaacttttactagcttgtacctttcttcgttaaatgtttaattttcactttttaactcatccgtattttacaaacgaagagaataaaaatcaatttgaagtgtatatttggctatatacagttttagtttaattcgtataaaattggaaaacacatcttttgaagaaacagaagaagcatggtaagaaaagaaggaaaaactatttaataaatacataaatccacccacataggtgtggagacaaagatatagaattccaaatatggaaattaatctctgccattagtggaagttaattctcataacaccgaaaagctaacgattttcaactttttttttttgttactcagaagattttaaacctttataaatacgaaaaaaccaatctcacaaatcatcaacaatcaccttgatctccactctcttacatataaataaccaaataatttctctcccctcttctctctacacacatagacaataaacacataaagacagtttcta

SEQ ID NO: 14221 - DNA, 3000 bp, Unknown
  misc_feature (1)..( 3000): cDNA_ID_2181693_gDNA_ID_2214712_Annot_ID_189901 3000 nt of promoter + ATG
cactccgcagatgaatccaacttttcgggtagagtttgaagtaccttgtgaatatgaaacacacacggcttgtttagcaagaaacatttccacgtttaaaaaaattctgtttatgcgtttttgtttgcgctatagtcataagaatgggttttctcgttgttaaacatttgaaatatctcttgggcaagatttactttgtcaaagtgtttataaatgttatcaatggatttggatgccttgtttttcaagaaatttattgaaaaagaatcctaattttgatttgagatggtttcttgtaacccaatctcccctagataaacctaccttttcgccggtggctccaaggaggaaatgaatattagtggcggtaaggtatttgccgtaacagctttgaagacggatcacattggatccaggtacgatctcaaccgtccatctagtgttttttgttgtgccgcgacgatcttgatgaacggattcttgatcttcatcggcacttaggtatttgtcgttgtggctacggagacgtacaatcgttgcctttctaaatatctccatccgagaacaataatgatctctttctaaaaaattaagaattaggagacaaaaggggatggatctataagttattcttcattatcgtgatgcaacgtaggctaatatggtttgttgacctgagtcttgttttttaattcgcttgatttgagtcttttatcgttaatggtttgttatatgtttgatccatgtcaaaagtttgttgaaccgtgggattaggattgttcagattataagaccagatttctaaatagtatgacaactccgaagaccagattctgaacctcttccattaattgaactatttggttaaataaatcaaactgttctatttgtttctatgattccatctctgtaaacggtcaatgtatatgtgtgagtcttttataattcgaatcttctgctcagatatatgaatttattctcatagattacaagaatctctgaagtctgacatgtgaatttctcataaaatcatcaccgcagaagaagaaattatccaaaacgaaatttgaaggaaaatactaaaaaatcgaaagaaaagaagagagatcagagtttggttaagaattttttcggtcacggttaatctgaaacacggaccaatttgttgatcatcatatctctcgtttcaaacaaaacaatcaaaacagaagaaaatcaaatcgaaaaagatctagttgaaaacgattaagatcatcagagacttaaatactaataatcacaaagattactccatcatattgttgcagtattacctcatcacctgatctcaattttgcattatctatacggaccaatacatcataactcgaaaaccaaagatctaaagaaaactaaactgaagataaaatacgaacttgaacagagaaccctaaactgacttgataagagcttgatgtctgtcaaagtcatgtgtggtttgtatataaaggtccccaatggcggcgattcttaggtttctcgaggaaaaccctaacgcttatgggtcgtatatgagcttcataaggcccattataataaacctcttttgacccataaaaaccccaaaccaatactcaattagcttatatggatgggcttgactgaaaatttacaacttctcatttttggtttgattcaagaaaaaacaaaatattaattttaaaaaaaaatatgtacttggaacaaaataatttgtaagaaaatctacatctatttaaggcttgaagtcattggatcctattttaatggaagacaagatcaaaatttatatcctttttttggggagtagatataaacttttaagcttaatttagcatgttttgtagtaaatccaaaactggataaaatctaatttcaaactcaactaattctgttcattttatctttaaacaagttcaaacacttgaaacaatagcttcatacatacgcaaaagaaacaaacacacaacaaaattgatagaataaaataagtttggtattaaagaagatataatcgtaacaagattcaaaacttaagtaatgacatcgctacaaagatcagctgtttcgttccgacgtcaaggttcttcgggtcgtatttggagtgatcaattcatcttagatcaaaaaaatggagcaattcttcaaaatcatctagaacaaaccggaagaaatagtaatgatcttgaagataaaaatccatcacagaaatcaagttcttcgtcatcttcttcatcaccacctccatacttttctgaaatacgtagaggaccagacatctcatcttctacacgaaacaaactcgcttgtggtttatcatcacttttccgacaatgtatcggttcttcggctcgtgcttaattttgttcaatgcttgacgcaaatctgtacatatattttcttgttatatgaaaaattcatcacaattttttccgaccaaacagagttcttgataaatgggcctattattttaaaaagcccaatagatatttgagtgtccggcccaaattgaagtagaataaaagataagttaccaatttaccagtagttagcagcaaacacacagagaaagtgaaacatcgaagagaccccagaatgcaaaatctctctccgcctttttctccttccttattcgaaaattctcagcgtctttgttgcaaactcctctgaaattctccgtcttcttcattcgttttcgactctgcgttctactacttctcgtctcctatcagtatcatcgcaattcatattcagtctagtgtgttaaaccggagaatttggagtctcgccggaattttcctctgtctatgtatgattgccggtgatcaaagcgcttcttaacgattctgttctcctttgagagatctgagtatctgatttcatctactacatatgttttctcgagagtgatagaaagtaggtctcatacatatttttcctctggagggaattttgatcctctgcttcgttaattaacttgtg

SEQ ID NO: 14222 - DNA, 3000 bp, Unknown
  misc_feature (1)..( 3000): cDNA_ID_2711093_gDNA_ID_2214712_Annot_ID_189923 3000 nt of promoter + ATG
tgcagtttgatttaccagtcggggaacacatcgggagaagcacgtggatgcttttgcgcggatccgaggattcctattcttgagaaaaggttgaagctttggcaacagcaaggcaggagaaacatgtgcagtcattgctactaatgctttttctgctgcttcacaaacaaatcgcttgtcttgggaagatttaaggaggagttgagtaagctgtaagaagggaattcggagttactgttataagaacacacaaatgtccgctatttgaggagaattccaagagtatctgcaaaagatgatttaccaagagatccaattgatcgattgtatggtcattatatgagctgaagatgtcagcagatgtcatacatgcggttttacttacagcacttcttgggttcttcagtgatttcacgataaacaggatcactttctccctgtaagagctgacagcgtgagactagaaaattctctcgacgtgtaactcgctctactaaaactgatcataatcacgagtagaaagaaaatgacttacagcatatgcagcatttcttccttgtggaatatggaaagacgacgaatggtattaagagcatcacagaccaaaacccaatccttggagtctagctcggttacaagtgactggaataataaagaaagcagttccagaatggtattaggtaaacaacttacttccaatgtccaaattctaaacagatgaatataattgcaaatttgcaaggcagcattacaaatgagaattcacagtaaagcataggatactagcaggaaaaaacaattgataccttgagaactgcatcaacttgggttacattgttcaagtctttggattctatatactcaatttctacgataactctctctgcctcaggtttctcaatctcatcgcctttaggatgattgtgatcaaaggggacagagttttgtggtggtttatcttcagctgttccattcattttgccaaccaaaagctttgttttatagtcgatattcctctcagagacaggaagattcttcaaatcttttaaagccttggcagccatgcgtacctgaaaagtaacaaagaagacgccattataagtacaaacaacataagtttagcatctgcgattacaaaaccaaagataagattatagatgaattttcgacctctagcttagtattaagtattcccaatgaaaccctttcaaagtagaaatggtaagataaacacattactatgagagttcaacagcaataacattaaagagcagagatctatctacattcccaaatcttatttcaaacaattacgaaatttactcaaaacaaaagcaaaaaacctcgatcccactcaaggactctaaaaagttcaaacaaatcctcgcagtccgaaatctaactccggcgccgtaaactactgcaaccgcgaaagatcgaaaacgcagaagaatagaaaaagtagcggcgagtcaagcggtatcgatgactactaacttgaagagtaaatagtgaagattatttgactcgcgtacctctataaattcgaaatgccagagaaaattcagggagagaaagagtcgatgaagacgacgaaattgatttccggccaacagttcgcaactcgtagtagagtcgtcgtagtcatactcgtttacaccgacgtcgttttatggatccaacggaggggacccatttgtacggcatatcttgggcgaaattaatgtttttcttttccttctctctgatacactttggttggttattgtaaattcctcaaataccctcggactagatatgcatttttatttttatttagatatggaattggtatatacatattttttaatacgtaaaaacttggattggtgtggaaatattttattttctactaaacgaaataaattgaacgtataaagtacatcacatgttacatgcactgatgcacatgaggagtgcaaatttgaaaatataagataagaaacatgttgcaaagctgccacccaccgtatccaattgctactatttgtatcaatcagttacaaactgaaaaccaaaaatgaaatgactagaacaaataatgttaaaatgcacattgaaatagttaacaaggaaagcatacattgatcgataaaacgaatccaccacgttccaaaatattttgtcgcagatgttgcagacttgtagctaagttgggccggtagatgtaggtgacaagtgtttacaaatctgttaactgtcgctgtgttcctcctacttttgattttgtgttacactattcaaaagttggtcgactcttttaatcggttgattagactagtacttagtaaaatttgttgttaaaacttaaaagggagaagaagaagaagaatactgctttaattcttaattaatttttttttaaaattagtagtatcattaacgtgtttattacaccttcctcgagttactttcctcgtgatgccaatggtttttttaattctttaccttttcttctgacacagagtcacatatttgactacggaggagatctattgcttcctagttcctacttatctttatcgcgttgtaccaacatcaatataaaagcaacatcttactttataaacttccgtaaatttgataacaagtacaatcaagtttaaatttttctaaagttaacataaatttagcatcatacaataattaacattttttttaggttaaacttttggtgcgttacgtgagtagcagcatcttcgaaaatatgtttagtagtagtagtgataggaattaggaaaaggcacacacaaaaaagaaaaaaaaagggtaaaaggattcattcacgtttttttgttttctctctccaaacagaacttcgggaaaagtggacaaaaaaaaagaaaaaaatttaataagaaaacctctttttctcgcaatttggttttgttttcaatcttcttcttcttcttcttcgtcttcaatgcaaacaatgctcgattccattaacctaatcgaata

SEQ ID NO: 14223 - DNA, 3000 bp, Unknown
  misc_feature (1)..( 3000): cDNA_ID_2711101_gDNA_ID_2214712_Annot_ID_189921 3000 nt of promoter + ATG
gacagaataatactcaatagtcaatactaatttataaaaaaatattggaagaagaaacaaaatgccatctcattttggtctcacacacgacaacataaaaagtcgagcgcgtggctttcacttgttatcaatgtcgctatcgaaatcaattgagcatttagtggaaaccggtaaggaaggcgcagcgaatctcatcgagtaatctcggtacgggaactcgtcgtcaaaatgtccggtttgatttccgtcatcgaaatttaacgagtagctcaactgatcgtaccggaatttaccctgatccgatgaccggttaggcattgcaccacctccgcatcctccgctgctgtttccgactctccctcctcctcctccacagcagttgctgcgtccgaaccggcggatatacgtcttccatctaggtccagcgacgagctccgaccactccctcatcctccgccaccctcggatccaccatcgctcgtcgggttcgagtttgtcgacggtcgtgatccgttgccaccacacagatccgccgcgagttgatggctgagatgaggcaaggcagggcatgaggaaacaacaacctcgcttcgcgaacaacgcctcgtgcatatcgtcggtggcatcaacttcagcgatcggcggcgattgatgactcattctcagagagaaacagaaacgaaggaaatatggaatttcgtcctgatctagctactctcttttgtctccttagatcgtcgttcctcttctcatctccaactctaaaccctaattttctccctctacccaagagatttctatcaccttctccaatcaacgcgtctcttgagctgtaactaaaacagaagagcacaaaacggcgtaaccgccaacccggcaatattggttctcattaaccctttttaaccgctttggttttatcacatctaaccgggaatttcagctgttgatgctattaatttattaaaccacatatgaatgaaggggttcatatacgtaattgacgttagcacatttggttccaagtattgatcgatacattaaaccgcaataaaattggtccgtttctctctggcccaaaattggttcgatttctccataagctgaaattgataactcccagtggatgtaatgtatctaatattcttggaacagattcattgcaagtgaatgttctaaccaaaatcacctaatctttttgcaaaatctaatatagtaagtaggataatatcttacttttgcaacaagccactcattcgtaaaaaccggacatactttaatgggataacctacaagtctacaactcatctggaaactatatcacaaccgatggtttagtatagttcttcaagtaacctttttatgaataccaatatcaatcagaagaaggataccggtcagcagtttgtttcagatcttcaagctgcgtgagaacatattcaagcttctggaagcagatctcattggctattctcgcgttgtaatcgcatttctcaaagggacggtactcgcaagcgcttttgatctcttcccttagtgtcacttgtatatcctgcaagtttcacaagaacttcatcttattatggattggcgataacattatagcacatttatgtacagtcaaagatcaacaagttcatgaaccagacaatgaagctgatatcttcaaactttatgattatctctagaaaaaaagcagaatcaaaagctttttacttgttcacagaatgtaatgatccctaatctagacatgtgtcaaatgagagcccaaatgttctttaaacagtgagattccatccaatatgaaaatatcagcatccatcactcataaaccttaagcctaagaataaaggatcaatgtcaaatcctaagaaacaggaaaggaatacaaacctagagattgtgatacatgaacccatatgttaactagtcacagaagaatcacaaaacgagaagcagcggccatcttgaagactaaaaccaaaatcaaaattctaaacaaagcccttaactttgatcaggaaatgtaatgaaccctaatatagacttgtgtcaaattagcccaaacgatcaacactcgagaaaagataccaattccccagagagattgagtcagcaagaacactaatctagctagacttgtgtcaagtgatccccaatgttctttgatcaggtagtttattaatacactaatgcaaaagaaatcagaaaatatttgaagaagagatagagtaagaaaccttcatagattgcataaactctcggcaatggctgttgacgaactctttcttgggaccagaagggctcgcgagttcttccatcactccaccagctagttccaaaaccttaacaactctctgcccggaaaaccaaaaataaaaacacaaaaacacattcacatcaaatcgtccaataaaatctctaaggaaagagtgagttttccaaaatttcacattctcaacattctggagtcgctgcaacgaagtgttctgcgtctgcggatccattggactctccacgatttcttttagaccagagagagagaactccaaactgagatatatcacaataccgtcaaatccactcatacacataccctaaatactcaaatcggagcagtgggagtacctcaatcgaacacggcgacgcgagacagtgaagatggcagagacgatgaaataacacggagaatttcgattggaaacggcgtgcttatgatcagcaacggagggaagattttggggaatcggcgacactcggcaatacagatcggtgaaggaaaaagcaaagaagatacaagttttttttgtcacgtaaaacggcacgaactctactttatcaattcaggaacagcgagtagttaaaatattgaattacgaaaacaccccttggttcagataaaatctttgtgatggccgcttttctcatttataacggataaaaaccgtaaacaatacacaagaacagaggctgacacctaaagcttactctctaactgca

SEQ ID NO: 14224 - DNA, 3000 bp, Unknown
  misc_feature (1)..( 3000): cDNA_ID_3022296_gDNA_ID_2214712_Annot_ID_189920 3000 nt of promoter + ATG
gctgccttgcaaatttgcaattatattcatctgtttagaatttggacattggaagtaagttgtttacctaataccattctggaactgctttctttattattccagtcacttgtaaccgagctagactccaaggattgggttttggtctgtgatgctcttaataccattcgtcgtctttccatattccacaaggaagaaatgctgcatatgctgtaagtcattttctttctactcgtgattatgatcagttttagtagagcgagttacacgtcgagagaattttctagtctcacgctgtcagctcttacagggagaaagtgatcctgtttatcgtgaaatcactgaagaacccaagaagtgctgtaagtaaaaccgcatgtatgacatctgctgacatcttcagctcatataatgaccatacaatcgatcaattggatctcttggtaaatcatcttttgcagatactcttggaattctcctcaaatagcggacatttgtgtgttcttataacagtaactccgaattcccttcttacagcttactcaactcctccttaaatcttcccaagacaagcgatttgtttgtgaagcagcagaaaaagcattagtagcaatgactgcacatgtttctcctgccttgctgttgccaaagcttcaaccttttctcaagaataggaatcctcggatccgcgcaaaagcatccacgtgcttctcccgatgtgttccccgactggtaaatcaaactgcactcgatatcataaaaccagtcttgttcttttgttttggatttgtcatgtcatcaccatgacaaccaatttggatccagtccatgttcccaccaacatcacctttctttggctgtgtaatcattagggcattgaaggcattagagaatatggaattgagaaactagtccaagcagcatcgtctcagctcagtgaccaactcccagaatctcgggaggctgcacgggcagtcttactggaacttcagacagtgtacaagaaaactactaatgtcgaaccgaaggaggagcatccagagccagtcacttggcaaatcttctgccaatcaaacctctcacctcttagtgcacaggctgtgatacgtgtcaccaatgtcgcaggtgtggctcgagagggtcttgttgcgggttcatgacagtcacaagccctcagtttgatattgtaagcctctgtgagtaaacgttgtacgaccactgtttctctatctttggtttatgggtttgtttctttattttgtgtgtgaatatgtcgatgtggtaagataaatctcaacgactcaaccgttagttttaggcaaaaagttagtcggtttatttgatatatatcatgttttagtctatattacattggttttcttaaaactttttttttttttggccaaatgttttcttaaaactaagatttcaatattaaacatttagtgcatatactcttctttctgtatctttgattgaaaaattaaaatccaattcgttataaatttgatcatattttggtctatacattacattttttttttttgattactagatctcaatatttttccgcaaagattacaatttatgaccacagagttatcaaccatgtaggatcatcaatagcaagtaaaccggtataaaccgaaccaggatcatgccattctggtcattacctcttgaagaagaaactttgtatctttataacacgattccgtctctgctaagttcttcgtcttagctgcatcttcaagctgtgtcgaaacaccaagaaaacaacaaataaacatataggatatatcagaaaagagaagaaattttaaaaaaacaatagtctcttcggtttgaacgaaccaggacttcattagtacacttaccttttcgaaattgtcgaacaatctgttggctaaatcagtgagaggttgcttgtcttcagaggcagcagcagagatgagattgtcgaaatcgtaaaacaaaaatgtggatttaagcctcaagtactttttcacatagtttaaagtatctggtccgatcaaatcctccattgccaagagatcaaaagcattctttttaactctatacattcttcctttcgtcccgatatccgctacatacactcctttctttatgaatgttctcgttcccgtcttctcattcacgatatctgtatattcaaatcgaggacgaattcaaaaccggaaatcaaatgattctaccaaatcgaattctcatcttgaatagttgtatggctcaaaatgttcaaacatttgaagaaagaaaacaatcaagaatataaaatggcgcttactgttgtaaataggaggaattggaagaggaccatcaatccaaaacccattgtcttgtgccaaggaaacattattttcgccgagaattccggtaagacctattgagacagcaaatcctaatgtcatccgtcttgtgatctgtaccgaatccggttcttgaaattcttcagttctcctgcaagcaaacccgctggatttcccggttttacgactctcgggtagtttcggaagagacggtaaagtgttggtgagactgttgaggtctatgaagtgagccattgcagttagagagtaagctttaggtgtcagcctctgttcttgtgtattgtttacggtttttatccgttataaatgagaaaagcggccatcacaaagattttatctgaaccaaggggtgttttcgtaattcaatattttaactactcgctgttcctgaattgataaagtagagttcgtgccgttttacgtgacaaaaaaaacttgtatcttctttgctttttccttcaccgatctgtattgccgagtgtcgccgattccccaaaatcttccctccgttgctgatcataagcacgccgtttccaatcgaaattctccgtgttatttcatcgtctctgccatcttcactgtctcgcgtcgccgtgttcgattgaggtactcccactgctccgatttgagtatttagggtatgtgtatg

SEQ ID NO: 14225 - DNA, 3000 bp, Unknown
  misc_feature (1)..( 3000): cDNA_ID_2990679_gDNA_ID_2214712_Annot_ID_189919 3000 nt of promoter + ATG
ggaaatcaaaccggacattttgacgacgagttcccgtaccgagattactcgatgagattcgctgcgccttccttaccggtttccactaaatgctcaattgatttcgatagcgacattgataacaagtgaaagccacgcgctcgactttttatgttgtcgtgtgtgagaccaaaatgagatggcattttgtttcttcttccaatatttttttataaattagtattgactattgagtattattctgtcattaccaatgtaattacaaagaaaagcacctttcatccaagaaaaaatttaaatatagaaataattaaacaatttttttttcaaaactctagaaaaaaataaaaaattaggaacatagggagtaaaaattttcaaaccatcaggaattaggttcataggatttggattagggtaaagcgtgtaagaattagtgtaacactaagattatcaggatttggattagcgaaaatcgtgtaagaattagtgttccacaactacaaggatcactcgttgatctgtttttttataggatcgcttgtgtagccacctctttctccttttatggaattcatgatgatatatgatcaatttttctctgatttttgtagttacccgtaaccatccatatttgcgactctttatttctttgtcaaacaaactacaatcttatcttttcttttgaactttttttctgccacgtatgtttccttgtagttgatttgatcttaccctatcatgaatttggaaaaagtttaccttttcgagggactctatatatatttggaaatcactgacatcatcaagcactttcaccacttttgtagattcggaggagtagaattgctcgaatgtaatttacctgtttcaagtctttgaattggatttttagtggtgcgtttggttggatcgcgttaggcttaaggcagtaggctatcataattttttggtggttgaaaagtaatgttgatagttcttgtgatagatctagtgtgcgcgaccatatggtgtttacaattttttcatattaattagtccatggaaacatgcatgacatgaccgaaacgaacttttatataaaatgaccaatttatataaaatgaccatgacaattgaatcttaagtgaaagaacgaagctattttaacccaaacgatcacgtgaaaattttatttaatccaagacttatctacatcttaatagttgtcatttgctgatgtttcacatttagttatcaaattgttactctttgatcttttatttattggatcaaatccagttacgtataatttgtaaactccgacatgatcttcttcgaatacagttcacattccacagagaaaagatcaaacatgtttggtatctacattataataatacgtgacgtctatttataatttggtttttattatatagacgtcatatatagttgtcaaggatatattaattatgaacctggttgaataaccgaaaagaaccctaatcccaagagtttacttgtatgacttttattatgatgaaattaaacaataaatcataaacctataaatttagaattatcaaccaaaacttaagtcgtacgtttgagtatatagacgtcatattaattataaacctggttgaataaacaaaaagaaccctaatcttgaattacttgcatatatgacttttattatgatgaaaatcataaacttaagtttagaattctcaaccagttaagtcgtgttcgaatatatagacgccatagttgtcaagaaaaatattaattataatttataaacctggtggaataaacaaaaagaatcctaattatcgaagagtttacttttattatttatgataaaaacaataaatcataaacttcgagacgatttagaattatcaaccagtaaagtcgtgcaaattaagcaaccaaacagtggtaaaaaaacctattgaatattgtctggtcaaccaaacttcaggtgtcgaaatttttatatatactataatttattggtattaattaattttgagtaacacgcacgaaaactaacagaaatggtattattttaacatttcatccaagacattttgagatttggtctgtctaatatagatatatattataaagacaaattactagtacatacatagatatctttaagagccaaagattcggacgttttctgatatacgtgcagagagagactgattcaatataaaatgttcaaatagtataaatcaaaggagtagccgagtaggactaaactaactaatctaacttgtctacggaaacataaaaaatattagattctaacacgtacctgatgatggctctatatatcaaacttattttattggatcattctttttccttattttgaagcaaaatggcaatcttttaatctttgattgtgttcaagagcggaccttgggtaagggaggaatgggttggttaaccaacccccattaaatatatacatatatgctttaatgcatgtagaaacttaatttttcttaggtgatgacacccccactttagaacaattcagtaacagtttctattatataactatttttgagaataaaattaaggttcatattaattcgagttgcagttaacttttataatagataaccattccgatacaacacaggatacccaaaaaagaaaaagaaagcgtatgtttaatatttgagacttgtgtttatacctcaatgataacgcagtgacatatataaatcacaatgatacaaagttaatgagtcacattttcaaaattttaataacaagaaaataatgataatgacttttgtatatatatattttttcaaaacactcaatttgaatagtcttctctttttttttatatatatcatggcttatgctttataaataggcaactaacacactaaggttttcttacaaccctcgcaactctatttaaacatttatcttgtgacgtttcacataacaagatatatctacaataaccccaagaaatttaacagaatg

SEQ ID NO: 14226 - DNA, 3000 bp, Unknown
  misc_feature (1)..( 3000): cDNA_ID_2994430_gDNA_ID_2214712_Annot_ID_189918 3000 nt of promoter + ATG
actttattggaacccttttatgcttccctatatccttctttatcatctagtgtttgatcctttggatgaccactatatcatgcatgattcccaacccgatataagtagagtgtcaaatacttataataattattaatttggcttcacaatagttttacaaataaacaccaaggaaatcttttcctttgtaaattacaaacaaatctttcatattgtaatgggctcggttgttaaggctgataagtgatatgtggttttttattttcttactagagtacttgtttcattattacgactgaaaatttattcacattatgttgagagaaaggaaaatataataatataatatatggatttcacaaatatgtttggggtaacaaatattgcaccaatgttgtatttgagatatatttgtgcgcacaaatatatacacgttcgacagaacatgtgattcaataagttgtttgtaatcccgttttgttataataaaaaataatgtatatgatataaactttcataccatttgaagtacttctttcattattaaaactgaaaatttattcacatgacatcgagaaactgccagaatgtgcaaaacgttttgagtttgacattgacattcaactacaaaatagctgaaaaacagttatacgtccagatttattttaaatcattagaaagtagaaacgacttaatatatgatgtgttaaggttttaatggggtttaacagtgtctatatatgtatttttgatattaaattaaattttattttatcaattttgttaaatagtgagtttgatagtaagtaaataattatatatatttatagagtttaagttagaaaacgtgttaaattggtaaacaattatcaaattttgatgggatacagattacattttgaataaaataagataaatattgatttttcatggttttaataggttttttatttataataatgtctatataggtatgtatttgatgtaaaatcattaattttattttatccattttgttaaatagtgagttggatagtaattaaataattatgaatatttatagagtttaagttacaaaaaatgtgttaaattggtaaaaacaaattatcacattttgattggatacagattaaattttgtataaaagaagataaatactgatgtgtcaaggttttaatggtttttattaataaaaaatgtctatatatgtatgtatttgatattaatcattcctttatattttatcaattttgttaaatagtgagttggatagtaattatatacttaattatgtatagatttatagagtttaagttagaaaatgtgttaaattggtaaaaatttatcaaattttgattggatacagatttgatcaaatctctctttatcacctttgatttagtataaaataaaaccaatatacattctagacatataacatttatagtttgagtcttctttgtagtattgtgctcctcgtcttaattaactaatcacaaaaaaaatgaaaggtgaaaagagagtcaaagaagtgatttgtctttatagtcgtggattatactatttcattgccttgagagtatcattacaaatcctcttagacattgaaccccctagctatatgcccgtatacgtgtaaggaaattcttgttgtatatagatttgatttgaagtagttatttggatgatttttaattgtattatgtctcatcatggccagatacacaactctgagggctgcgaatattccatacattggtatggtaatttggtgcttgtgcaaagatgttctagtcccaagatatcaactaggaccggaggggcgggcattcttcttcttggccgtgatgatacttatgtattgcatctcgtataatgtccaaggcgtaatgagcagagtagaggggtccataattggcgtgtgtcttatactagcggggatttcgatcgtgcaactctcttgtccaataaaagattttacagttacacatactctgtccaccacttacttaggagctctgtttgcaatcctcggttggttaggcacatcctcatggtcctactttattggaacccttttatgttttcctataaccttatttatcatctacatgttggttgatcctttggatgacaactagatcaggcatgattcccaacatgatatgagtgacatatatctataataattaagatggcttccaatatttttacaaactgtaaacaccaagaacactgttttccttcgtgaataacaaacaaatctttcatactgtgaagggctcagttgttaaggagaattattaagagtttaagaccttgttataaaatagctatatgtggttttttattttcctactacagtacttaagtacttgtttcattattaatgtcaagaaaacttgattcgtataaatcgtgttcttggggtttaagttacaaatctatctgccttatatattgactacaactcaagtatagagcttaacttaggagtaaatacttaactaataatccataactaataattcttaatatatatatagagagatcaatattcaggctgctaaaatataattggaaattctaggttactcatgaattttgtgtaagtggagtataacttgtgaatatattaatgtaatttccactaaacggcaagtagttttatttgtgtgaaatggaacggcaagtagtttcgttcgtgttgaaaccgtaatattctattgggctttttcacacggaagcccatctacatattttttctcgtggtccgttgttgcatcgcaagagcactaagtttgaaattcgaaaaccaaatcgtctctctctcgctcgatgcgtgttgcctgttcggattctggatctctgttgaattgctttctggggacttgttttagtttggtatttgttcgtttggcttaggttttagggttctgtgattttgataactcggggttttgttgattcctgaagatttgggggattttagggttgatg

SEQ ID NO: 14227 - DNA, 3000 bp, Unknown; identical to SEQ ID NO: 14219
  misc_feature (1)..( 3000): cDNA_ID_2711121_gDNA_ID_2214712_Annot_ID_189914 3000 nt of promoter + ATG

SEQ ID NO: 14228 - DNA, 3000 bp, Unknown
  misc_feature (1)..( 3000): cDNA_ID_2711117_gDNA_ID_2214712_Annot_ID_136978 3000 nt of promoter + ATG
cacaacactctcctcacaaagctgtagcaatatcgacacagccatctctttctgtctctgtgttcccacctctactatctccaccagcaccggaactcctccttcctccacaatcgccggtttcgattccggcaccgacattaacagactcatcacaaacgccgatttatccaccatgtttgatccgaaatccgccatcaattcaacaagcggcttcataattcccgattgcacggctctgattttgttctctttagctgagcacaacgagtacagagccgtcgacgcgtccttcttcgctctgaatccgcctgtttctagaaggttcaccaacagaggaatcgctccggatctcccgatggcgactttgttctcctcgatctgcgatagacggagcagagcacaagcagcgttctctttagcagtcggtgttcccattttcaaagccctgacaagcggcttaatcgcaccggaagaagcaatcgactctttgttctcgtcgcagagagatagattcaagattgcagtgacaccatactcctgaagctgaagatccgaagaagagatcagagaaatcaacggcttaatcgcaccggccttggcgattttgatccgattctcaggtttgttcttggataagagcctgatctccatagcagcttgcttctgctcatcgatcgaataggaggaatcaagatgcgacacgagatgattgatgagatcatcggaattctcagaggcgcaagagaggaggagacgacggctctcggaggaagcagtggggaattcgccggatctgtcgctgttacaatcgctgaaagcagaggagtcatcgttgagacttaaatcgctgaatttgcggcccatgtaggtgaaactgccggggcggtgattctccatctccatggatatgagatcagaccatcaatacaaaaacaaagaacgtggatgcttttagtttagggtttggtctgtcttacgagtggtctggtctgtcaggaatatttgtttggaggcaagaatgagctaattcagagtctagagagagagagtggaataataataccttattataaaattaattaatggttttcattcatgtataaataaatatatattttatgttttgtaatggcccggtcccattattattacgaggctccgcgtgtctcatggttactttgggctttttgtagataagacccattataagaatgggcttcaatgtctattaaaagtgggcccactgctgatgttaatcatacaagtaccgagagcagcagattagatagacgtgttgatagatcctcgattttctctcttctctcttgtcctcggaatcaacaaaggtaatgtgtcttcttctcttcaatgcgatcggtttcagttttctatcggaagtcaaactgttttgacttctttcggaaattccggtgattcaacgtggtaggatcgttgttaggatggtgttaagagttttgatttttgtttgaatatcaactaatttatacatggatttcacttacttggtgatcttagattctaattaatccttttttcgggatcttagatctatctgattctcatcccaatttgattttccacttgttttgcttccgacttatggattgctagagtaacagatctgctttgaattatgggtaaattatgtttctctaatcctgttatgtccttaagttagtagttagtcagtctcgtaattcatatgatcggccgaattagtgatcagtgacagtgagattatgtgtaggtttatgagcaaaattttaggtatgttttgcctttatggaagttcaaatttttgttgtttaggttttcctgatgcattattggaccttatatattaacagatttgtttttgtagacttttgtgtaataaagcatggaatccaacagaggtcaaggttcgatccaacagttgcttgctgctgaggtagaagctcaacacattgtcaatgctgcaaggaccggtaattttaagttttttttttcctttgccagtttagttttcatatctgaaactctataattacttgtcaactttagaactgaaagtttcccaacactaatatctacatccaattacattcttgggagcctgcatattttatggaaatgaagttgtagttatgtgtagcacttggagcataatgcataggtttgattatatggcttgaaattgatttataacctgtttattggttgcagcaaaaatggcaagactgaagcaagctaaggaagaggcagagaaagagattgccgaatacaaagctcaaacagagcaagacttccagaggaaacttgaggaggtaaatgattttttaaaaagagaaaattgttcttagacaacctaaaatgtagtgtcctcactctaattatcatattgttgaaaacagacaagcggagactctggtgcgaatgtgaagaggctggagcaagagactgataccaaaatcgagcagttgaagaacgaagcatcgaggatttccaaagatgttgtcgaaatgcttctgaaacatgtgaccacagtgaagaactgagagatatttttataagaaagtaaaaaaaaagtttatgaaaaaagtgggagtcatttttgagtgatctgctctctttctcttttgtgagtatttctggatttgagagactcatcttatattattgttgctacttattctctgcttttttgtaatttatctctgtactcttctttttttttttttttgaacaaccatctctgcactcttctttgtattcatatatttggaacgttgtaataataatttgagcgcagaggaacacaattggattatttatgtttctaaattgttacaaaaagaaataaatctcaactggattgggcctaacttaacttatatcatagttttgttatatcgtaagctgaaggtttgggctttagttctgagaatagtgaacactgaaaaatggagatttaacaaaaaaatccaaggagaaatg

SEQ ID NO: 14229 - DNA, 3000 bp, Unknown
  misc_feature (1)..( 3000): cDNA_ID_2994430_gDNA_ID_2214712_Annot_ID_136981 3000 nt of promoter + ATG
cccttttatgcttccctatatccttctttatcatctagtgtttgatcctttggatgaccactatatcatgcatgattcccaacccgatataagtagagtgtcaaatacttataataattattaatttggcttcacaatagttttacaaataaacaccaaggaaatcttttcctttgtaaattacaaacaaatctttcatattgtaatgggctcggttgttaaggctgataagtgatatgtggttttttattttcttactagagtacttgtttcattattacgactgaaaatttattcacattatgttgagagaaaggaaaatataataatataatatatggatttcacaaatatgtttggggtaacaaatattgcaccaatgttgtatttgagatatatttgtgcgcacaaatatatacacgttcgacagaacatgtgattcaataagttgtttgtaatcccgttttgttataataaaaaataatgtatatgatataaactttcataccatttgaagtacttctttcattattaaaactgaaaatttattcacatgacatcgagaaactgccagaatgtgcaaaacgttttgagtttgacattgacattcaactacaaaatagctgaaaaacagttatacgtccagatttattttaaatcattagaaagtagaaacgacttaatatatgatgtgttaaggttttaatggggtttaacagtgtctatatatgtatttttgatattaaattaaattttattttatcaattttgttaaatagtgagtttgatagtaagtaaataattatatatatttatagagtttaagttagaaaacgtgttaaattggtaaacaattatcaaattttgatgggatacagattacattttgaataaaataagataaatattgatttttcatggttttaataggttttttatttataataatgtctatataggtatgtatttgatgtaaaatcattaattttattttatccattttgttaaatagtgagttggatagtaattaaataattatgaatatttatagagtttaagttacaaaaaatgtgttaaattggtaaaaacaaattatcacattttgattggatacagattaaattttgtataaaagaagataaatactgatgtgtcaaggttttaatggtttttattaataaaaaatgtctatatatgtatgtatttgatattaatcattcctttatattttatcaattttgttaaatagtgagttggatagtaattatatacttaattatgtatagatttatagagtttaagttagaaaatgtgttaaattggtaaaaatttatcaaattttgattggatacagatttgatcaaatctctctttatcacctttgatttagtataaaataaaaccaatatacattctagacatataacatttatagtttgagtcttctttgtagtattgtgctcctcgtcttaattaactaatcacaaaaaaaatgaaaggtgaaaagagagtcaaagaagtgatttgtctttatagtcgtggattatactatttcattgccttgagagtatcattacaaatcctcttagacattgaaccccctagctatatgcccgtatacgtgtaaggaaattcttgttgtatatagatttgatttgaagtagttatttggatgatttttaattgtattatgtctcatcatggccagatacacaactctgagggctgcgaatattccatacattggtatggtaatttggtgcttgtgcaaagatgttctagtcccaagatatcaactaggaccggaggggcgggcattcttcttcttggccgtgatgatacttatgtattgcatctcgtataatgtccaaggcgtaatgagcagagtagaggggtccataattggcgtgtgtcttatactagcggggatttcgatcgtgcaactctcttgtccaataaaagattttacagttacacatactctgtccaccacttacttaggagctctgtttgcaatcctcggttggttaggcacatcctcatggtcctactttattggaacccttttatgttttcctataaccttatttatcatctacatgttggttgatcctttggatgacaactagatcaggcatgattcccaacatgatatgagtgacatatatctataataattaagatggcttccaatatttttacaaactgtaaacaccaagaacactgttttccttcgtgaataacaaacaaatctttcatactgtgaagggctcagttgttaaggagaattattaagagtttaagaccttgttataaaatagctatatgtggttttttattttcctactacagtacttaagtacttgtttcattattaatgtcaagaaaacttgattcgtataaatcgtgttcttggggtttaagttacaaatctatctgccttatatattgactacaactcaagtatagagcttaacttaggagtaaatacttaactaataatccataactaataattcttaatatatatatagagagatcaatattcaggctgctaaaatataattggaaattctaggttactcatgaattttgtgtaagtggagtataacttgtgaatatattaatgtaatttccactaaacggcaagtagttttatttgtgtgaaatggaacggcaagtagtttcgttcgtgttgaaaccgtaatattctattgggctttttcacacggaagcccatctacatattttttctcgtggtccgttgttgcatcgcaagagcactaagtttgaaattcgaaaaccaaatcgtctctctctcgctcgatgcgtgttgcctgttcggattctggatctctgttgaattgctttctggggacttgttttagtttggtatttgttcgtttggcttaggttttagggttctgtgattttgataactcggggttttgttgattcctgaagatttgggggattttagggttgatgggttccacaatg

SEQ ID NO: 14230 - DNA, 3000 bp, Unknown; identical to SEQ ID NO: 14225
  misc_feature (1)..( 3000): cDNA_ID_2990679_gDNA_ID_2214712_Annot_ID_136982 3000 nt of promoter + ATG

SEQ ID NO: 14231 - DNA, 3000 bp, Unknown
  misc_feature (1)..( 3000): cDNA_ID_3022325_gDNA_ID_2214712_Annot_ID_189898 3000 nt of promoter + ATG
accaaatagttcaattaatggaagaggttcagaatctggtcttcggagttgtcatactatttagaaatctggtcttataatctgaacaatcctaatcccacggttcaacaaacttttgacatggatcaaacatataacaaaccattaacgataaaagactcaaatcaagcgaattaaaaaacaagactcaggtcaacaaaccatattagcctacgttgcatcacgataatgaagaataacttatagatccatccccttttgtctcctaattcttaattttttagaaagagatcattattgttctcggatggagatatttagaaaggcaacgattgtacgtctccgtagccacaacgacaaatacctaagtgccgatgaagatcaagaatccgttcatcaagatcgtcgcggcacaacaaaaaacactagatggacggttgagatcgtacctggatccaatgtgatccgtcttcaaagctgttacggcaaataccttaccgccactaatattcatttcctccttggagccaccggcgaaaaggtaggtttatctaggggagattgggttacaagaaaccatctcaaatcaaaattaggattctttttcaataaatttcttgaaaaacaaggcatccaaatccattgataacatttataaacactttgacaaagtaaatcttgcccaagagatatttcaaatgtttaacaacgagaaaacccattcttatgactatagcgcaaacaaaaacgcataaacagaatttttttaaacgtggaaatgtttcttgctaaacaagccgtgtgtgtttcatattcacaaggtacttcaaactctacccgaaaagttggattcatctgcggagtgggagccgctatcagacgatggtgtacacgtacggttcaagagtcgctacggacaatatctgagggcaaacaaaggtgtaccaccgtggagaaactctatcacacacgatattcctagtcgtacggtcacacaagattgggtcatgtggactgttgacgttcttcagattcgagttatcaaagatgatgcagagtctacccacagttcttccactttttcacggattgaggtactactactatatacactacacatacgtgccaataccattcttctgaaaatactagtactaaacattcatcgatacatgatcagtcagatgattcgtttattgtgagtttaccactcaagtccgaaggaaggctaatatattacgagaccggagatgatagtgggaacataaataaggaaataggagaaaaatcattgatattccatggaagcgagttgatagaactaaagaagaagcttgaggaagaaacagagatggaagatgttatgatttggtgtagaaatcctttgaacgaaaagctttgtcctcttcaattgcatcttcctcctaacaacgcaactatgcacatcatcgtctttccttcttcttgcggtactaaacttacctccttcttcattgttaccattatctataatcaaaatattgtttatgcattcctaatttttttcaattgaggatttcgatttccaattaaaactttaggtatattcgagacattgggagtccagagttgttgtttttccgatttcttttggtcggaactctaatgaaaaatccgacacatagttttcttgaaagtctcattattcgtcacgtcagcacaaacttttattcatcccaagtttaactattttaatacagcctctaattgtgtttttgattttttgattttttttttttcgcagagattgacaagtgattgtcaataatatattatcaaattataaccaacttgggaagaagaaaaaaaagattattttgttatttgtgtacgaagaaagaagtcattgtgaagctaatttattcttcatattccaatatatgatagttgataagtacatgtatagttgtatatacaacataatgatctattcgtttaacatttttcttttaaaaatcttggaatgaaaatactgtatgttacctagaattcaaatagaaatcacacctaacgaactagttggtagtagaatcttataattttgtttaatacacaaaataaagtcagacaatctgaaaatgacacataatatgtttttgggtggaacctttttaactctattatgcaaaaacataactttttgggaataagaaaagttgtaaagcaaccaaaaagctaaatgacatatattttttctttctcttaattactgcatattctagaatcctactactagatcttatccttccactttttttttttgttacatattaatttgtcttaaccaaaatatacataggaaaaccttatagggacattatatctatttatgtaacattgatggacgacacacacaatggaccatgtgatattttagttcatatatcaataataaagttttgatcattattattataattatatttgctcgaccatgatagtgtatttaacgtcaagtgtgggtccaatttcggtccaaggatgctgactagaaattagcatttttatagttttctcctaataatatactatttaatgcaaacggcctgtgacgactgaattgtcctctgtctggccccgtgagcttcaccgcagcttttagatattttctttccccgttctttcggattttttttttctccccctctcaagcaaagcattatcgctattgctctgccttgtgagctgcgatcacctgtttactggtaagtctctcctcgtcttctccttcttcttctctgggagatcttctactgttctctctgtgagctgatttgtttggtttcctccatagagctgatcatatcatcatcgttgggaactgacgagatttagtctatattggtgaattatttttgtttatctggttttgattttttgaatctgtgactttagagagaagaacactgcgacgtcgttaaaagtaggttgagagcgagaaaggccgagagaatggagatg

SEQ ID NO: 14232 - DNA, 3000 bp, Unknown; identical to SEQ ID NO: 14223
  misc_feature (1)..( 3000): cDNA_ID_2711101_gDNA_ID_2214712_Annot_ID_136984 3000 nt of promoter + ATG

SEQ ID NO: 14233 - DNA, 3000 bp, Unknown; identical to SEQ ID NO: 14222
  misc_feature (1)..( 3000): cDNA_ID_2711093_gDNA_ID_2214712_Annot_ID_136986 3000 nt of promoter + ATG

SEQ ID NO: 14234 - DNA, 3000 bp, Unknown; identical to SEQ ID NO: 5727
  misc_feature (1)..( 3000): cDNA_ID_1829116_gDNA_ID_2684091_Annot_ID_189939 3000 nt of promoter + ATG

SEQ ID NO: 14235 - DNA, 3000 bp, Unknown
  misc_feature (1)..( 3000): cDNA_ID_2991881_gDNA_ID_2684091_Annot_ID_189954 3000 nt of promoter + ATG
attacagtagatatatgaagggaatcttatagaatagagactaacagattgtttatctgaaatgattgctagatcagtcatttcgcatagccccaagcttgtagagagctatctcaagaaccagtcccaattgtcatcattttctatctcgactacagaccaagcaatacggacaattcgattgtcaccatctcttccaactgtggctaatagatgtccttttatgtcccatttcagaaaagctccatctatccctattacaggtctgcaagtttgtttccatgactccctttgagcttgaaaacaaatatataaccggtaaaatctctgcttgcttccaatcactgctcctgcaactgtctctatgttgaactctgtccccggattccgcaataacacctctgcttgataatcccatatcctagcaaaatgagaatcatgactagcacgtctagctctcaaaacttttgtctttgccttagcacattggtctggagtcacttccaacttgtattctcttaagatctcagcaaccatctcatgtttagtgagttttggattcactctcaacctttcttcaaacaaaaacccaatagatgacacctttaacatcttcgaatgtcctgacctcacacaagtatgctcattgtaataagttcgtatttgcatcttatgttttctcttctcataagagcaacggactctgcacggacattcaacaccctcatcactaacatacacacacttagcagcaacaaccatagcttcagaattataaagtttaatgtcataccttgtctttagggaatacatcaaaagagcaagcttgaaatcttcaggagagttataagtcttctccaatgctagtaaaatctcaggatcaccaagatcatttcgagctgcctctactctatcatcatcttcatcatcagaggacaaaggatctggaatcttgtcttcatcccatatatcatctaccctgtcattgtcactagcttcttcttctccattagcctctggaaaatctctttccatgtctaagttaccatcttcttcgacacctaatccagcagtatcatcttcttctctattagtatctactgcatcatcaacctcatcgcagtcttcatctccttggactgcacagtcatcgtcttcatcaagagcaggaacttcagcctctaaatcctcctcttcttcatctctgattctccttcgtttacttcgtctaagtggagcacgaacttcgactgcatctgtcacatcaacgcctgattcttgagcttcatcgtgagcttcctcttctccgccacaagacgtttcacctaaagcttcctcttcctcttgtccaatttcacgacgagttgattcttcaactgcaacatcagcttcctcttccaatctattttgccttcgtttacttcgcctaagtggagaacaaactgcggttgcatctgccacatcaacggactgacctcgagcttcttctccaatttgatttgcttctccttccggcattggttcaactgcatcgtgagcttcttcttccaatctgatttgccttcgtttacttcgcctaagtggagaacgaacttcggccacatttgccacatcaacatttgatactacattcgcttgacctcgagctttttctccaattcgatctgcttctctttccggcgttggtttagctgcatcttgtgctccgtcttctccgccacaagactcagataccacattcgtttcacccccaacttcttctccaatttcatctctttctcctcgcggtggtgcttcaactccatctcccaccaaattctctgattcgtgaagcattggagatccaatcctcataacgacgccattctttctaactaatggcatttcagaaaacgaattgaagcaattagggtttcgattttgattttgggggcaggattaggtttcgatttgggtttagggtaattgattttgttttgagaatttctattctcgattttgatttctctttagcacgaaaacgaggtcgtaagactataataacagatgcttaacggattaaaacggctgtcaattacgctgttagaaggagttttaacggtggttaattagaccgagtcaacgcaaacttgaaagtttaaaacagaagtcaactttttgttgagagttaaaacggccatttctcgagttcacggttactttggccattttttgtaaattgaagtattaaataacattttttctaattaaacttaataaactacttaagaaaaatgggaaaataataattggaaccgactttaatttcacaatgactcttttgcccttccatcgttgacgacattgtttctccttctctcttccacccatttaaaaacgcaaacttggaaaatggagaactgtttaactacgccaacgggctgttttaatgacaaatgttagactgggctcagtaacggatgttgtttcttgtcactaaagaatacgattcatagatttaaaagtaatccatttactttgcttttactttttcatgtgaagagaaacaaaaaaaagttttgttggtgatcaagtttgtagtgtactagtaaaatagtaccatagtatgtgtgtgtgtgatgtggaaacaaaagaatatatagaaaattttatgttttgggtttcatgtattttcttttaacataaaaacaagaacagataagcataatgacgtaagcagtggcctaagcatctcttaaaactccatttaaaaaaacatatcgaattgaataacattgagttgacttgtttaacattcacaccttgcttgctacggtatcttagcttccaagattcaattaatttttcattttttatgttcacagtcaatagtaataagacatcagcatcgcatacaaatttcttatataactcgactagtttactctataaagaatcagcgattggagtatagaaaaggtttaagcaaaatccatcaaagaagagttccttttcacaata

SEQ ID NO: 14236 - DNA, 3000 bp, Unknown
  misc_feature (1)..( 3000): cDNA_ID_3040786_gDNA_ID_2684091_Annot_ID_189960 3000 nt of promoter + ATG
tatgtgtctcttctatcatctgtcaatttggtcgccaatcgtcatgccagtgaagccaccatacactgacaacttctacccaaaacgatatatttatgtgtctatatttgcatattcgttttggacactattgatcatatattgatcattgcataaattattcatctacttaaatcagaataatttgcaacattagtaggaatacactatatattgtctgattttatatgttttttgttttgtttcctccagaatctgaagcagtaccacaacaagtaccagctgcagaaggcgaagcaacaacgactgctcctgaaatcacaacaagcaacaccaaagaacctatttcttcttgatctctctctcatttcccaatttgtacaatcttcacatttttacctctctctctctgaaaaaaagaaaacagctaattcatttatttctcaaccagagcaatgacttgagccccaagaagacagactcaacactgtcaaacttaaaaagacggctcaagataaatctcttgtcatattttgctctttttctgacggaatatatataaaaatttgagctattcatattcttttttactcatttattttatttctaataatttcaattttttgctacatgattcgtattcaagctttttcatatatcttttttctcctttatatccactttttttcttgggagtttcaatatggatatgtactcataatttataagatccaagtgagaagaacactatagattattgcaacttgtaagtacatcttttaaaattgtcattaaagccagcccaaatgatagtggaaacaaacaggccttttctaatgggcctatttggatacggaaagcccaattaggtcgatctaatcgtgtgacatgtaaggactttattaaccaccgtttcaaaattcacgtacgatgatcccaacggtggcgccgaagcttcttccgccaagcgccgccactccaccaccttctctcttaacctctttcccttctctccgtccatgagctctttaaccaccgtctccactctctccctcttcacctcctcgccgatctccatcccaatcccccaatcctcgcaacagaactttcgattcgtcaactgatcagcaaaaaatggccaacagatcatcggaacaccggcgtacaaactctccaacgtcgaattccatccacagtgagtcaaaaatcctccaatcgccggatgcgaaagtaccttctcctgagaacaccatcctttaattaacattcctcgattcttcgtctccgataaaaactccgccggaagaatcgaatcatctccgtcgaccataccagatctcaccacccagagaaactctttcccgctcctcgctaaaccccaagcgaactctaagatctgctcactagtcaaaaccgttagactcccgaagttgacgtaaatcacagctttctcagctttagtatctagccaatccaaagactccgtctcttcttcccagagattcaatcctagctttctgatttcgctgttcttatcgatttcgcgattctccagaatctggaacggtccaacggagtagatctgagggagaagagatcgcagagataagagaacgttatgctcgagtttttcgaaagtgttgatgaagatcgcagaagctcttttgattcttccggttacatgaaggatgaaactaatcatcggatcttgaggattcgtcgtggtgacgaaatctggaaaatccttaagcttaatcttcttcatcgacggtatccaatcaatctccgtctctaaatgcttcttcaagtcactcgaatctgatggaattcgaaattgttaattgagaatttttcagttgatgatcttcaatcgattcgtacctttgaggggaattatctctttctcgatgagtttttggtaatggagatacaagattaaagcagtagcactgttggtccagaggagaactaccggaattttaagctcctccgctgcgtcaattgtgaagctcattgaagcgtcggagatgatacagctaaccggtggtatatcagaaccggagtttaaccggaggatgaggtctttgaatggagctaaacagttgtttattgtggagtcaataagcttgagcatgtcttgcttagcgtcgacgtctgtccaaggaagaccgtcggggatagtctcgaagcgaaacgaggggagaccgttgagagcgtgagggccacgtgattggaggatacggcggtggttgtagtcggtgttgacgaaagtgacgtggaagcctctagcgtggaggagcttggctagtttcagcattgggttgatgtggccttgtgctggataaggtatgcacattgcgtgaggtttctgtgagctagaaccgccatgttgttccatccttttgacgatgacgatgatgatgatgatggattccgcaacgttgagtcactcaacttgagtgtatcgtcccataattgatagtggaagaagagagagtgatactttggaacctcttggtatagttttggatgaggaggaagaatacttgtcggtttgtgattatataatagccgccataaggctcgtttcaaaaaaaaaaaaaaaaaattgccgccttaaggcccataattgaaagactacgtgtcgttttagttatctgcgtcgtaaggcccataatttagaacgtcgtcgttttatttattgaggttcccgagttttgcgtttcctctttttatccttttagaaacgatttgcgtaagctaaacgcgaggttcttatcagattctatcgttgaaacgacgccgtaacttaattcgatatcgttaacgcgtacaacgtgcgccaaagcatttacgcgcactcggtgacgaaacgaggactcggatcatcacgcgccaccgcgtggagaaaaagcttgagttttcaaaattccaggtagtaaaaaagcaatcagatcgcagagagagaaatcgaaattccattgaagcttatagccaatg

SEQ ID NO: 14237 - DNA, 3000 bp, Unknown
  misc_feature (1)..( 3000): cDNA_ID_3040772_gDNA_ID_2684091_Annot_ID_189964 3000 nt of promoter + ATG
ctatggagccaccgacatgtaaccgcgtttcaaaatgggacccactttccccgttttatcttaccttttttccttcaaagtatgttgttatttatatggagctgatccaataaattctattcagacattagaatgcaaaaacgaattgttattttggaatcttgaaataatcaccaatcatattttaaggacatatacctgtatctgtatgtgtgtgtttacaaataaatacgtacacactacgatggcataggatgcggctatgagagccgacgattgtgtaattaattaacttctgatttttttggctgattaattaagaaacctacttgtttattttgcatttatttagctaaaagtggttatatatatcggtgtaacccgtttgaataaactaccagttcagttttgaatgatgacatatatgacattttacgcaaaaataccacggtattattagttttgtttaagtttgaagttttataggttaactgtatgtttcgttatctcttcgtttgtttgttttgtgattaatcatacatttcccaaaacacaatatattataaatgctgaatggtaccttgtgtctgtttgcatattggaaatttctggagcaacctgatcccttctctatcaaagaatttaattgataattaatcgttggcgatagcacttttacaaacattttccctttacttgtcaaaaataattatcaagcagaaaaaaaggaaataatgaatcaatttcgagaatcattgaaacagatagtaacaatgttttggagttgttttgtttttaatttctcttcaaagtgaaggctaaggacaaacgctatgcggaatagttttctattgcgtatatatagtcgataataacaatataacatggctaattttgtgttacatcaatcatccaatcttcatatattgtggcttattctatattacattattacaataacatatattttacgtggcttttatgttcgtacgttgtttttatgtgatgatgctatgtcaaatcatccgtagtatcttttttatttgatgagtacaaacatataaaacaaaattgcaaatatttcaccaccctcttacactttatatatttaggtacatgcagatttataaatccactaaataaatatgcatgagctgtgaaacaaaacaactcagtgactcactcgacttatatcatacggaatataagaaaaaatcaaatgaaatttaccaaatttaccataaaatacagattttgaagatcaaataaaagtagaaaatcttatcgtgagtgggatatttaaaagtacaaaatttgcctcgtattgacacaattttaaccttatcgtggttggcgtgtacaagtgggcaactggtctcctaataatgcgtttggtaataaatgatcgtgattcttagaaatatctttttcgcaaaaacattagtctatggataagaagataaattaaccaaatcgatgagtgtaaaaaaaacaaaaccaaatcgaggacatttgtgaagaaactcgtcttattccaattaggggacgatcactcgttttcttgcgagaggaacttggcctaaaccgaccatttttttctcatggaatttgatcatgtgttttttgtcctcctttaaacagttcaaaatttgatgaataaactacaaagtcaacatttttacacattcagatctgcatccaaaacacccatattgtaccttctatattcatgattcttttggtcataatcatgatgttttgtttccactaaactttatgatgtttatataaattccattgacgctataaaacaagctcgatacatctaccttaaaaaagatcattaacttttctacataaaaaaaaaacagtccccgtaaaaaaaaatcatttactatcgacaaaataacctttaggaaatctcatgtttgacctaacacattttttcaaccggttcattaattctataaatgtcaaaatactattattgaacatcttctaatatttttggtcaactactactataaagcatcttctaatttttcagtcgaccaattagtgaacttaattaaaagaaataaatgtttgtttttatgcaccgccaagatttcatatatttttttatgggaagaagaaagagacagaaagagaggtaaaaaacattaaaaagtagaaagaaaacagagcgtgaagttaatacgattatagtactagtaattagcagtagatagtactaattagacatgtacccatgggaagcttctcttcgttctccccccttaaatacgcttaggcatctcaactaatttactctctttcttttgtttatataccaaagccaacggaagtgtttcttaattcattttttgtttgttttggtttaaataattcagtgtctcacgagctgtgtcgagattggatccatacaaaatctgcacgacgcctgcttcttcactctctcccactgttccagcttcaactctcttgatatacagagagagatagagataaagagagagagagtgagagtgatagctctcggagaaattgaagaagacacaatctgattagtattctccaatattccatcaactttttgctgagggaaatctccagatttataatcgtttgtatatatatatatacagagcagcgtagaaaagtacgatttttgcttcttttcctcactcttattcatcttcttgattttgattcgatttggtgtttattcgcttgattaatttaagggttgttggggttttttgtccaatttttctgggttttcgttcgatttcgatttccacgagtttaccaatttcgtctctcctcagaatttgtggatctgcttatgtaaaaattgagtctttttacttgttttgttcgaatttgtttacaaacgcgtgatctcgagtttcagagatctcaaagcttaaatttttataatctgatggacttgttttttatttacagggatcttagatttatagcagcaacaaaaaa

SEQ ID NO: 14238 - DNA, 3000 bp, Unknown
  misc_feature (1)..( 3000): cDNA_ID_3040782_gDNA_ID_2684091_Annot_ID_189961 3000 nt of promoter + ATG
atttaaagcaatgcatgctccctaacatggaaaccaaagcgaaagttctaagaattgatgattttgagagatacttataaagctataaacaaaagagtacagattcaaatagtaggattcaccttccatattagttctctcatctcaggcttcagaacccaaagcttggatagccaggctctcatttctcgttggcctacagagttccccattgaccatgggaaattgtaatgatctctttctttatcaagaaatgaagcgaggaaatcgatatcatatgaaaatccattcttccacatattatatctcttcgatactccattcacatcctcttcgcggttttcagtctctccacctccattcatccgtgtcctcttctctttcctggtaaggtctgaatagctcaaagtattatcttcttcatcgtgtgtttcttcttccaaatcttcagaattttcatcatcaagagcaagaagcccagcacggcaaactcctttgtgatggtaaccaggcgccatatccaagcacacgaacccaaagttttctttgttcacaaaattctgggtaacagccactgttggttcaagattaaggatacagtgccaccaaccacttggaacataaatcgtttcgccaggtagtagtgtgcactcaatcggtttgtcttcgtccgcaagaaggggataatagtctagccaccactgtacagggattgaaaacattaagagggatacagtaaagacgaatcaaaatggcagtgcttaaacagtttagcaatatacctgcagagatgagggtgtatcaatgctgacatcaccctcatcttcattgacatggactgtaacacctagaggcacttttccagggggatacaatgcccacctatttaaaacattatgacatcatcatcagaatgagaataatattgcaggaaaggaagaaaaattatttgtatttttgtccataaaggtgtctaccttttccgaccgcaaagcagggtgttccaggcgctggtaagagctgggtcaacatgccaagatgcaccagacctctccggaccaactataagccatctgtatggaggacgactttccttgtctaagatctcaaaccaatcttcttgaaacaaatggggcacactatagtctttcaataattctggagcagcttctccaaactacatgaaatgttgaatccttcaaatattctcaccacaaagtttcggtactactacaactctatcactgacgtgaatgaagtctaatataaatgacaaaactgtttctcgtaccttgtcatcgaaaacgtatagaggatcttcatcccgctgagttttcatatatgcgatgtaatccttgaacttcatggaaattttgttggggctcctctgagatattctaaacgggacttcaccatatttctctgagagttggtcgatagtccacgtattactggctggccaagaatcagcaaggccagaaagcaaaacctaaatcatagacaggaacaacatcacatatctgaaaatgttttaacagatcaaaatctcatgtactagcaaagattggaactttacaggtttcttggcgtcgtattccttagaaaactcatccaaggagatatttctcctacgttccacattcccattatcaaaagagaacccgtcaagagatgtattacacctatagaatcgtttatacaagtacaacgacatgaatcctgtaaaagcgcagagtaagtgagcaaaaaaaaaaaacgatcatatcataagagtatggaataaaccaagtatctaccatcaaaatgaaaacattttctgtatgcgtcattttcttgagtaactccttctctgtatatcagaaaaccaatcagtcattacaatttaaagataagcaaagcaaaagtcacatatctaaagacaatttgtatgtatcattgaacatggtaatttcaaagtacttacagatgcaatgttgtttttttccaagaacctttgtattcaagaggaccttttgctcttctgagacacaaactcatccacaatggttcttcattacatagaatatacatcacactgtacatcaaacatatacacataacagattaatcacaaacaatgcctcaacaaaatcctcatctgttcataataagaccaaaatcctgacttgctaagaattcgaattgatctagttagactctagttttgatcaattctttgatgttaattcgatcaataagttaatcttaggaagagaattatagaaaacctgctgacacaagcgaggtgagcaatatctcggggagcaaggtattcgagaagaacacagatggtctcatctggtagaacactgagactaccgagagcatctggtcggcgatctctttgtcctaacgtcgtcattggctataagcttcaatggaatttcgatttctctctctgcgatctgattgcttttttactacctggaattttgaaaactcaagctttttctccacgcggtggcgcgtgatgatccgagtcctcgtttcgtcaccgagtgcgcgtaaatgctttggcgcacgttgtacgcgttaacgatatcgaattaagttacggcgtcgtttcaacgatagaatctgataagaacctcgcgtttagcttacgcaaatcgtttctaaaaggataaaaagaggaaacgcaaaactcgggaacctcaataaataaaacgacgacgttctaaattatgggccttacgacgcagataactaaaacgacacgtagtctttcaattatgggccttaaggcggcaattttttttttttttttttgaaacgagccttatggcggctattatataatcacaaaccgacaagtattcttcctcctcatccaaaactataccaagaggttccaaagtatcactctctcttcttccactatcaattatgggacgatacactcaagttgagtgactcaacgttgcggaatccatcatcatcatcatcgtcatcgtcaaaagg

SEQ ID NO: 14239 - DNA, 3000 bp, Unknown
  misc_feature (1)..( 3000): cDNA_ID_3040790_gDNA_ID_2684091_Annot_ID_189959 3000 nt of promoter + ATG
attggttgattagctataccaaacacttcactgttcctttggttgaattttatgctctgatgctttcattttaagttgaaacttcaaactctgacgagatcattaatttaaacctgtaaagtgtcaaatgactaacgagtgtctattgcttaaatagttcttttgaaatgtatttttatttttatataatcaaattgatgattgatttcagaccaggtaaagtaattggctttacgcagtccaataaactagtccgcttttaaaattaaaaattgataaacaatcaatctacgcaacaagataagagacaagagactttatgatcttcaaattgatgagaaaagaaagcaagtttcgattacacagacattgaaatcgataacaacaaagaaataagaaaagagaaaataaattaaaaagagataaaaagatgattgatggttcagacttgccacaaatatgatgaatgaataagcttttgaagatgagcgaaatggcaagagcgacctcttagatggattaagaaaaacatatggacgagaaagagaagaaattccaaaccctagaagaaaactagcagtttcactcaaaagatcactgctgttcctcggtcggttttggcgctgctgcttccttgatctcatccgcagcatcatcctaatataatccccaccgttacagaatttagtcaatggaatgcgaatcatccataacagaaacaaagaaagaacaaaggtgcggggattatatgaacaaacctgcatatcagatgtccagagagtgagattgtcacgaagaagctgcatgatcaaggtactgtctttgtatgactcttcaccaagagtgtccaactctgcaatcgcctcatcaaaggccttgacgatacataacaacaacaaaaccagtcaaatttatgtccaatgaggtcaagtgttaaaccaagtccaatcacattatcataattgaaagatgagtagattgaaatacctgtttggcgaggttacaggcacgatcaggagaattgaggatctcgtaatagaacacagagaagttcaatgcaagaccaagacgaattgggtgtgttggagcaagctctgcattagcaatatcctgcacagataattacacatagagactataagctcaaaacctagacaatctcaagatcttattcgagaatacacaaatccctaatttaagtctcattatactggaaatctaacaaaccaccatccacggatcacacactagactcaaataaactagatctgagattcggaatcaaacctgagcagatttgtaagcggcgagtgtatgttcggcggcgtctttcctctcttgaccagtcttaaactcagccaagtacctgtgataatctcccttcatcttaaggtaaaagaccttggaatcaccagaagcagcggcagggatgagtctagagtcaagcaacttaaggattccgtcgcagattccggagagttccgtctcgatcttagacctatattcacggatcgccgtgacgtggtcatcgttaccacggctctcttccttctgctcgatcgatgaaatgatacgccacgaggcacggcgagcaccaatcacattcttataagcgacggagagaagatttcgctcttctacggtgagttcatcgccatcaacggcggcggagactttctccataaactctaccatctcttcgtacctctccgcttgctccgcgagcttagccatgtatacgaactcttcacgcccagacgccattgttgtttctagagagaatcgatctaaggaagaagaatcaaagagggaaagatctgagatctgatcaaaaagagagaaacggtttcgattagagaatcgggtgttgtaggtcaagcgagagaggacgatgaatgagtttttgtgtttaatgagggaaagtgataaatgcgttttagaggaaaagagtgaaatttggaaccaagatctaatctgggccgttggatttgtggccggtcctgctttttaaagggggattttttttcacctcaaattaagaacaacataaatacacttttagaaaaattggtaatgtgattattggataaaatttggtcaattaacaaaataattggtaatgtgattttgctactattagtataggcaccttaaggaattataaaattttgggtctagtggttaaaataggggctagttttttgtagatttgttaatatagttatttactaattgtgaaaagaaattggagttgtgagattgatacaataatggaagcaagttgggttaacaaaaatggagacagctcagagggacacatgtgtgttgtgagcatgtcaggggatccaatggaccctttcttctccaactcagctttcacatttttgtgattgctcaaacggttttttttttcttctttcaaaatttaaatacttcggaggttgtctattcttcaaatcttcaaacattcaactaagtacgtaggcgattcttacgagctttttaaaatcattatgttcttaattatgtggttgtatttgtactgaagtaatttattaaaatactacaatatttgtttttcctttttccgttttgcttaatccaatgcttatccagttatcctaatccatgattatgttttttcctatcttactcctttttgttaatttgttttatttgcattagttttcttgatgattatgttttacattcaatgaaataataagattactctatacttttctagcataaatattaactatacaataacatgtattcattgaacgtatagtcatgatatatctaaagatcatacgttagaaaaaaccgtcatataaaaaaggcgaaaattcggatatgttcgaaaaagatttgtggttaatctagctatatagcgtacgcaagtagatcaaaagtttttgataagtattgagataactcctaattataattagtcatttagataatgatgatccttatctaattagctttcttatctct

SEQ ID NO: 14240 - DNA, 3000 bp, Unknown
  misc_feature (1)..( 3000): cDNA_ID_3040810_gDNA_ID_2684091_Annot_ID_189950 3000 nt of promoter + ATG
aaaatccaaatttgctactatgataatagatttcagacgattttttttcttttttcaatcatagagtccacacgaatatttgcaagttactatataaaacactataatggtcaacagataaaaaaaaggcgaatgaagatatgttacgtaaaaagaaaatactgtaattataaattattactttaaaaagctttaaaatctggccacatgtttttaaagagtggtgtgacgtaacgactagagtcagcacaatccattattgtatcataaatattctcatctataaattacctaaacccttacaggtagtgtcccaaccaaacaaatcgagaaagacgaacacttacaaaaaaaaatctctttgtgagctttagcgatcgtaacaatggcgaacgaggtgattcttcttgatttctggccgagtatgttcgggatgaggacaaggatcgcattgagggagaaaggtgttgaatttgagtacagagaagaagatctaaggaacaagagtcctttgcttctccagatgaatccgattcacaagaagattcctgttctcatccacaatggtaaaccggttaacgaatctatcatccaggttcagtacattgacgaggtctggtctcacaagaaccctattcttccttctgatccttacctgagagctcaagctaggttctgggctgatttcattgacaagaaggtatcttatttcctttgtgcccttgattgaataatgttgaaattgaacttgggatttcataaaaattgaaactttagttgagtttgctagtgattggctcaaatttagggttttgcttgtagactcgtctttgagcttgtatgggtttgtctgatgttataatattacttgagtttgtagttgttagggttagagatctcacctccaaatttcagatttttcttgtggactcatctctgagctagtcagggtttgtcttcttagatagtttaatgttatgttacttgtgcaatttgaggtttttacatactagtttcgctagtagatatcatctttgagctttgtttgggttcatcttagatagtttgatgatatgtttcttttgcaatttgggggtctctaggactggttttgctttgtagacatcatctttgagctttgtttgggttcgactgagttctgacatagcttggtgttatgttactctgtgcaatgtttcagctgtatgatgctcagaggaaggtgtgggcgacaaagggtgaggaacaagaggcagggaagaaggatttcattgagatactcaagactcttgaatctgagcttggagacaaaccttactttagtggcgatgactttggctatgtagacattgcgttgattggattctacacatggtttccagcatacgagaagtttgctaacttcagtatcgaatctgaggttccgaaactgattgcttgggttaagaagtgtttgcagagggagagcgtggctaagtccttgcctgatcctgagaaggttactgaattcgtctctgagctcaggaagaaatttgtacctgagtaaatatgtttctcttgtcatatggttcggacttaagatgctctctgttttactttcgtgtgttgtctttcttaaataatgcagagcatctgtgaggtggtttgagtgtagagaatgtatgtctttgctgtagcagattcctgtgttttctggatttaatggcttgtcctagtttttatgcattgtaactatgagtttaattaatgatcgttaatctataatgattattaatttgttactttgatatgtaattacgccaatacgactcttctacctgaccaagcttatcacgccaatgttgctgtaaaagacaatagtgcagtttggcgattaaaacctccaacatcgagaatggtaagccggtctggatctaataagcccaaattggcatccataagcccaaattgaaattggcatccataactccatattgtagtcaattggaagttatgtggttgatgtgatcattagtgtcggtatgatcagattagccacgggtttagtgtttcttgccgaatttgaattcggtagatcaaataacattactatgatccgcacagttcatgggatttgaatttgatttacgattacaacaacgatattaacacagaactatcctgtaatttttgggatcgattagtaaattttaaaatattatttcaaaggctttatatatataaagaatttagagtataaacatagataaagcattatgtatttataaatcttatgctgatattgaaaaaataatggtgtatgtgatatatttaatagagtgcaatactctctcaataaattagtatagctgttatcactccttgtgtaaatgcgtatttcttgtacatgcatggtaagtagcttgtcctcgtatgtaccggattgtaatgtttgatatcaaatcaagggaatcacgtggtaaatgtacacccacctaactgagagataataatacaaacaactgtgagtaggtggccacgccaaaagtagagactgatgcagcaactaagcaaagtattacttcactcgatcaactttttattttgttaccttcttataaatcaagtcgatttctatattgtcaagtactaattccattctaatctcttacatatacgtttaaggtttgaatcagagcaaaagataatcacactcttttatattaagtgatgttttcactagttgcacacatatgacaattatttaacaaagttgcaaaatacattttaaatcgttacgggtaaaagcttactgtttaaaagatttatatatggaccataatatgctttgaaaaaagctgatgtgacgtaacgggaatcaaaatcctttccacatcattttcttcccctataaaacaaccgtcactcactccttctctactataacacacactcgcttgttcacgcacaacaaaaagcaagaatatataccactttgtgaacttcagagatcctatagca

SEQ ID NO: 14241 - DNA, 3000 bp, Unknown
  misc_feature (1)..( 3000): cDNA_ID_3040831_gDNA_ID_2684091_Annot_ID_189943 3000 nt of promoter + ATG
gaggttgacgttgaccttgaggaattgatggtcatggaagcaatatggctctctgttcaggtaaaattatttgtttgtataacttttgatattaaatttttcagttctctcatagctttttaaactgattctaacaggaaacagggacgcagagaaattcagcttcaggggaaattacctcttctaggcagtatgtaacagataatcatagttatgtttcttcaccaccacgagtgactccaatcgtagaaccagcaacaccgtcttcatcatctggtgggctttcttgtgcaatctccgcacttgctgaacgccaaatggttggcgaatcctccagtcacaatcataatcacaatgtcaacgtttcttcatacagtatgcttcccggaaattgtgacagttactacgacatagaacaagaggtagatggcatagacaaccatcatcatcatcgtcatcattacgagatgggagaaacaggaagcagcaacagctatgtaagttcttacatgacaggcgagggcttccacaactttcctcctcctccacctctggtcattgttccagagagttttgaggaacagatgatgatggctatggctgtgtctatggcagaggttcatgccacgacgacatgtgcaccaactgaagttacctggcaataaataggataataatggaaactcatgggtctgaatctgatgatgattataacttcattcatatatgtctgttcctataggaagaaagaaaagaaacgaaatgatttccagttttaatagaaaaaggttgggttgtgttacagcttctttaattctttgtggttcttctttttcaatctgcattgacaaaaaatttgaagatcacttgttttgtgtctctttgattgcaaatttctaaatggagaagagaaggtcaaagttggtgattgttgaccaaagcagtaattaggggtttagggttctagagtcggcttttgtcaacatatatgtcttctagagtctttgtatgggttcgttataagatggaaattataaaagataattaatggattatgatttatgactagcagctaactaattttcaacatttaatatcttgatttgagcagctaatgtttgtgttagtgtgtcttatggggtttcttactttcttctatgaatttatgttcgaaaaagagaataatggacctctaatttcacaactcccaaaactcagtatcttgattttttttgttcttttgggtactgattgatatgtagtactcttattagttacttgaattatcaacaacatcatcataaaaagaaccaaaagttaaaggtagatgctacttacaatcaaaaatcatagtggcgctgaattttacttacaatttgctctgtactattttcaattgtcaacttttactttatactacaaaaatgtagtgagtgattaatgttatgtaaaaaacataaatagatagttggcacataaaagtgaaataaaaataattagtagtgattgatatttcatcttgaacacagattgttacggggttttgtttttcaacattgtgtatgggtttctttaatataaagcttgaatgttgtacattatatccattttcatatagtagtgttatgatatttaccattaggaatcccaaatttgaagtacaatgaaacattgaaacctaaaataatagatataaaaatgggtatattcatacattaagcttaacatatatcaatatattggtttacggttttataaagtaaaaaaaataaaaagagaacgattggaatataaaaagaagaagagaaactaaaagaaaagagtttgaactttgttgaaaccgacaaaaagaaagaaacaatgtcagaccgattgataagggtacccacacatgcgtgtaataaattatttatctcttaaaccattttttgtctttataaatagaagtaacatgatttgattcaaaattttatatttagctcgtatgttaggtttagggttcttaacttcttgtgtaattgccttgtttcccattttttggctgtcgtttacgccaaattttgtactacattttgtgaaattcagtagaaatccgttagaattttttttaaaaaaacctccaatgaacgaaggaattggtacaatttggcaacttttataatcaaatcatgcaaagatacggaatcttaatgtagtaaaagataattaaaaacaaaacattatgattacatgtaaatgtgggacatcaccctccaagacatgtaaattacacttttgtcctttatcttcccccaaaggtcattcactttcaccagctttatttcaaatcttccaacgtctactttttcaatatctctctgcttcttgaattgagagtctctctctctggacataaagctacgacctctcttttctccacattttgggttttcttgtcttcgtgttcttgtttctatcaacaaaattaatcacaccagcagcatattcaaaaacaatttcctctttgtccttctttattatttctctgcttgcattacttgttaagactatatcgcaatcattcttcgtattcaattccacaggtgaaaccccagaaagtactctacattatcctcaaggttagtttctacaattagaccaacccatttacttatgtgtgtatgcaagataagaaacttttcctcaagagaaatctgattcaagtcttggtgaaagattgaagtttgttatcttagatcttctaaagcgtttggtgaaagattgaagtttgttatcttagatcttctaaagcgtttttgagtaaaagcaaaagcaatgtgttgttatatctcacttgtgtctggtttgactccaatagtggaatctgtttaagagtttctcactctcacttagtggcgcgtggcttaccagttcatatatctgctttattctgaggaatgttttcgttttcatcagatcattaacctttggagagtcagcaactttgcataaatcagaatg

SEQ ID NO: 14242 - DNA, 3000 bp, Unknown
  misc_feature (1)..( 3000): cDNA_ID_3040819_gDNA_ID_2684091_Annot_ID_189946 3000 nt of promoter + ATG
tggtgttgatgattaggttgatcaaatgatcttagtacttagtatatatcagctttagctctcttcctgtgtctttgggtgttcagatgttttgtagatttatatgcatagttgcatacttaggtatttatagagagattaaagagagaaagatataatctctgtggggtactgaagtgactcattcaagtaaattttttcgtattctttttgaaacgattttataatcgtaatcttgtcctacatgaaaacatatgtgacgacctatttttttcttgttttttttcttcctgacgtcatgatacattttcgacgaccaacgttttttatcatattcgttgaattcctaataaatattttcctaattattatattggccgaaaatatttacggctctagtctagaaatgcttaccaatgaattttatgaatgaagaatttttttgactaattaaagactttttatacatctgttgatgaaacaattactgcattctgtatattctttagaatttaacagcaacggtaaacttaaaacaattttgaaactgcaagaaaataacttaatagtaattatttaaaatcaaagattaactacatataattatttttataacctattgttgagaatattaaacaaggtaactatttgttatacaaagcaacaatcattcaacatttactgagatcaatcgaaaagcacatggctttgtgcatagataggacctttgatcattaagacatgttgaccgttaataaaatctagcagccttgaaggaccaaacattaaaatttatatatcactatcaccatcaaaagtattaaaattaccaaaaatcatagtgtattttcattagattgggtcaaagcacgccttctttgatgaaatcctgttacatcacgtgaaacagcctaagaaaaaactactgaaaacttaccaagtatttacacgtgagtagaattttgcacgtccccccacactatttcgttatgacaaaatataatcgtctttgattatgcttctagaaaatagtaaggtgatgtcatttttttcttcaaaaggtgatgtcttttttttccatcgacaaagaaaacactaatggctttagtttattttttcaagataaaaatttctaatcaaaacatcccaaatggggcttttagttaataaccatgttttccctttttccacagccaacagcatatgaaaattttatacggtttaaaacataaaaaataggaggtaacatatactcacatcattgtaaggtaaattttaaatgtttgcatcttgaattatattgatatatagattttattttattttaaatattgatataaatgagtaatggatcatatttttgtagattttactatttaaaagagattagaaaaaaaaaaaaaaaaaagagattagaagttcagcatgatgcacaagaagtcactgatagttacatacgatgtttcatggggagtttcataaagggacccaatcattcattcaattccctgaatttttgttttgttgactcagactttcactaacaaaattcttctcagaaattgcaaattagttcattgtacggttgtacttttgcgatagccctaattattttcagttgttaccaaccacacaaaaattatattggctttaccaaaattttcatatgaagaataaaattatatatggatcagtttaagccttaaggtaaatacaaatcaatccgttatcatttatcactacactacaacttttagaagttgatacgtaattatgtatagtctattttttgtttgttgataaaatttggtgcagtacgttattgtacgtacagttttgatatcaatattaatagactgatgaacatacaaagggaaagtcaagtttggctataacggatcagagtaaggttttgactacaaatcttgactcaggaacctgactgttttttatttgatcgcctttgaaattaagtatatacaaagtttgaacagattagttattttatctcagcttttaccgccggtaatatatagttaactatttcgactggggtaagttatgtccatttgagtttcagcattttggaatttaactttgaatgaatataagtaagtaattaactattgttctgtttttatagcagataaaaattcaccgaagatcaatttcttttttttaaacaatccgtaatattttactttacaaaattaaattccaatcagattcgaaactatgagtttagcttgttacatcgtgtagagttgtgtcttgagattagcccagcccatgtagcacaagttattgggtttgttacaaaagtgaagcccatatttcccaaataaaatatgggtgtttggtggcgtgttctgttgggtgggtgttatgctacatgggctaatctaaaaagttattcagacccaaattgcccacataaattatccaagccctaacacaactatacacttataaacaactttttagtggttttaattcaaatatttaatacgggtgtgatattttccatgctatctatggtatgtacaacttgtttttggtaaccgatccaatttggttgttgtaattcgaaacctaaattactgcgaaaacactgatcgatccgtacagaagcaatttattgataattttgatccacaaattgttcgacaagattggaacagtttaccttatatactattattctgctcatatttaaggaatttttaaaatataccgttataatttagaatcatatcagcagtcagaaacaaatcaattggtactcttatagaaacacattaattcagaaataaatcaatctgtatgattgacgaaaccattaaatttcaacccaaaatttcagccactgatgtaggtttcttatagaagtgtctagagatcgcactggtatataatacgatggaacacaatacgatactatcattctctcaatcataactactttttttttgtacattgtcaattatcaaaaacaaagaa

SEQ ID NO: 14243 - DNA, 3000 bp, Unknown
  misc_feature (1)..( 3000): cDNA_ID_3040749_gDNA_ID_2684091_Annot_ID_189949 3000 nt of promoter + ATG
gattgttatgcattagtccccggcaacgagtttcttgaattttagttatacgtatatactgtgattatgtattatgtatatactatgatcaagtgtccaatgatccaactgtgtacaaagttttgtagtaaagttttaatttacacacagaatttgttagcataaaaatttatagatttgatcaaaactgatttattaaagatggttattaaagtagattaaagtggagttattgttataaacgatgagaaaaatgcattacttataaaaatagctaaatatagtcgacacactaaacttgattatcttagaaggtttatgctgatatcttttctatattatgtaagcttccccaaatatctctgtgagctgcatgtgaatgaactgtgtagagctagagaagcttcttatagaaggaatttgaccttcgaaaatggaaacccgaaaatatctcatgtgatctctgttttgggaatgaggtctactttaatctttctgatcgttctttgtcttttttacaattatcaacaacttttatttatctgctcgtttttcgtctgttcgttttttgttcttcttgcaataattggtattacaaattacgaaattaccacaatacgaattattgtttttttattcttcttcttttaaagtaagaaatccatatccctatacttatatttcgaaattacataaaaaaactaaccttgtattttataaaatattacttaggaataccattagaaatagaatttaaaggtccaaactaattcagttcattaaaataaacaagtcaaaactttatttatgcaatttaattataaaccaaaaagatgcatttatgggtttaacttgttgacagcttattttattcatgaatttacgttgaggttgttgcgatttctactttaagcaaacgggaaacatctcacagttttgacttgtgatcttttatcctactcttattggttctaaagtgcatacacgtaagcgtatacataagcactcgcatttcacagtagccaatcgattgattctaatctttgaacatgtaatacacttcatggccactctttttttccgggaactatcttttttttttgacatggaaaaagaccattttttgatttataacgtgcatactgctgtgtcttttttctaaataaatagtttttatcaaatatgtaatcatactagggaaaatctcatcaagatcatacgtatttttgtacatgacttttaaatagtatattcgccgaaaaatacgttgatgtctcggaatttgacgcctcaaaaacattagaatatacaaaatcaagtaacgagtttgtaggttgaaactaaaatgccacgtaatacagtgcgtagggtccattcgatgtttctagatcaaagtctacacactatagagacttccagatacagatacacattcgaaatcatcaatgaaaaataacaatttaagtatcttcttatcctaatgtgtgtgtgcttttttttagtcaactattttgtgtatattgtaagatgtatcatgttatgacatgagtatgttgctacgtgtcgtgagatatcgaacccaacgcagatatgagtatgttgagctagtttcttcttatgaaacaatcatatatgtctataatgaatagatcacattatctgcctgaaaaaaatcccgtatattactcgacgaaatataaatacccaatgtagctgattttgctttctctggtgacatatccaatttggctaaatttgttaactagtctattataggtttataatagatctagctatgttaaagatactaaagcatcagttacataaatttttggcgcgagtttatatcttttggaattaaaaataagagaatttaaaaataagaagatcattttgtttggccacaggagttctgaaaggtcaggtatgatttttttcttgctcgctcttatgattttgtttttattaatgggttttcaaataagaaaaactgtttttcgaagcccggttcagatccattgttttttgtaaaatataggcccaattcaccataagtccatgaccaaaacaaaaataagatagaaccaatactgaaccaggatcttctctcgctttcgtgatcaatgtcgccaagcttctcgagatcatgtggtcacgtcaattgtataaatacaattattgacgtaacacaatctctacagttccatcgaaatatctcgaaaatttccagttaattctggtaacgtgaacgtatcttccacctcttcaacctacacagctttctagaaatttggctcgcttttctaagtcctctgtatttttttgcacgtttttcaactaagtttcaatatgaatcatttcttctataaataaatgatattttcatcaggtaatgatacattgtgccgaaataaaacgtcaatactcattagtcaaattaattgttcacataatttaaaactgtgttaatccatccagttattttcttacaacaaaataatcttttccatcaacttttaaaataattaaacgcagtgctaagaaatctaaaatcttgatttagaaatccattatggtttctggtcaactgaaatccataatttcctttaacatccaaaatccaaatttgctactatgataatagatttcagacgattttttttcttttttcaatcatagagtccacacgaatatttgcaagttactatataaaacactataatggtcaacagataaaaaaaaggcgaatgaagatatgttacgtaaaaagaaaatactgtaattataaattattactttaaaaagctttaaaatctggccacatgtttttaaagagtggtgtgacgtaacgactagagtcagcacaatccattattgtatcataaatattctcatctataaattacctaaacccttacaggtagtgtcccaaccaaacaaatcgagaaagacgaacacttacaaaaaaaaatctctttgtgagctttagcgatcgtaaca

SEQ ID NO: 14244 - DNA, 3000 bp, Unknown; identical to SEQ ID NO: 5726
  misc_feature (1)..( 3000): cDNA_ID_3078217_gDNA_ID_2684091_Annot_ID_189940 3000 nt of promoter + ATG

SEQ ID NO: 14245 - DNA, 3000 bp, Unknown
  misc_feature (1)..( 3000): cDNA_ID_2729791_gDNA_ID_2684093_Annot_ID_137025 3000 nt of promoter + ATG
aggatgaatggatggggaatcttctggtgagttaacagaactggtttttgatgatagtgatttgacatgggaaatggtaagccaagtatctgaaaagctaatgagtctaactattgtactaaaggcaaaagaggactagcatcgtcttcaagtagaactgaaaagggaagaatacagcctcatgctccattccaactccaagaacatcttagagcacgtcttcaactccaatggctttgattgatgaggatgatcaaattgaagaggatttcgaaaaagaagataaggataatgaattgtgtgtggaagatgatgaggaagagttttagagtttcagactcaaagttttatctttgtcggattggattctgtttgttttcatttttatgtttcagagtttcaggctcacggtttagcttttgttggatttgattttcttttttcacacttatggtttaagtttttcttgaattttctttttcagacttttggtttaagttattgtttggattttctttgttatctcttttttagactcacaaattgttctaaaatggctttatgtatcaatgaatacaactaagctattgttttttaagttgcacctcatacggcaaaggctctaaggctcatgcgcctagactcgaggctcaaacaagcacctcaacgccttacctcaccttgtgctatttaaaacacagtttaagcctaccttgaaatagtcaaagttgttcatcagggacaatcgagtgagagtgatatattacaatacaatggtgtccatatccttgtttctcaagtaagttcggtttcccatttatacctaacaactacctccctcttgtgaatctggttgaacctaatcaaagctcttttggcgagttctgtcaatggcctatattttcactcggcacccagactttcaagtagatttcttgccaaagtacgaggatcttgagtcagtgtacttgactctcttcttctacctcatcaagacactaagcaagtctccataaagcttgtctgcggctgaactaaccaatgctcaaaaccaattgacagaactgaagaaattaggcttcaagctagactggttgaagtcaaagctcaaggaagtttccttggagaggaagaaagcagttcccgacagttgtcatgtcctcgaagaatgggtcagaaatgtgaaacttactttgtcggatctccaagttaaactggacaaggacaagatcaaatatgttgatgttgctgctagagtttttttgtttgggttcatcagttttcttacctcttctcaatatgaaaacacttaactcactagctatgtgttttttttatggatttattgcgtggacatctttcacattcaacataaacaaggaggaggattctctgattcacttgttgtcacttcataaacatgattcacgcaccagctcactttccatttccttgctctttttttttttctttcttttaattcaaattatctatcttttggtgattcgaaatggagtttggtatttttgacacttgtatcaatccgctaaaaaaaattacttacattcttcttaattaatagattctacaatctctcacgtaaagtttacgctaaccatgaatctctctactagtttcttattgaattacttccctacctatagctgtagacattaggtatctccatgatttcaaccctagaagaatccataacaatattaagtaccttaagtattttgtaaaattttcttgtgattgaaatagatcttaactacttcaaatttttatataagaatatataatatttttgaaattttattcgctatatattatgtttggaaatttgcgaattcgaaattacatattatgtttacacaagatgttgttgtgtctggatggacaaaggaaaatcgcagttgcaggcgcaggcgccgcctaaatcctgacgacattggaactaaaggtgcttaaaaggttgattgaaagtgaaacagacatcaacattaggataattcatgtattttttaaaagttgcatgataaagtggaaaagaatcgtttttcactctaaaaaaacttttcaaagagaaagaaactttttcgatcaaagtccaaatcgccgtccagtttttcactccggctttgtgcccggacaaggtccggttccttttccagcatcgatcggctttcatggcggtggtggctggcttgagagcggttttcctttgcttcgatttaatcattttggtttttaggaataataccctcgactttatttaaattcaagttcaaatataattttttcagccataagtccggttccttttccagcatcgatcatgatcatattttttcgacgttgatttcgttcaccagaatcagagtccaagcaggtagaagacgatgaaaaagattccaacatgtggcattgttatagcctaatagcttgtcacgtttgtgtagagaagagaatctttcttttttttttcgatattgaagactgggctttattgggctttcatgtttgtaaactcaatgtacttatagttgaaacaaaaaaggaatttattataagaaaaaaaaaaagatgttgttgtgtccgttcaactaataaaagcccaagtactttttttttttgttgcgttggttatttatacatttgcaaaaaaggtcccatatttatttcctttttcatttcttatcaaacttttgacaacgatcatccaggtcccactctgcttcttaaccattctttaccaaaaatcaattgttctctccctctcagcttccgaagtcttcatctttctcgacaatatctaaaccttgtctgagaatcatttgaagaagatctttcatcatcaccgatccactttctgatgtaagaaaactacagtcttccttccttctcacttctcttcttatcttgctttcatggttagggcaagtttgatttaagcttatgtggatgatagaactagtgtttatacttgtagttaggtca

SEQ ID NO: 14246 - DNA, 3000 bp, Unknown
  misc_feature (1)..( 3000): cDNA_ID_3015786_gDNA_ID_2684093_Annot_ID_190052 3000 nt of promoter + ATG
tctcttcactgtattatgaactgaatgaatctctcaagaacaagcgatgaatagcttatgtctttgaaaatagggattgcaaagaacttgataaaaggaacttaggtctaaacaatgacctctaaaactatatataagacctataatacgtccatagactaataatgcaaataggaaagtcttctggggcaaatacctgaaaagacacaaaaagactcaagaaataacataaagattcaaaatcctacacctaaattatagataaattcagtaaaaatagagatatatcaaaatcctacactcctggtgtcgatcgacacttcctctgaatctggaatccgagatcgtccttagcttccttttccttagcttttgctccaaaatgtctcctcatctccaatgttgtctcaatgcataaaatacctgaaaagacactaaaaagactcgagaaataacataaagactcaaaatcctatacctaaaacatagataaaatcagtaaaaatagggatatatcaaaggtgaagagaatctaaactgcaacatcaaatgagagaagtgatagagttaaaaaccaatttagaagttaaaaccttttatgagaataatagaaaacaatatagagcaaaaaaaaaatcatagaaattcaaaagaagagtttattgacttgacgtagctacctctcgacgaggtggacaaacaaaatttactaacaaggaaaggaatgaatttcgaagaaaagatatgaaccatgttaaaattttggaaggtatggcacgtactgcatagacaaaatcataagatgatggaaagagacaccgtatgaaagaacaaaacaaagaaaacgagtgcctacaaaaaaaatagaaagagtaatagctcttcaaaaaaaagttgtgaagataaaaatttatatagatattaaaaaaaatgtgagaaatatgagttgttaaaaagaacgtatagataagcttatgaatatatttgtgtatagaatcttgtttttagaaaagctatacttactaatccattgaagataaacaaaaaaacaatagtaaatttgcggataccaaaatgagaaagtcgtcaaaaatattcctcatacaacaatttatttcatgagattcaatcaaaatttcttacgtaaaaagacttgatcatccaaaatttcaaaacgtttacaacatttatcaaaatatatgagccaaaaaaatgttcttttgataattgttgtaaaacctaaaagttgtattagagttatttgtaattacatatttaaattgagttatttgctatgctaattttaaaactcaagaaatttaaattattaacaacaagtagatatattaaaacatatatctcaaaattttcagtaaatattttaaatcacacaaaaatttattaaaagtcgcgtgggtctattttaaaatttcttaagaattttttgtgtgattaaaagtttttattgaaaattttgaaagatatgtttttatatgtctacttgttgttaatattataaactccttgaattttaaaattaacatgataaatagttacaatttaaatacataactaaaaataactttaatacaaccttttacaatatttatcaaaagaaatttttttttggttcataactctctctttagcttttctgaaggcgattttctgggcgatacgccccattcacaccgtttcgattctccacaacggagtttccttccaaccaccggaatccgtgttccttttcctttttttgttggcggttatactctgccattcggtttccatggcagttcggtttccccttcttttgggggataactaccaatttaaaccgccatggcaacgactctatataatcttcctttcttctcttctagttccacaatctcaatccacttcaccttaaacaaattcatccgtaatcatgagtgacaaacttcgaaaatcggttcaagacttgactctgggaattgatgatgaaccggtggctctcacaccggaattttgttcacaagccgctcatgtgaaccgcttttcccttgttgtgacgacggtgaaccctcgtaaacagaatctccgtgctttgatagggcagatgccaagggtctgggtttccctgattcgtgtgttggtcggattctggacagaggcaaagtccagtttaagtttcagacagaagaagcgatgacccttgtgcttagccgcggtccgtggagtttcaattactggatgctctcaatccaccgatggtatccaaatatcactgaagctgaaatgaagatcatccctttctgggtgcagattacgggcatccctcttctttttctcaccaatgctatggcactatgtgttggaagtagattaggacatatggttgatgtagactttgattaatattcgaatcatccgggatttgttagggtgaagatcaattggaatttagaagatccacttcgtttccaaagaaactttcaatttgcagatggggaaaacacagtgattaagtttcgttttgagaggctaaggaacttctgttccaaatgtggttcattgaagcatgatgtcaaagaatgcactcttgcttttgatgatgaagatccagccgtgatcagtgaggatgatgatgatgataatgatgaagatcatcaagatgacaacaaggacaaagacatgagtgatacagatactctacaaacggtggaccctgctacccttatccctagacttcaagcatcgattccaagggagactcaaagtaatgtcatgaaaaggccgatctcttcagcatttctaagagccttcgaggacacagacctcaatgttgaacgactccgctaccttcatgcgaaattggcaagagtcagaacacacacacccgttgaaagcgatctccttctagattcctctgacaatgcactgaatcctttcgtcttcatgaagaggaagagagttcagtttgagcaactgtttcaagaagttgaagaagcagaggag

SEQ ID NO: 14247 - DNA, 3000 bp, Unknown
  misc_feature (1)..( 3000): cDNA_ID_3015811_gDNA_ID_2684093_Annot_ID_190043 3000 nt of promoter + ATG
acttttaatagttttttgtgtgactaaaattgtttattgaaattttaaaaaacatgtttttatatgtgtacttgttgttaatattttaagttctttgaatttcaaaattaccatgaccaataattacagtttaaatacataactaaaaataactttaatacacctttttacaatatttatcaaaaaaacattttcttggttcataactctctctttagcattagatatttaggataacgatatctttttacatatggaagaaattgttgtatgggagataactttatcgactttttcattttggtacccacaaatttactattgtttttcgcttatcttcgctgcattaatgagtatagctcttccaaaaataagatactttaatatgtatatgaatttctgtttcacaatttcttacggagagctatcactctccctatttttttgcaaacactcgttttatctgtttcattctttcttacggtatctctttccatcctcttatgattttgtctaagcaatatgtgccataccttctaaacttttcacatgctccatattttttcttcgaaaatctcttccttctcttgttagtataagtatttttcaagctcgtcaagatgtactctgtcttgttttctgttattctaagaaaatgttttagcttctaaattggtatttaactctatcacttctctcttttgatgcagtttagatcctcttcaccttcacgcttcccagactgaaagacctcaacttatatctttgagaacttgattcaaattgataccatcaaaaacactgtactcggggcgatgaagtgtatgatttagtcataattatgacaatttcttacgtcataatattgtaattactttacatacaaaattattgtaacgtttttatttagtcacgataacgctactatttggtcatagtattgtgactgtattaaaagtaactgatttttgtcactaatcatgacaaatttcttacaaaataaatagtcacaaatataaatatagatttgtgaccaaatcttgtaactaaaatattaataacgtaaaagaaaacttattgtgaacaaatcatggcaaataagaaagtttctatattctaaagtagtggtttatgtacaaataaccatctatagatcatctacttaacatttttgaagtacaaaataaggaatttttcggattgttttttttttgggttttacccagttttttacctgtttttttcggcccatttgttgaatctctttactatttggtccacatcctataattttaaatgttaatcaaatcttaccaaaatttacaaatcgctttaaatactaattagttacaattaattatttctcttattgtcgaccatattgaattcgtaatatataagaatatctcaacataatatcttaccataatattttcttagatattctatcgtaacctcattttcttaccgttttcttttcatttaattcaaatgccgatatttactcgcttgaaatcttttgtgtaattaagattaagcaacacacatatcttccgctcatatacaaaatttctgcatttattcgccgagatttattcagttccatttggaaaaaatccaattacagaaacaaatttaagactacagaatgattataatcaagcatattcaaaaatgaaaacgtttaatgctaaatatttagttcaatattctctacatattcgaattaaaaattgcctaaatcttttacaatattctatcataactatattgttatcatttgatttcttaatcttcccttaaaaatttatgttatttattgtgattgatcgtataatctaatttgtttaagaaatataagattttgtacttgctttccaatatattctgaaaccgattcaactttggaaagtggattaatgagctctctcttattgatataggttttaaaggaaacaagtttacttggagaagaggaagggaagaaaggaatgttgtatggaagcagttagatcgggttttgtgtttcccgcatacccgccttcagtggcaggaagccatggtgacacacctgccctttgttgcgtctgatcatgcaccactctttgtccaactgtcacctggggtggctgggaacccgaggaggagaccgcttaggtttgaggaagcatggcttaaacacacaggttttcaggagttgttgtctgcgtcttggagaaatgatattagtacaccgaaggctctgacaggtttgagagagacgctccgcaggtggaacagagaggtgtttggagatgtgaaaaagaggaaggatgagttaattagtgagataacaaagatccaagagcagctggatagtgctcccacggttgctttgttagaatcagaggcttcccttttaaaggagttcgatgtagttctagaacaagaagagttgatttggttccagaagtctagagagaagtggatagcgctaggggcaggaataccagctacttccatacttctactgttattcgtcggagaagaaaccgcattgagatgcttaagaataatgaggatatatgggtgacagagactcgtgagttagaaaaaatggcgatcgagtattacagacgcttgtattcccttgatgatgtggatgcagtggttgagaagttaccgcaggcaggttatgtcagtctaacccgcgaagattgctttcatctagataagcctttctccggagtagaagtggagaaggcgattagaaacatggggaagtacaagtctcctggccccgatggtttttaacctgtgttctatcaacattgatgggaagtcgttgttgcatcaattgttaagttttctatggacttctttaattccggtgatcttccgctgcatacgaatgatgcacttgttgttcttattcccaaagtggttaaaccggagaagattactcaatttagaccgattagtttgtgtaatgtcttgtttaagactatcactaaaactatg

SEQ ID NO: 14248 - DNA, 3000 bp, Unknown
  misc_feature (1)..( 3000): cDNA_ID_2160091_gDNA_ID_2684093_Annot_ID_190037 3000 nt of promoter + ATG
ttacactctgttttcttttgagaatggttttttatatgagtgtgcactcaagcagggggagagtattctgatgtgtcgtactctgttccggatgatgtgggagatgaggatgtggaggaagaggacgatgatgatgagttagatgacaacacttaattgcttagtcctggtcattttttttttagttgggcattgtgttagggggagtttgtcactgattgtttttgtgtgtttgtgaaaactccctgatcttgttctttatcggcttcttatcggatcttctgtgtgtttaatgattagtcttatgtatagaaccaagaactcatttctgtttcatgtttaaatggttatgtcttttggcagtagttgcttaaacttgagcctttggtttctatgtttggtatggaatattgcttggcttgtattgtggtctctactcttttgcagattacttgaggtgtcacactcaaataaaaagggggagattgaagaaacagagtgtctgaagttctacaggcgtgtctgaaacaacacagagcagaacagaggaacagaggaagcgggaaagtagcagttgcttttgccagcgtggcatgttgattggagtgaaggaaaggcgtatcgctttagacaaaggagacgaagtcgtcagacataggacgtgtgcctagtgtcaagataatgatgaggagctacacttgaacctgatggataaagtagagcatcctgccttttccgagaaactacataagagaagttttggtctcttattagggttagccactttacttgagaaaagtggaagagaagaaaagttaaatagaacttgttcttgtggtttcattggtgagtgaacaaagagagcacacggctgttgctgtgtttgtgagctgggtagttttaggttttgacaagagcaaatcaggttgttgatgttgcataacactgtccaaacttatctgtgattgatcagtttgaaagttgttctaataaagtgtgtttattggagttgtgatctttatcttgtcaaagtacttaggattcttttacttcatatgttagatataatattttgcttaattgaatatattttacaatgttcataagctataagatcattatatgatgcatacgttttatccaaccatatcttcacgtaaccaacttcttctcaattaccttaactgttcacatgtttatatatctaagcccatatttttaggtgttatacatatatatatttatttactttttgaggattctggaaaattgaaagatatgatacaacagttatacgatatatatattgaatttaaaactttaataattataattttaataatttgaatagacactgtaaatatagttttagtcggacaaaccttactcaacattcaatactaatcatataccaaaacataattgttttatctaatttagagaaaagaaacatgaagctatttattatcattgtggtgaccagtttaaccatctcaaaggtatttgacaaaacacttgtcaccattgaagcaagaaatttgaggaagatggaccgtcatgagcatttcaatgctaatgaagatttcgtggaagcaaaaatgttaaagaaaattgacaataaaaataatctaaataatagatgtataaatgattttgcgcctactaatccaggacataattctggtattgggcatccaaaagttataaacaacaaatttacaaaagattttgcgcctactaatccaggacatagtcctggtattgggcatctaagagttgtaaacaacaaatttacaaatgattttgcgcctactaatccaggaaatagtcccggtattaggcatccatgagttatgaatgtttaaggattgtaaatcttattatataaatcttaaagaaataaaataaaactaacaaaaaaacaaatttatatgtctatatctcaaatgtttttaacttttttttctgaactaaaagaaaaattaacaaatttgtttttatatgtgttattggtcaaataaattaggatgtatttatatttatttgaagaaaaaattagcatgtattaatttttttaaagtcatttaatttatgtgtacaaaatattattttacggttttggtgggaaaacgttggcttacagttgttgcgggaaaacgtgatttttaattttggcggaaaatactttttgtgtgattttggcaagaaaacactttttgtgattttagcgggaaaacgtggttttacggttttgtcgagaaaatgttggtttacggttgtggcggaaaaacgtaattttaatatttaaaccaaaaactgaagttaaatagaataatttagttttactaaggatgactaatagaaaaagaaaaataaatagacttaattggataccaatttatttatgtgaaaccttatttaataaatgagtttagttggcttaatccatttaatctcatttaacttgtttttcctaaattaatttaaatgggtcaaaaactcttactcataaccattaattaaataggatttgcatacccaaattaacatcactagtcctagacaaaaaccaaaatagaaaacaatatttttatccatttttacttttgctcatcgaccaaatttgggcctagtttgctacaagctaacaattgaaaagcctcttaagacacatgaaatagtaacgacgtcgtttactcatgaagcgaaagacggcaaacacgaacgggtttacgtagaccgtcaaacgctcctccgtccgacggagaaaaaacgagacggtgaagaagaagaagaagaagaagaagaagaacgactcaaagatctcatcgatcactctctccaagatctattcacgcatcgtcggaagaattttcgcttccgacgacgtttctctcgtctgattttgtctccgaacatcctacctaatcgtattcggtgctggatttgaatccggtgaactgaatctgacaatttcgttcccggaggtgtttaaaaatg

SEQ ID NO: 14249 - DNA, 2359 bp, Unknown
  misc_feature (1)..( 2359): cDNA_ID_3077109_gDNA_ID_2684093_Annot_ID_190035 3000 nt of promoter + ATG
aagcttttccctgtcgttgcaacgacctctcctccctagattggatgctcttctccttcaattaaagtgttttacctcgaggtcatccgaaatcttctcctaattggttggcatgttttgatctacttactgtggtatgcggtcatcgcgtaataatcgtgtgcaccaaattacttttaaatttgtcaatgctttgatttgggaggctgaactaactgtccgaaattgaataacaagccctttcgccaatcaaattcccatcgagcttctgtaatgcctcagtttgatctccttcaacctccattatcgacttttcttctctgtttcatcgattcttcatctcagcttcatgaaatccgtacatgattactctccttgggccatatcttttcttctacctactgttggggttttttgattcaaaattggttctcctttgaagtgtgttgggctacttagctattggcctatgcaacattttaattctcatgtttttagtagaatgtcgtttatcccaaaaaacatagcagactaaaatattttacatttcatattagaattgctatgttataatgtttttaaaattggaattgtttttaataacattttttaaaacaggttgttttaggatgttttaaatatatattgtaattgtttaacataaatatttatttttaaacataatataaatatttattatatccagccagattaattatttcgaataatataattaatttgtttcatgaaaaacaacgtttttattttaatcaaactattatgtgattgtgtgaaccatttaacttaaattatatgtcttttaaataaaaaaattatttaaaaaaaaagaaacaaatgatctttaattctataagacgagattatatggcatgacgggttttggtaaatattaataagagatggtatactactggttgttttggtataattaacaatcaaaatacaattatacaatcttacaaaagaaaacaaacaattaaacaattatacgagacaaagttatatggtaagacgggttttagtcgatattaatacaatacggtatacaacagatgaaatactagaattaacaattaaaatacaattatataatcttgaaaaaagaaaacaaattatattaacaaaataaatacaacttttaaatttagttataaagaaattaacctgcggtgtaccgcgggtcatatcctagtattagaacgttttagtagtcctatgatataagcacctaacagagcatgaaaaaggacttattacataatttagaaaagctataaaggggctctaacaaagcattttgttaatgctatggtgtaatgctctatcatagcatgccgaaaaaacgctatcgtatatgggaagtctaccataacaggggcataacacaacgtttatgaaaacgttattgatgacatataatagctcttctctcatgctaataatgttgatattttttgtagtgttattaagtataatcgcactttagcacgccgttactagaggaaagacacacttgatcctatcaagctacaagatattgacgattgtaatgagtggttggtaggatgaatggatggggaatcttctggtgagttaacagaactggtttttgatgatagtgatttgacatgggaaatggtaagccaagtatctgaaaagctaatgagtctaactattgtactaaaggcaaaagaggactagcatcgtcttcaagtagaactgaaaagggaagaatacagcctcatgctccattccaactccaagaacatcttagagcacgtcttcaactccaatggctttgattgatgaggatgatcaaattgaagaggatttcgaaaaagaagataaggataatgaattgtgtgtggaagatgatgaggaagagttttagagtttcagactcaaagttttatctttgtcggattggattctgtttgttttcatttttatgtttcagagtttcaggctcacggtttagcttttgttggatttgattttcttttttcacacttatggtttaagtttttcttgaattttctttttcagacttttggtttaagttattgtttggattttctttgttatctcttttttagactcacaaattgttctaaaatggctttatgtatcaatgaatacaactaagctattgttttttaagttgcacctcatacggcaaaggctctaaggctcatgcgcctagactcgaggctcaaacaagcacctcaacgccttacctcaccttgtgctatttaaaacacagtttaagcctaccttgaaatagtcaaagttgttcatcagggacaatcgagtgagagtgatatattacaatacaatg

SEQ ID NO: 14250 - DNA, 3000 bp, Unknown; identical to SEQ ID NO: 14248
  misc_feature (1)..( 3000): cDNA_ID_2160091_gDNA_ID_2684093_Annot_ID_137027 3000 nt of promoter + ATG

SEQ ID NO: 14251 - DNA, 3000 bp, Unknown
  misc_feature (1)..( 3000): cDNA_ID_2729778_gDNA_ID_2684093_Annot_ID_137031 3000 nt of promoter + ATG
attttgcttcaaatctctataattcttggcattacactacttatatcactaatctttgattattaagaaaagttttctgaataaaaattaagattttttttatgaacaacaatttaaatggtgttacaaatttcgttgtgattatgatttttaaaaaattctgacacaatttattaggtagaggtgcaaaataggtattaaacaaaaagtttgagatgcacaaggtatgtgtatacaaattatgtatatgaactatgcaaataaaaagaaaaaaaaaactatttctaagaatgttagagaatattgactcaaatcatctaatttctgtttgtcatcttactaatattaatgttgataatatcgtggtgtttcatacattcttcatcatctataagagttaagcacttggtccaaatatttaagttttttccttaattgcttattacatatacattacatatttgtatacttacatctattttcagttatttgcctcctaacttaataaataatattctttttttaggcgaaataaattatattgttattgttataaaactgattgtacaatgaaattagcaacactaatgaattttgtcgtccaaaatttaatgatttgagttttttatacacaaagtttttcgtggtagtaagagaaaggtgatacaagcgtttgagatattatttgcatgtaaggcaaacataatttataatcaaatgtcaaattacatgagtcaaagataaacaaaactaaacacagtatctagctctctataaataacttttccaaaggcaactaaaccctaaatctaggaatgttattttacttagaacaggaaacaagaacttctagtattttaaaatgatcaatctttttataaatttgctttattatatgtacaatatgtctctctagatttcaaagtttcatttatgatcatcgaaatacacacacaattaaatcacaagaaatatcaataagaaatataaggtattagctatgctcgacggaagattttaaatattcattttagatatgcttttacattaaataatcattatttgatgcataaataatatatgctacaatgtatcactaatataaagacgaggctggttttttttccttctcttccttaatcttctcctggagttcacggaggtaggctttgtgtaacataatcttccacatgagcttttgaatcataccgaatccaccacttataggatcttctgtccaagcattaccttccatgattatagaagttgctagcatttgttttttttcttcaggagcatgctgcatcatcgtaatgatatttggtgtgccaaacaattcattagcactttcatattgactttgcctaaagttaaaagaaattaatatcaactaaaacatttagcaaaagagaataataagcaaaaaaagtaaaaataaataaataaatatacaattcatatggaaagtattctgcatattcgcagaatctgggacaatttctgtttttggtgatacatacggagcaaggacgacggtttcctagaggttccatatttattcttttagagataaattttgattaagtaattgaaggatgaataaaattacattatcaaataagtatttatagataatgtttgcaaaatgcagtcaaagaaatttattagaggtcaaaatatgaagatgtgcttaaaagagcaacacattaattttctttattctgttttggaaataaattgagattacatttgacttttaaaaaactaatattatcttactttaaattttgggattattgacttgtctaccacttttgaaaagattctttccaaaattaccacaattgcattgatctttctaaaactaccatattttatggcactatactattttattgacaattttacccctacaaggtgtgaagtttgtattagagaaaaatggcaacttgtgcccgagagacagctttgtgtgagggaagaaggacaaaaacgctgctttaaaccacctcatatgacgaaggacaatcatcaaaggcaattgtccgcgaatttaacacaatgttgaatttaaaaaagattatataaaaagtaatagacattgttcccgatctaattatattactcattctacacggcatgtcccccaaatatttacacgtaaaaacattaataccttttgtcgggaacaagttcaaatcgaatgagtaatataattatatcggggacaagttcatattgaattagtaatagaatttgatcggggacaaattacaatcgaatgaataatagtagatcgaggaaaagttcagatcgtctatttaccttttggaaaattattactatggtagaattcaagtgagaggaagaaagagagaggtaatatatttcgagagagataaaagaagaaagagagagaaaacagaaaataaaataagaaatgatatcttatataataaagaatggatcctattaaaacacgctaccaaaaattgatacgtgtcatttgagaacttaatacttatccaaaattattcaactataaacaataaatgaagatcaaataatggaagtcttatcataaaatcattaaaaataattaagaaaaaacatctcatcgaaattataaagggaaaaatgccttataaatcctcaactttttcattccgttgaatttaatccccaactcgaactaaaacgttttaaatactgaactttagtttgactttcaaattaaataataaactttaattgacgaagttgttttaagcacgacgttaattgtataacggaacaattaaacagagttatatttctgttaataggtactgttaaaccttaatgaggtcatttccttcacattaaaacgacgtagtgtgctgcaaataataaaaaccccattatcgatttgattatccccaactaaagaaaacaccaaattgaaatcaaatccctaaccatataaatcgaaagctttctctgaacattagattcgttgta

SEQ ID NO: 14252 - DNA, 3000 bp, Unknown
  misc_feature (1)..( 3000): cDNA_ID_3015494_gDNA_ID_2684095_Annot_ID_190058 3000 nt of promoter + ATG
aataactacaccaagaagagttcctctcgatttagaaacacaaaactaagtcaaaaactgactggtaaatgaacccgtcatctttgatagggttaagacatgggagaaactaacaaaacacttaggatcagcttaacaagatgatgcacatcacgagaagctagagtcttccctatacaaaaggatacagtgttttttgttcttcaaagatcttgtccctgcaaaaccaacaaatgcagagaccacaatgaatcgaaacctcaaacaaaaagtgaatagcatgcaaagaaaacaaactaaactaatcctacatacactttaatatcatactcacaattttaattttgatctgaaaaggaagtaaatataaataccgtgaagcagttgcatgtacaagcttctgtttcaaacctttgtcgataatctcctccaacaattgcaagtctttttgacgtccctcctccattactgcaatgcgaacataaacatatcaagcttaaggctctaaccatccccttgtttatttgataaacttagtccagaataagtttctagagccttgaaatgttcgtttcagaatctagagtcacctaaccatcaatatctaaatacaagctcggagagcgtcgaaactatacagaaattgcatcaaactaatacgtagaagcatttcatcgaacaggtggtgaacatccccaagagagaacacaaaccacgtaactacactttaaatatgagaatcaaattggtttccaaacgaaaccctatcaaaaatacattcaaatacagagaatccaactcgataaacgagaaggaatctgaaaatcacaaaattagaggtacagataacagcaaaggtccaagagtatttgactcacgagtcacgagcaaagagatgaaataggtccagacacgtcacgaccgaacgacggtgattcttttggtgacagtgatgttgaacgacggtggttgtgacggcgagtggcgacgccgcgacggtgagggagacgaagaattatttggtggttttacaatttgaccgctcgagcacagattatttaaaccatgcgaaccggtttgttcttacttttggttttaatttcaagtcctttgtaatataattaccttgcataaaggcccacctactttttaattttactattttacgcccaagattttcaagactcaatcaaactggctaaaaagaaacaagagcagaactatgaacgaacttgggatgctatataatcttcaaacaatgtaaacagagaaaccatatataacaaaaaccttaaagatgcatcaagtttcaaagtgaaacaaaaagtgctcaataaaaccccatttgatgatatacaacttcttcttcagctaatacgtttccatgtccattcaccgagtttgatccgcacaacgcaccattactcagcatccacaaccgtaaccgtttccatgattggctgagtttcacctctagaagcttccatactataataaactcggcagctaaaatagaacactgcactcatcatcgaatctataagtgtcacaaaggaatacatcaacaccaaaagaggtccttcccataacctcgaagagccatctccataactaactttcttcactctgtgatcaaacaatccttccacaaacgccaatcctaaagttgatccaaggaacatcaacaaaccaacctgaatctgccctttgatcaaatcactagctctcatcaatgctcctaaccctgaaacatcttccaaaaccgagatcacaatcgcagtgttgcagattataatcgcgttagcgaaaactacagagaaggctaaaccaactagcatagctccataaacattgaaatctggagagaagccgagaacagagaaggaactgcagattgctacaagaagaacgcaaaagaaagtgaagcaaccaacaatcagaatgcaaatccaaacgtaagtgaacacaactctcctccatatcttctgcaatataaccaagaacttgcttatatcaactacttccctcgagtaagaacaatccactgagtaaaccacagctgctttagacaacagagacacagtgataaacacagggaaacacattgcagacgaaacagcagtttcagcgaatttctgacaagaatgtttgacaaaaggctgcaaaggaagaccacttgatttcgccactaaaagaagcttcactgtgagtttattcactaatgattgatcaactaaaaagtttggtaagagcaaagcagagacaggacagatcaaaacagcagtagttaacattaaagcaccaagattgtaccggagaattcgaactgtttctcttaagatctctaacgcatttgaggagtgaaattgtttgtgactgtatgattttagctccggtttccgtaaaacctgattcgtttccgtctccatgtttccgagagtgaagtgtgttttagctgagttcgagattacataccataaaggttgatttcacaagcagcggagatagaaatcgaagcaaagagaagatctttcagataacccaggaatcaaattgaaaaaaaaagacgaatcttggaacggatcttgtctacgttccaacaataattttgattagagaaaacaaaaaatgtaagatttccaattttgtcggtggcacaagtgaacgtgcttttgtcggaggtaatcttcttctactccatcgcgaacttgaagctaaaccgctaatttaactgaaaccttaaaacactaaaccataaacccggtttgaaaaaattgatcaatttggttaggcccaataatagcttaatgggcttctttagaggaataaaaagaagaatatttctatggaaaaaaaaaaaaaaaaaaagagagaatctttccggtgaatgggaaatggcaagaagaaggatacgagtacgatgaagttgagttagagcgggagagagagacataccgttgaccactaaagacgagagctttagagagagacgcaacaatg

SEQ ID NO: 14253 - DNA, 3000 bp, Unknown
  misc_feature (1)..( 3000): cDNA_ID_3015436_gDNA_ID_2684095_Annot_ID_190074 3000 nt of promoter + ATG
ggggacgcatcacagttgaagagaaaagacttctcctttgaattgaattggatcctatgttactctaaatgtgcacgtgttcatcatctccacctctcattatcattaccaatccttattcttgatttaaaacggattttaattttcaaagaactcaatgtttacttgcattgactactaattattgaggacatctaaaatatctaagaaaaaaaactcttgttaatcaataaaaaaagatcccatatgtaagtaattttatttctttgcttttttattcttagtctaagatcactaatcacataacatattacatatagatggatgccacgtcagaaaagagtctatttgaaagcgaacttttctttcgagtaaaacacaaacctgaccaaacgtgtaacaaaattaaacattatcgtacaaggggacattgtaacacatgaataactaaggttgataaaatttgtagacggacataaagaattccaagaaaagtgaattaggtgaaatttaaatgggctatggggtcaaagaatggtcgagaaaataaaaattagattatgtcagacgagtaaaattgagctttggattaattccaacgttttagtgattccttattacacatttgatgtatttttgtgacaaactgacaaaagtatatattaatgctatgttgaaaaaggtatgttcaagcttgtaatcaattttggactgagtcacgcatggaccgtagctaatatatccaccgaaacggattgaccatgagatcgcaatctattttatacctcagataatttttgtcccctcactatatgagctttacatacatctgtttccagagtaatttagttgcttattctgttagtcactccctaaaacaagctactacactcgatcaagcagtaacatcaaactcctttaatcttccaagttagactctcttcttacttttcaaggtatgtttaaatatttaacatgtttataaataattccatgtgtaaatagaacatatgtttttaataacttagtattttagacgaaagaatcgaaaatctagtactagtctactggatataaacaaagtaacaagatagattcatagcccaaaacaaaagaacaaccaaatcgaagtcccactttagctagtggctctacttacaaacaaacataattaatagtgtgtttcaccatattttatttcatcatttcattttaaacggtaaaaaaaaactgattacaatttttataaatgtttgttctgcaaaatataaaattaaataaagctgcataactttctgtttcataaaattatatagttcatatatacttcttcacccaaccttttatttcatatttcatatataatattaatgtgtatttcaaagtgattgaccaattaaaaagaaaatatgacgaagagaaagagagtttgtagtgcgttcggttaaatctctgtgcagaggatcgtacagttctgagaccccttttgtatctgtatttatcccatatttaatggttacgtctgccaattgggatttctggtcaaatacgaaaaggtcttaaaagttatttctttacatttttactgttcattctcattacttatacacacttccacacggccacattcctcatgtatgtgggatatttagggttgagagtttttttgaattggcattgtaatatctcgttattaaaaaccatgagactgctacaaagaataaaacagtcaaaatttcaagattatttgatacaacatgacaaggagaaaatgagtatattgaagcgatgtttaattaagaaaaaaattgaatgaagaaaaaagattgtggttaattttttaagataagagagggtttcacagaaacaaaaatggtagtaaaaagtaaaggaatgaaagacaagtggagattaagagagaaagaggtaaattttaaggaacccaaaatgaaatgaaagaaaaagctgtctgagaattggttgtgctaagaagagacccgactcattccccaatggtaaactctctttttgccttcatccttttttggtagttagttctgcttcagctttttttctttcatctcattagcttttattattttcaccttgcacctataaaacatgcattgattaatagaggataaatttcacctaataacggtaagattcatttcggactcgtccaagatattctctacattcattgttttttaggtcgacactcccaacattaatttattttgtcataatccattggttttcattaaataaaagaggaaatactatcttatacatcaaactaagataaacattaattattcataaaagtaggaaatttgtataaggaaccatagagaagcagcgtaattaatgttatcgtttgattatgaaccctaatacgactataaaactattgcatacttttcaattactatcaatctatggacatggaaaaaaacttggtcttcaaatcttagttacttttaaatttaataaatgatttatcagaaaaactctttaacttctatgaaactaggtacacctgaacaaatgtataacagtccacagcaaaatcgaatatcgataatacacatttgtacttacttattacagtagtgtatatgtaatatatataataatgtataaatgcaaagaactctgtcgtttgaattagtccgtgacgacggtccataaccctttttaacagtcgtcagaaaacacggtcgcgacatgtacatacacgcacatacctaaagccatacgtaacaaacacaccattatatacaaaagatattctattatttttaaaaaataatatttatgacacacatttacgtacgtgtatatataatatgcaaatgcactcacataagtctttctcctccgatggtatatgtctataagctgacgtgacatctctcttaattctcaataacacttctcttcttcttcctttctcccaacactaactccatgtttataacggaaaaacaagtgtgg

SEQ ID NO: 14254 - DNA, 3000 bp, Unknown
  misc_feature (1)..( 3000): cDNA_ID_3015482_gDNA_ID_2684095_Annot_ID_190061 3000 nt of promoter + ATG
gagtgtttactaatcgttttagcttgtttacgatctgacgagttctgtagtatctgggaatgtaatttacttggattggtcaagtagttttgtgaagaaattaagactgaagataagatcataagaacctagttatgtagctgcagaggtttattgagttggtgttttttttcatttgtttgtcagtctatggttaccactgtctttcttggagttatagtacatagacatgcatggagttgttacattttgtggtgccatagaaccagagtagaggtttgattagatattgttgtgtgcttttatagaggagaagaaggggaagattgctgagatcaagtctggaatagacgaagctgatgtcttggtatttgcatttaacttgctttaatgttgttaccgttctgttctttcttttttaaaattaatatatatgcttctgtggtttttttgtagatccggaaaatggatcttgaggcaagaagtttgcagccgagtgctaaagctgtgtgtctttctaaactaagagagtataaatctgatctgaaccaattgaagaaggaattcaaacgagtctcttccgcagatgctaagccgtcttcccgtgaagagttgatggaatccggaatggcggatctgcatgcagtaagcttctaactcctaaatagaaactcttgttttctcattatcttagttgtcttaattgacttgcatcagttaggcttctttgtcctgaggggaccctcctttatattcatcttcacacaaacttttagatggcaaagactttgctgtgatttacattattgtccatgttccaggtatctgctgatcaaagaggaagattggcaatgtccgtggagaggcttgaccaatcaagtgacagaatcagggagagtagaagactaatgctggagacagaagaggttggcatctcaattgtccaagatttgagtcagcaacgccaaaccctccttcatgcgcacaacaaggtaccgtctacaattgctcggtttggtatctatcagtgccaatgatttgtttgaattagatcattgagaagctaacttttctgattttgaatcacagcttcatggtgtggatgacgccattgacaagagcaagaaggtgttgacggctatgtcaaggagaatgactaggaacaaatggatcattacatcggtaatcgtggctctcgttctcgccatcatcttgatcatctcatacaagctttctcattaatatactcaaaaaacattattcatcgtgattgtgtatatatatatgatggttgatttactttgtaatggcccaagtggttacttgtatttttaagtacgatgtttgtattgaagtggcaacacttttaacattcataaggtttcccaagtcttttcttttttgtctttttttccaaaaaagtggtactattttatataaagcagatgtttcaaaagttacaactgtggaaacttccacttacatctcaagtccaacctttgaaaacttacaacaatgtaattccaaaaagaacaaacactccattgctcaaaacataaggttttccaagtctttacatgagccaaagatctatacttataatgttttaagaaaactaggacacctgacacatccttgccggaccaatcatcttgccgtgatcaccagtcgcaggcaggagacccactgtcacgtcagagcatgaaacaaaggcctctccttctatctctctatttaaaataacatcaaacattcacgacaccaaaaaatacacacaagccaaacataacaagtaaaactatccccgaaacaaatagttttatgcagtcccggcccgtccataacgcagctagagcatgtgtttctgtcgtgaattatgttttctatgatctcagcccctgttatgttttaaaccacacgttctggtcttcaaactcgttaacccattccaccctataaatcccttcttcgtaagcagggatagattgacgagtgattgaaaataatctttaatgatcaagaatttcctcccattcgccggaaataattcacttaaccaccaaatgaaagagttttgagattaattaatctactctttaaaattttaggcatatacacttgattgatgtgatgacaaaatgatttgagtactaatcaagtacaatcactacaaaaaaaatgtgtgtttttacatcatttattttatatatttttattagttataaacttataattgatggcaagaaaaacatttacatcactaaaaaaagtgacttttgaaagtagtgatgcaaatattttgtatcgattcttgtaaatcgatcttaacatatatcaattacaaaaaataatgttaaaattcgcatcatttaatttaaatgatgttaatatttgtaacatatataataatttatgcatgccaatatttctattacttgtaaacaattgatgttaaattagttatcagttttcataattgattcaaataattgtgtgatttgaaataattaatttctacattaatttaaaacattgtaatttcataattaatttgtagatactagtgcattgaaaagaagcgaaaaaagacgtcagcagtctataagatggattagcttcatctccaaggcatataaacccattcgtgtcaatcacaagtcacaccttacaatttcaaaaaaagtttctgaaacttggtcttttgtgctatcattttgattcttgtgctaagattcttcacgaagatcaacaactctaaaaagaagaggaaagataactttaatggatagaaatggtgaaggagaggtcgaaaatctggctttagataaagtttctgtaaaaaggtgttaaagaaaaaaaaactagtcagaaacattaaatcaaaactattcaaccatcaatgtctacctcgagagattcaagacgtagaagaagaagacaaacgtgaacgtctttaaattatgaaacctctttcttaaagttctcaagaggtgctcaaca

SEQ ID NO: 14255 - DNA, 3000 bp, Unknown; identical to SEQ ID NO: 5348
  misc_feature (1)..( 3000): cDNA_ID_2686636_gDNA_ID_2684095_Annot_ID_190085 3000 nt of promoter + ATG

SEQ ID NO: 14256 - DNA, 3000 bp, Unknown; identical to SEQ ID NO: 5343
  misc_feature (1)..( 3000): cDNA_ID_3015409_gDNA_ID_2684095_Annot_ID_190084 3000 nt of promoter + ATG

SEQ ID NO: 14257 - DNA, 3000 bp, Unknown
  misc_feature (1)..( 3000): cDNA_ID_3015413_gDNA_ID_2684095_Annot_ID_190083 3000 nt of promoter + ATG
ggttaaagatagcatcatttttctaaagtaactgacattagcaaacaccatgaattttgcgtgaagaaaaaaaatattgtagggccaaatctttatcattttctatagtatgaagattccaagactgaggttctcgcccgcacgagaagggcgagcttgaggtgtttatctgcaaggagatgggtgacgacgggtctaaagttgggtgggtttgtagatagaaggctgaggaagcttcggtaaccaccgctccatggagacgggtcattaaaaccatgttttgattactgttaaaagccatgttttgattaagcacaatgcatttcatgcataagcggttgaacattttttttttactctttagcaatatcgtgagccatttgtttttgttataacatgtacataagagaatgatgttgagctatcaaaaatcagtaaaatatagactcaacgatatataggataaagatgaggtaaaggttgatgaagaagaggataatgatcggttggtgaggaagaggataattaggttgatcaggtagaggatgatgatcattgatcacaatggatcgttggtaatagattgcccttcattaacagatgtggacttagttgacgtttgggaagactattgcttgatagagaatatgtcttgccttgatgtggcagacactggctttgttcctaatcccgataccaagtttcttagatctctttcttctgatgtatggatttgcgcttgaccaaatcaatggtagccattttatatatctctctctctctcgtattccttgttgtttcttcaactaatcttcgttttcctctatcataagtcgcgtgttgtagcgccattaacttctctctgctcataacgttttattttcaaacacaaaattccgtagactggttagaaccacttatgtttttgcttcaaaattctctaaaactgaaaactcttatgatcaacgaaaacacggtaacaagcgcatccatctaattttgatgaactcaacattataataaactgtactgataccaggacttcgagggtctccaaccttcctggaaccagtcgagttctattcccacatgcctgtcaactcatctagagatctttggttggaaagacaatggaagaagagaagatgagaaacaatttagtgacatacattctcgcaaactcaaagtgtttaaagacagtggaaatctccctcatagcagccttcaatcttaaggagaggcaaaaggagttagttaccatgcctaggatttcaacattatctaggcttctattccccatccaaatggaatgggagttcaatgaaacaactttttcattatatatattgtcatatacagtatatgctataactactcaagctgtcgtttacagattgcaatttttttgccttattaactcgaaaactctaattcagccaactttttactagtcgagatgaatttttttttaagcatatacgtacaacaaggctagattttttcatcatgagtaagtttaacaaagactgtgtgcttgcaaagtcatcatgagtaggttgttttgagtctcttatgtgaattaaacaaaacaaaaaaaacaacgtgaacatttcagtccaattttgtttgtctccctacgattcaaccagcaaaagaaaaaagcacataaaagcaaaaaatgggaatcaatatattgagacgttaattatgactggcatgtgtatgtatattgtatggtggtgcgttacaaatgaaagcaccctcatatctctcgctatcacgacttgggaacttgtttttaccccttcaagtttcgtttgccaacttttacttactgttttttttttaccagttactttattttactttttgcaatcaaatgtaactttgtttatttaaaaatgatgtttctagagggtcatcaaaaatatcagtgattaggcataattgtcaaatcttgataattcaaagatctcgtttatatgtgtttagtaatttagtcatagactcaaccaaaaaactttagtgatcaagtgatactttttttttttttttatcttcttccaaagcatgcaaacagaggaaatcaaaatataaatgtaatcttttaaaactacggttgtaattaaaattacttttttttttttttttgtcgtaaattactaaattagtattgaattaagttagaaactatttctgtgtattttcttagagtaccttgtgtataattttgtatgaaaatagctaaagaactatcggtaacttttcttcactttacagttttgttttttacctctacagtttttacaattttcgttcttgttttacagttaaaaaaaaatagaaagaaacatgaaaccaccttcgctttctctgctggtggaaggtgcttcgatactacgacaaagagcagcgaactagtaaagcctcggagatctgaatcccatttcaatcagcaaatctttccgtctctacttctctgtttgccggtgtaccggattctgattccggaacagacattgcttaattttgcttccctttggcctgtaagcagattttcaatttttgctctgtgtttgattttcttatatagttggtttagtaagttcttctatgaagtgagaacaattctgggcacttctgattttttagtctctagtgattttaactagtctattgtgattttgttgaatttcaattttctcagacttaactgataaaaatctgattttttttcttcttcttattgttaagctttgatgatatttttggatcttgttaatatttagtataaagttcgtgaatctaacattatcatggttctgctgaatctatacttaaatttgaaaatgacttatgttgattaaaaaccataacttttttttttgtgtttcagggattgattgaagttaaaaaatagctacattgtactgtaagattgaatattgatgatctcgccgcgcgatttctcgtttgagtgattttcggctgtgaaaaatg

SEQ ID NO: 14258 - DNA, 3000 bp, Unknown
  misc_feature (1)..( 3000): cDNA_ID_3015432_gDNA_ID_2684095_Annot_ID_190075 3000 nt of promoter + ATG
caaccggttagattgatgttcagctctggtcccttatgattcatccaccattatatggttttaccgggtttaccaaacgttagttgtttttctattttcgagtttcttaaatactaaatgatttaaaatattaattaaaaaatacattgtaagttgtgcctatgtattggctgaataatcttaggacactgcataatttgctctataaactgcaacaaatatttgtttgcaaatgaggaaaatagaaatgttagttttatcaaatttcttgacatggtaattgattttctcaaaattattcttaacagatatgacgttgcttttctttttgtttacctcgtatttcttgacatgtatgctttgatgactatacatctttcctgtgctactccaatttgattatagatctctctaggacattaatattatcgggtatatgtttatttactcttatgtgacttaattgttattagatatctcagacatttcttttgcatgttcttggtcattagccgtagtatgtcatatatatatatatatatgccttgtatcaatcaactcatgtgcataccaaaaactactaatcacattgcaatttatatttttggtagtgttgattagtaagatacttggtggtacaccatttatcgcaacaataaagagttatcaatcagaacagaaatgggagactgctatatttatctcgaggtctatcttatatacaaacacctaattactttgaactctcgaagacaatgagaaatattcttacgaacacattagctgtagtattgaccgcgatctttatgctttccatgaattggtgaagaattgcttccttgtggtcaaaatgtatgtgcacaagaacattcgccgcttgaagcaagaaatcatgttaggtgtcgatgataaggtttttttacttcttccggatttacatgaataaagcggtgaaccataccatattcatatgattggggaaggcgatatacccaaataaacaaaactgtgaatcattatcacaagatcgccttgccattaaggtcgtgatgaatgtgtctttgacgtgaattcagattttcatggttataagaataacctaatctattatcacacatgagaaactaaaaataggtaaccacaaattcaaacacaaaattattttattttattattactaaagtaaatgaaagggaaaatacaaatatcttaaatatttttagatgactaagaagcccaaggaaaacactgaggttggcctccatcacgtctatcacgacaaggagctggctcataaatactccatatacattcgctgcaaactccatatttaccgcttggattatcgtctctatcagctctaaaaatatcaaacgtagctgtattgccgggccactcgaaactgcaagtgtatgttgttgttttacggagattgacacgaaacctgaaatcaaaacgatctagagggttgagtcttattacccctaaatcttcccctttgttagtacaatgtacaatcaacgttgcacgtgtgaccaatttgttgatgatgataacatgtttacgtgcgaatggtaaaagcccatcgggggacgagtgatttgttaatgatgctgacgttttgaggataaagaaaaataagaataatacaaaaataaaattttgattggttgagaaagccatgagtgtgttttacttttaagaatttgtgagataataatatttgttctgtttcagaagcaagaatttatagatgaaaatacattaaatgtgttattatttttaatgcaaattatcttctgggatatacgtataaatctttagtttgtaacgtaaaatacaattacaagcatactaaataaaatatatatttaatggtttctatatcattattctttggcaacaaaaatggtcaaatttatggaataatgcaatgttagtatgaaatggtttctatatcattatatttaattattaacaactatgcaatattagtttgaaattgtaacgtatgtgatactaaataagtgcatgaatcacgcgaataaatcaaattattttgaaaaactgttagagcaagatctaccttaaaccacaatttattgatttcttttctagcaacaaaacgtcttttatcactctaaaccagcttcaaacacatcgtgcacaacaatgtgtttgtatctcacgatcacgcatgtgagaagctaaattaccaacgttgtaaatttttctcctattagataaataatatagagtaagagtaaaaataaatggtccaacatggtaaacatagcactttaccaagattttaaccaccgcaatcttgatatcatctcgaggagaatgatgattgttgtctcgtcgctagggatgacaaggagaaaatagttatcgatattttagttatttgtatagaaattagtttttataatcgatgttttggttattcatattgtaatatctgattttgcttaccctagcaacaatttttttagtagtcaatattttggttattcgtatagaaaccaaaatattttgtactcattcacaaaaccacattggaacatctgtaatatagcattttgaactgatgtatggcagctggcatttttgtaaatgttttcgcattattgtatttctaattttctgtatgaatattccaaaagaagttgtacattttaatgagacgtggctgacaataaaggaggcaaatctttttagtggcactgaaagagagatcaaaaagagcatgaaaagagatagcaaaaagcccacttttttgcaacatgtggctctctcatctcttcatgtccctctctaagctgacgtgtaatttctccattttctctgtctttatggcttgtggctctgtgtgatccgttattaatttaataccaacctcagcctcttatacatactcttgtctcagacctcaaataaagaataaacacataacacaaatctaatctcatactccatcttcttttctgtcttatg

SEQ ID NO: 14259 - DNA, 3000 bp, Unknown
  misc_feature (1)..( 3000): cDNA_ID_3015490_gDNA_ID_2684095_Annot_ID_190059 3000 nt of promoter + ATG
gaagcttgttttaagcaactctttacatgatattcattgctatttgcacgattcaagagtgacatatacattttatttaacaataacagtgtaagatatgtgattgaatacttgtggaaacatagagttacacaggctgcgatagtattcgacattttaactggttttgacattacacgattttgtattccttgcacaaagtctggtaaaacagtaatagcaagaaaaggtcaatgctttcctttgttgaggaactggaattagtgtatttgtcaggagattattctactttgagaatctgatgatagtaccaagccaatcttcaggaacactatctctcaaatcaccgtttagtgctctctgtgaatgagttgtcgcagcctgtttgaggagattgaaaaaaagagcatgatggcggttaaaagctccatctttatctaagatatttagttggttaaaggcaaaagttgtctataatctaccttcacaatgtagacatcgactccaagttttgcaatcatagcagcttctgatatcttcgtttccattccaccggttgtatcgtgcgccgcaacagagtagtcaactgtttgattccaaaaatcagagaggtttgaacttttaacaaatccctcagacttattgtattgcatagttttacaacattggttctttcgtttacctttcttgtctgtgtgctccaacagtggattcacaaccttccagcttccatcttctccaacagctgcatgaactgttagtatcaggccaagtctggaaaagatataaaaaaaacaaacagtaaagtttgaaactaaccgatctctttcaagagcacagcgtcgggctctgaaggtgaaggtggtcgatcgtagacacctagtacatctgtctttgtaaagagttactcagataacaaagaatatataggaaagagggagagagaacacaaattaaatttccggtttatactatgaataggatacgagaaagacaacatattctggcttcaaatgatctgcaagatgacggatgataacatcaccactcaatatggtgcagccctgttcaggacaagattttcaactgttcaaattctaaacggacaagaatctagatagctatttggtatctctggagagcatattaccagtatattgtccagcactgcatctccatggagaacctggccatgacaaaaattactgtccaaattacagtcaagagactttggtaaacatctacctaatttcactggtgggatcaaaacttacagggacaaatcctgagtctatggttttagctacggttgctagatctgcagaagccacctaatgcaaaaagcagtctcattgaaatctaaacccacatgcttcagatcaggaaatatgttaagaagttcagttagctcttacatctcttttggaggttgaccaaccacatgaaaatggagacatgcctatcgtaggaatgccctctgcaagagatcataatgtttagcttcaaaattcatcttttcctcttagccagagtaggaaaagagaataagcttaagagatacctcgggctagtgctcgtacaatttcaagattaagatttgtcacctgcaaaaagaagttgtagactatcagaacagctcaagactatcttacgtaagagcatcagatttagctaacagtctcacagatatacgagtagcaacgaaaccagctttgacaataggtttctcaagtcctcctttgtgaaccccagatctactggcctgaaagtgcccaaaggaacctaatgacaaaaatcagaacaacacataagaaacccaaaaactaaataacagctcaactaacacaagcaggtcaatgatctgtaagagctaaatcaaaaatgtattttgatccttcattataagatttaagcagataagaatcaatctccaactaaccagcgccatgaaccacaacaaatttactaaactcagaagacttttgatcccctatgtcatccacatcacaagaaatctcagagcttccaggtctcttgctccaatccatgccaataaccttgcttggagctgaaccctccaacatagcttgacgtaactgacacgccacgacctccagattttcatcgtgaatcttctccagctcgtttttgcaagtaattgccgcacctcctatcaaatcatttagacattctgctgttacaaagtctagacaggtaaaattgatgggaaatgaataaaagacagatctttaaagtctttcctcatcttcggtattcaatagtcaaatcagaatcaaacccataagacagaacaactaaaatgcgatctaagaatcgatccagcaagtattttaatagggatcaaaagacaaaccaagtttcacaatgcaacgaattgatctgcttcgactctcggaaatattcagctccattgttgcgtctctctctaaagctctcgtctttagtggtcaacggtatgtctctctctcccgctctaactcaacttcatcgtactcgtatccttcttcttgccatttcccattcaccggaaagattctctctttttttttttttttttttccatagaaatattcttctttttattcctctaaagaagcccattaagctattattgggcctaaccaaattgatcaattttttcaaaccgggtttatggtttagtgttttaaggtttcagttaaattagcggtttagcttcaagttcgcgatggagtagaagaagattacctccgacaaaagcacgttcacttgtgccaccgacaaaattggaaatcttacattttttgttttctctaatcaaaattattgttggaacgtagacaagatccgttccaagattcgtctttttttttcaatttgattcctgggttatctgaaagatcttctctttgcttcgatttctatctccgctgcttgtgaaatcaacctttatggtatgtaatctcgaactcagctaaaacacacttcactctcggaaac

SEQ ID NO: 14260 - DNA, 3000 bp, Unknown
  misc_feature (1)..( 3000): cDNA_ID_3015486_gDNA_ID_2684095_Annot_ID_190060 3000 nt of promoter + ATG
tgaagattatatagcatcccaagttcgttcatagttctgctcttgtttctttttagccagtttgattgagtcttgaaaatcttgggcgtaaaatagtaaaattaaaaagtaggtgggcctttatgcaaggtaattatattacaaaggacttgaaattaaaaccaaaagtaagaacaaaccggttcgcatggtttaaataatctgtgctcgagcggtcaaattgtaaaaccaccaaataattcttcgtctccctcaccgtcgcggcgtcgccactcgccgtcacaaccaccgtcgttcaacatcactgtcaccaaaagaatcaccgtcgttcggtcgtgacgtgtctggacctatttcatctctttgctcgtgactcgtgagtcaaatactcttggacctttgctgttatctgtacctctaattttgtgattttcagattccttctcgtttatcgagttggattctctgtatttgaatgtatttttgatagggtttcgtttggaaaccaatttgattctcatatttaaagtgtagttacgtggtttgtgttctctcttggggatgttcaccacctgttcgatgaaatgcttctacgtattagtttgatgcaatttctgtatagtttcgacgctctccgagcttgtatttagatattgatggttaggtgactctagattctgaaacgaacatttcaaggctctagaaacttattctggactaagtttatcaaataaacaaggggatggttagagccttaagcttgatatgtttatgttcgcattgcagtaatggaggagggacgtcaaaaagacttgcaattgttggaggagattatcgacaaaggtttgaaacagaagcttgtacatgcaactgcttcacggtatttatatttacttccttttcagatcaaaattaaaattgtgagtatgatattaaagtgtatgtaggattagtttagtttgttttctttgcatgctattcactttttgtttgaggtttcgattcattgtggtctctgcatttgttggttttgcagggacaagatctttgaagaacaaaaaacactgtatccttttgtatagggaagactctagcttctcgtgatgtgcatcatcttgttaagctgatcctaagtgttttgttagtttctcccatgtcttaaccctatcaaagatgacgggttcatttaccagtcagtttttgacttagttttgtgtttctaaatcgagaggaactcttcttggtgtagttattgacaatactttgctgttctagtgaaatctaattcggttgaaatattcttgtttccttgacggttactcccactccagctctgacttgcggaaaaacctagaaactctggagaagaatggtgtaaatagtctcaaaacaagggtcaaccttggttcagaagtttacatgcaagctgaagtgtacgttacttatagctttggttctttcgtttaattttagtcaagtcatttagctatgaaaggtcatgcattgtctgcatacaatgaaatacactgtctccatacacagcttaatgcaattaagaagtgtgcttttactgtgttctgtatgttagaagctagttatgtattattgagcagaaaacgtttaataaatggggattaaaataggagatgctttctaccaggtttgcttctgatttcgtttcacttgacttgggtgtttgtttgagttcaggccagatactcggcacatattcatggatgtaggcctcggcttttatgtggagttcacacggcaagaagctcttgactatatagcacaaagggaggaaagaactcaaaagtaagagaaatctttgcttttctagttttcttgctccatgtacaaggaaaatatggttgtatcattgtatatgatgaatgagttctccggtggaatgcagtatagtgactgaatgttgatgcaatataaatgtggttttttttgtttttaacagacaactagaagagtatactggtgttattacgcagatcaaagggcgcatcaaactggtaagttcaagttcttatcttgctttgtgatagtagtcaatcatttgtcttatgaggttgaattggactagaaaatcactattgcgtaggaaccctgcatcagacggatatatgaaagtgtcatcggataagtattaatgttaaattaccattgcaggctcattaccagattcagcaaatactcaatcttcctgaagagaatccgtcatcccggcaacgtgcgttttagtacactacctagtggaaagttgaggattttctcttgcagtcttatcttctcgatttgttctgcttactgttttgagtttttaaagcagagaattaacttagtttgttcaatactaactctttctccggaatggaccaaactgttggtgttagataaacatatcgattaagcaatcaaaactttatagaatgactattgttgtgggggtgaatagtgaatcgcactctgttaaatctgccatttctattttaaatattaataatcacatgttagaacttagaagatcattaacagtttaacacagctgatgaagaatgaaataaaagtatgaacgaaacagatacaagataatgatattccacgtcagcaaagtgtccaaatatcttccgcttccctgtcttcgtcggtcccttttcggttttcacggtaaggctcggaggaaaacctaattcgtccggagaatctccacctcactctcgccaaacgcatctctgttgtaggtaagtcacggatcttcattctacgctaattgttattgttatcgttattcttgatctgggcgtttttgtggaatttgcatctaaaattagaaatttggataccaaaatccactccaattgaataaggtttctgaagaattttcgtttgattttgagatcgaaaattgcgttttctcgtttttgttttgttatcgctaacgcatcaggtcatatatctcaagtttatattttgtggcagcttgtg

SEQ ID NO: 14261 - DNA, 2620 bp, Unknown
  misc_feature (1)..( 2620): cDNA_ID_3015646_gDNA_ID_2684096_Annot_ID_190105 3000 nt of promoter + ATG
aagctttagatgagctttttaaacgaacctgaaacactagtgtagataaaagaatatgagacatgtatctcttactcttagtatcaccagaaatctccacaggaacaaattccgtctttaaaatgatgaaacctatttgtatctctaatgaaaatctctctacctgcgtaacttgatataaatttaatgactgcatggcaatcgccgcatatcctaaggttctttatgacctgaagaggtgtgccgtctggtgtgttaagaagaccgaaaactactgctagtttctcactgtgtccccataacatctgctcttgctcttgctcctccacatcatgcagagcaaaatctaaatttgggcggtgacctgatttcctcatctctttgctaatctcatccatcttctctgttatttgatctatctgcggatgcgacttgtcaccagccagaagcgtgtacactctgttcttcacttgaatccagctgcatcccgggttcttcttcagtcccagactctccatcttgtttctaatactgtctacttctgtccacatgcctttagcggcatatatattggacaagagaacgtaagtccctgggttttcgggttctaaatggaaaagcttttctgctgcgatttcagctaaatctacattgttttgaagcctgcaagaatttaacaaagctccccagacgcaggagtctggctcaaaaggcatctcttttatcagatcatatgcttcttgcaacttgcctgcgcgtccaagaaggtttaccatgcaagaatagtgttccaacctcggttttatcccatattcctctgacatcattttgaaatatttccacccttcatctgttaaacctacttggccacatgctgataataaactggtaaagctgatgaaatcgggtttcaacctggttctcataagagattcaaatatgctcatgacttccttggccttcccatgcatcgaaaatccattcattaaagagttccagcagactaagttttttgtaggcatcatattaaagacaatctgagacaagttgattcttccacatttggcatacatgtcaatcagagcactccctacatgaacattatccaaaaggtggacccttactgcaaatccatgagtggatctcccatgacccaaagctgctatatttccgcaagctggaagcattgaagggattgttacatggtttggcttcacccctgcaacctgcatttctctgaacaattccaaagcttcgatatctttcccgttctgagcacacccagctatgattgaagtccatgacacaacattaagctccatcgtttgctccttgaatagctcaaacatttcaagtgccttgtcaacaagaccatttcgcgatagccctgtaatgtaggcattgcaaacccctgcctccatcatctcaaattgattgaaaagacttatgattccataaacatgcccagatttcccatacatatcaatcattgcactaatgacacatttatccttaagcaaaccctgtttaatcacatatccatgaatcagcctccccatattcagcatctctgaatctccaactgaaggaagaacacttgaaactgtaacttgatcaggacaaaaccccaaatggtgaatcttctggaacatcaccactgcttccttgtgatacccactccgattaaacccactaagaataccattccaagacacaatattcgcctcaatacctgaactttccatctcagagaggatacgaaccacctcttctaagcaaccctttcgcgcataggcacaaagcaaagcactgcaagtgacaacatctttgtcagacattctatcgaacactttgcgtgcatcacccatcctaccacacctcatgtacatatgaaacatagacccctgaacaaacgcatccatatccaacccggaaacacacgacacacaatgtatctgtttacccactttaaaagccgataattcagcacaaaccttgaacaaattcggaagaacatgactatctggaatcaacccatgagagaacatccgagaaaacacaccaatcgattgcgtaaaaagcttagcctttgttaaagcgtatataagagaagagaaagagtaaatagtaggatccggaatcgattgcaagacgagatcagcatcgttgaaacaattatagttcgagtatgaagcaatgagtttagcggagatatagccatcgttttgagctccggatttgagtatacgagcatgagcttgtgttgtcttcgacaacgaagaagaccaatgatatgatgaagattctaagaatccaacgatcgattgaggaattttctctatcagtggaagaacttgttttgtcattgcttaactaaaaaataaaattttcccgcttaaccttaatcattcacttattaatcttcctacgtgaccagattattccacgtcaccacaatcagaaatcaacggctgaagatgaaggactgggtctcactcagcttctgagcaatcttagtcgttgattatgtcttcgagaaatcttggacgttgattctaccttctccgagttttataatctgttttcttaagaaaatttgattgatacagagagagcgatg

SEQ ID NO: 14262 - DNA, 3000 bp, Unknown
  misc_feature (1)..( 3000): cDNA_ID_3015630_gDNA_ID_2684096_Annot_ID_190110 3000 nt of promoter + ATG
aagctaagatctgaagatgaagaaggagaaggagaagaagaagagagtttgctacatgatgttatgcctaattgatcttctgcttttgtccgagtctctaagtaggagtttgttctaaatgcttccttgtactcttcattaacacttagcttcgacgtcaagctacgacaacattccttgtcggactttcctgctccattgacaaaacaacaatttagcagatatttttacaatctttttctgtttttctaacaatgaagaaaaactatctctggttaattagagaacaaatgtataaatttcagaagttaaaacatttaaacgttctttgtagaaaaatattcaagattgaacaagttaagagaagaagagaaacaaatcattcaaattttttttttgatattttcttgagtaaaagtagagcacagaagaagaaaacgaaccttttcttgtagggaaagactttaatctagaaccaagaaaattcttcactttcaacatcttcgatggaactcaaagagagaggcgatttaggtgaataatagacaggcttcttgtttctttatatacataagtctttttgttgattggttagacaaagatagagagagagagaagaaacaaaagaagaaggaagagaagattgagaagcgacagctagagagatggtggacgttagcaccgctcgatagattttgcttagtgaatgatggcttttggcgcaagttagagggaacgacacgttgtgtgttgacacgtgttgtactcttggggtcgagatgacttgttagtttggagaagaagtttccttttacggttttaccttcgtttgttgtgttctctttactttttttttcaattgattaatcatgaaaattaaaattgattgatattaaaagaaacaatttcgttgtgggaaattagcatggagttcctcgtacgtttccccaaaacgagtaattgccacgtagacctttctcgtttcaatattatctggtttgggaatcttaaattgtttttttttttcacttttttttgtttatctttttgcaatatgaatgggtcaatgtatcaaaaagaaaaacacaagtcgccctcttctttaaactgcatgcatgtaattgaaatatatctaacgttttggtatgacaataactaatctcatgcccttgtttcactttgactacaacggtgctgaatgttaacgtttatttttaagttcgtgtattcaaactaatgactaactaatggagtttgaataaaatgactacctagtgaagttcaatatgtaccatattatacatatacttggttttaagtatatagaatttacttcacattgataccaaaaaaaaaggtatacaagtgtgtaattcttgttcattacacgtttgcctcactgtattactaaaacattatctcacatctttctatttctatgattgatgaaactcgaatgaaatttggaatatataattgaaagtttatatcaataacaaaatccgatgtcgtccagcggttaggatatctggctttcacccaggagacccgggttcgattcccggcatcggagcttttttattatttttgaattgaatttatttgggctttaagaagggcttagcatatttctatctggggctttgtttttaaaaggctagtttatgactagcccaaattcattgttcttaacatttaaacccaagtcattgatcaagtcatacgtaaactatcatctatagtttggtttctctatagaagaattttgcaagattagtctctttcggttttcttaagtgtttgtcttctttaagctcaaagacattttcattagaaaaataactgctcaaatcgaaaggtgagtatgcaaagttccttaaaaccatttttttttttttaaatggtttctacactcactaagatacaaagcacacccaaacaagaacggaacggaacttttttacttttgatagacttatttgggattatagagactatcggtgggcctttcttcactcggccgaacttcagtttctctgtgttttttttgtcttatattagacaatagaaatcaagatcatgcgatggcaatggcatatatgactcatattgataatacatactttcccaaagtagcacgagcacgaccacgagcacgaccaccagcacgagtgcactccactaaagtggtcggctacaatattccattcttaaaatcatattttttgttggttttgcgatatactatataaaaaatgatatgatatcgactatacatttgtttacctacaagcctacaagcatgctttggattactaggattcgataagagtggaatgtgaatgtcatttctggcttatcaactctgcaggcccgcaccaccctctccttttattggctactcaatccaaaatcctttgatctaattttgtcttcgaataaacattttaaggtaacctattgtttattattttttacttaaaagttaagagtcatattgctaaatgatactaacatcaggtccatcaccatgacattatatgaacacacatataacttcatactttggaaactttaatgaagaactttcagacttatttagtctcaatcaagaatcctctaattagtggacactccttccccatcaaataaatggctttatcttgatttgaattttgctaaaatatgggatgaagtaatcattttgttcattgtctttggaacctcggaaagaagaagaaaaaaacatgtggagtacttgtgatgtaatgactcaaacagaagatagtggtccgatcactaccctattctatctccactttttgcccaattcagaaacccaccaatacttcaaagtgggataagcaattcaaccattaacgactcataattcttttgatctatctatagcttccagtgtctctcaacctgtataaatacccttttcttgagttgaggtatgtgaataagtctttccagtgattaggaaactacaaagcc

SEQ ID NO: 14263 - DNA, 3000 bp, Unknown
  misc_feature (1)..( 3000): cDNA_ID_3015638_gDNA_ID_2684096_Annot_ID_190108 3000 nt of promoter + ATG
ttatttgccgaacttacttgaagtgtccattttgcctgtccttttcatacttctgacaccacctcttaccattaccatcgatctaccttgtgtttttctttgctacatatgaattttgttctttttttaacccttcaattgttactgtttcaaaagaataaacagcaagatgacttgtctaaaacattatactttgcagttttgtaggtaccttttctatctcgggaagattcgtactattcagctcgaatatacggacgcaaaagagagccttcttcaggcggccaggaaagcccctatagcagctttgggcttcaggatccaatgcaataaatgggcaattctggttcgtctactgctgggtgagataccagagcgttctatcttcactcaaaagggtatggagaaggccctcagaccctacttcgagctaacaaatgtgagtccactttcataatcttgctgctgtgacatgtattcattaatttatgagcggataactaaactggtattagtatgtggtcacttgtgatcttgctacttcacttctgattttaaaccggttcctacttttcacttactggcctatacacctcttctgttaaaatctctctgtggtcacttgaaacacaattttgttgctgctgttgttttctgctccttcgaattatattgaacatgaatttctggctgtttactgttgctttttagagatatatgatgcaactggatagttgatactgattttgatctgaggcttactattaaagctctgttttgattttacaggcggttaggattggggacttggagttgtttaggacagtccaggagaagttcttggacacatttgctcaagacagaacgcacaatctcatcgtgcgactccgccacaatgtcatcaggactggactgcggaacataagtatctcctactcaagaatctctttacccgatgttgccaaaaagctgaggctcaactctgaaaaccctgtggctgatgcggaaagcatcgtggcaaaggccatacgcgacggagctattgatgctacaatcgatcacaaaaacggatgcatggtctccaaagaaactggggacatctactcgacgaatgagccacaaactgcgttcaactcaagaattgctttctgcctcaacatgcataacgaagctgtcagagcattgaggtttcctcctaacactcacaaggagaaagaaagcgatgagaagaggagagagaggaagcaacaggaagaagagcttgctaagcatatggctgaggaagacgatgatgatttttagacaaaggtcatctatttcttataagagttgactctccatctgtctcactttttttatgttcacaagtttacttggtactcttctcatcgtctctaagtgtttctttattgaggatttttatcctcaggaacctttttattactctggtttcactttaggaaaagatatttatcttgttggtttcagaagatcaaattcaacttcgtttaattgtgtttgggagattttcgcattttaagaattgaacacttgtagttatagctagctgtattaggtgggtcattattagaaattgaccatgtgaaatgctatcatctccaggcgatgcataccattaaaatccacattcataatttacattaaatgatagataagcagtcataaatatctaaagaatgaaaacaggacatgtgtattgaccattatgtgtattgatacattagtctatctctgccaaactaggtctcattttcttgaataaaacaatctcatgttatgcttttaattataggtgtttctggttcgattcattaacttcttaataatgacaaaaatctgtagaataatacccgggctctttgatagctacaactgccaactatttaatccatacaatcaaaatgtaattttcataattgtagatttgtaatgggtcaatatattcttacactctaatcatatccaaacaagctcctcaattccttaatcttgttgtatccagtatccatattttgttttcttactgcggaagttacttggtagtgtagtctggatttcggattgcagactttgcagtccacgatttttcatatgttggtgacaacgaacaagtgttaagttgacggaagtgttcgtaacaaacgacgtcgtgacggtgatcttcatcaactttgattggaaatcaagttttgagggacaattaacccaaaaaaataatcataatgataatgaaagagatttggcgtgttgctaataatgtaggacaagtgagcatgtgagagtctgtgaccgatgaacctgctcagaccaacctgcacatgattgtatcacaaacaaaaaactctcatttgtctttctttcgtcttactttattcattttaagcaaaaattaaatatccaccgcgttgcacaagaaatcatttacccatatgattattctcttagttttgaatttttgatgaccatgctgatttaaaatttgcaatcttacaataactttaacttatgtataaaaaaaaatgctgcatcaaccaataaaacaaaactttaggattacaaatgtttggctatgagtaaatcaagatattatctgcttcaagtctctttttcttatataatttcagaggaaaatgtttatatatagttcaaagcaatattagtgtaaccaaaggtaaattttgtatgaactttttggaggaatagaaatccatctgcagcattattacaaacagagtttgcagatctactgtctttttttggacttatactgttactaacaaaaatacacatgtaagagatttgcccaaataaataaattaaagatacacacaggctagataaagataagaccacatgtaaggtttttgttgctatactacattagtttacactcgcttcccacctttatttaaacaactctcacctccttcactcgatcatcatcatcatcatctctttcttcttccaaaagtcataatc

SEQ ID NO: 14264 - DNA, 3000 bp, Unknown
  misc_feature (1)..( 3000): cDNA_ID_4264581_gDNA_ID_2684096_Annot_ID_190132 3000 nt of promoter + ATG
atgtacaaataacattgttaacttcttatgaaaattttgcaaaaggctaaagaattactgtcttatgaaaataagactttggtttcatgttctataaagttaactacttatgctgttatgcatcatgatgataaaacatgttagttatatgagtagaaagaaacataatatgggcatatacttatgtcctttctcaaattatgaagcagtgaattgctttcacgcccatagcaaattccacaaccatagggacacacttatttctgatttcgatcggttaaacaaagttgcatcaaaactactcggttaaacccattcataccaatattttcataacattttcatcgttagataataatacaaagccaaaccgggaaaagattggtcgacaaaaagaggatgaggggtattgctttgaattattaaagcaaagtaaaagtaacacagaactgaaacaccaacgtctatattggtgatcggtagatattcacaacaacttcacaatgacccactcaatgtaaaaatatggggccaaattttaaatggcgttgaagaattcattttcagatgtcgattatattcaaagaaaaaaaacaattctactaaaactcaatctctctttttttgttgttttcttttggtttcacagatttgcattcattcatattttgggagaaggtgccgaagagaaggcgttggaacttggaacttagtggaatgatgcgggaagatggaatgtattagctaaggcttcaccgtatgatgggcaattcgctgatcctcgatggtctactgtggaatccttagacttcagtcttccataacacaagtaagttgattttttcggagactggtacagtatgtgttattataagttattgaacacaaacacatattgaagagaccaaagttattataggagtaaaccataaaattttataggttgtattctaatattctttaagaaccagtaagaaataaatgatgatactttgctaaaagataataagcttctatcatcaaacatgtagtaagtagggggaatattataacagcttggtaccaaaaaataaaagattatgtacagcaaaacatatgttcaaaacaaacaaaacgacttaataggaatttggttacaaattaagacttaaatccatttgtcacaagctccttggttttatcattgtagtctccagacgagaaataaagcaatcatatgatatagttacttatctttctttaaaacttcaaggataagcttaaggagtttgtaaccaatgagtttaagtccaatatgttatcacttcatgtaagtcttttggtttgctttaaatagtatgtttagttgtatacaattttatgtgagaagccacagtagagaaggcactggaacttattagaggtgacgtgggaggatggaaatggaatattgtagatgataaggttatgccgccgccatgcacaacaataagatgttgctccccagtcaccatgtacgtaaatttgctcttgatgatttggttcaatcttatttgtaaaaaaattaaacctctcactaattttcgttgagaagtatataagatgactacggagtagattataacaaacttacaaatttgatttttccacataagattatatacagcgaaacatgtattcaaatgaccgaaaaatcttacaggaagtggtaatagattaaactaaacttaaacctatttgtcacaattttccttaaaacttcaaaaataagtttaaagagtttgtaaccaatgggttaaagtccaatctgttatctcttccatgtaagattttttgtttgctttgaatagtatgtttagttaattagttgtatattatcttatgggagaaggcactgaaactcagtatgtgtgacaaaatattatggttgttaatattatgccgccgccaggcacaataataagatgttgctcttgattcttggttctttcgttttttgtgacaaattaaaacctcttactaaactctttggtgtttaacttgtgatacaatgcaacttctatttttttaaaaaatattacttcagtttttctttcgttcttgtctacatgttaaaactaagcacaataatcatcatctgtgttcattattatccaagagtatgagccgcgtacgattcgcataaacaaagtaagctcattaatcatcatctaatcaatttcatcgatttatctggaaaccaatctcactctagaacaaacaataaactctatttggatcaacaaattgtactataatgctatgttaagtattacgaatttgtaattcaaaattaattagcaaaaagtgaacttggaatcttggcacaatttggtgtccaaatttttgtcacgtggcagataattaaaaaaaaactgccttaatgggccgaaattaagtgatctgacccattaaatccgtaactagcccgtgagtttatatgacatcacttatcactcttatcatattgaatttttctttagtcacaatcaaatacaaaatttattttcaaagactatcacaatcctagtatctagtttataatctgaatattggtatatttataggaagtaaatatctgtttcccataacaattaaataaaagacgtggttgttggagttgactaatgaatgattcgtaatgaattttacaggtaagtattacccaaaaaaggattaaacatcaccacaactaccaatagggaccttgtactctccacattgcttccttcccaggcaaggttacttccgtaattacgaaaacaccataaaagaaacagatctcgtcccgcgttggtttgattgatcagtgtcggtgtcctaatcacaatttccttatttagacaaaatctgttacttccctctcttgaatcgtcgtcattctcgaatctctagatctagccaaaacttttgccatctctaaaatgtatctccattgacattttgagatctatctagctctgtttttctttttagaacaaa

SEQ ID NO: 14265 - DNA, 3000 bp, Unknown
  misc_feature (1)..( 3000): cDNA_ID_3015578_gDNA_ID_2684096_Annot_ID_190127 3000 nt of promoter + ATG
tcaaatatttatgtaaagaaaatatagattatgaaaagctcctaacaaccccttacaatgtgtataaataagtctataaatacgagcatcacaatcaaacaaaacacatgcaagacaggctataagagactttataatatacaccaaactatgcaaaaaccatttcagagagctcatcctaacacacactcgcactccttcaccattcatataaacgaaccatttaatcatcatcgttacttggaccatcatcataatcacaataccttcataggtttatcttcatcaatgaagctcttctccaaattccgcaaaattttcatgaagatcatcttcgcgcttccttcttcctcctccgcaaccgtacgtcctcacaaaaccgctgacttcggcaatggttgtgataggctagagacgccgaagatatcgtgcagtaattcatactactcctcacaatctcactacagtgaagctatctcagattgtatagactttttcaataagtctcaacaagaaagtgaagaccggattgctcatgatcacgaccgtttttacgtttagtcaaacttcaaagaaaaataatgatctcatgtcttttcttcttctagataactcaaaattttcttctcttaagctcaaactcttattaatctgtattcacagtctctgcatgtttccctgaaagtaaatctcgagttcaaataaccaaaatggacctcacaattgttgtcttccatgaatgttagagaacatcgagacttatatttgttgatccgtttccaaccaattttaaaggaagcaggttgtgtttagttctttccactatcattccaagagaccaagagttgtaactgtaagcgttgtgtatcaaatcatatgatcgtggagtcaaaacgtcatcacaactaaaatctgaattaacattaatgcttctttgctatcaaaaacttttaaatcatacgagtgtctcaaaatccctaatcattaaacctctccacaagctcaagcactccattttcgcagagctttttacaccacaccagacgggagtcgaagaacgagctgtccacccattaaactgttcccaaaaacagaacaaattctaaatctttagacattcaaaacatttcaacaatatcgcgattatataatgggcgtggaccaaacgttttttacctctgaacatagtaatagcagaaatctgcaagaatgaaggtttggactatttcagagatgaggaccattacaggccacagtccagaccctaatgcagtcagtaaccgccctcgcgtatccaacacctacaagcgtttaaatcatttttagaaacattacaatatggagatatgtgtagcctaacaaggataaaaactccagaacctgaaggatccagtgtgcacaactcaagaacctagcaattcccaaagcaaatacgtaatgtgcagtgaatggttccacaatctgcgaaaaaagacataacattcaagaaagattcagactcagcactgtggtagcaaaaagctcaaggctttaaagcgcagtagtatcgagtaccttagtgttctgcatgactcttaattgaggaagaactgaaacagcttcaagataaacacagaatgcccaagaaatcctgtttatgatgtggtgacgtgttgatggatgaatgaagaaagacagaacagcacatgggattacctgaagcaaatcagagtaaagctctcaaaacaaacattacatcgccatgaagattctcaacaacaatcaatatacaagttccaaagttctttttatgatataaactaaccaagttgaaattgtgaactcatacattattctattacacaagttcaacactcaaaaacacatttaacataatctatcaacaaagagtttggtaaacttacgacgaaatagatagcaaaattgtctttatcttccatataagtaggtctaagcttgaaacggatcatataaacgacccaaagagtggtcaccaaagtagctgaatcaagaaatgtatgaagatcaaactccattacaaagctacaatacaatctcacagccagaaacaaagccgttagctcctgtgtcttgagagatatccctgttttaaatcatcaattttcaaaatgtcaaaatcaatgaaacaaattagcccatcacatactttgagaatcaaatctaatcaagccattcttaaaacctaataccagcacaagtcttctcctttgtgagcttatagataagaacagcgataccaacggcatgtacagcctcagaagcgacgaaaagattgtcgtgttcatgaacaatcaccctgaggagaacaagcaccgtcattgccgttaccacgccaagaaaagcctttacttttggcggttgccggcgaatccacgccattacggactgaatcggattcttctccgccttcatcgttcggacaagatctctttctctctctccctcgctcagatcaaatgtgtgattaatgaatgattatcacacaacttcgtcttcgtattgaattggggaatgaatgatctgtagaattcttaacgcaaccatacaatggcaatgccattactttcgcgaggaagacacgtggaagctgttaggtgagagactgatagtttcttgttaactttggcttcgtctcttcttgtctgatgcatctatcgtatttattacactaaaccggtttggtttgaacgaaagaatttacaaaaccagtttaactaatttggcacgtgtgatcgatcgtgtggtgaagaacgagcccattaacggcccaatgaagagcgcgtgtggctttaaaactttatatgcaccgaatctctcttttttttttctggtcttgcaacttctaattcttctaacggtcttatatctctctagaaaatctctctctctctctctacaatttttttcttcttcttcttaaaattcttctgtgaagtgtgcttcttcaattggtaattcgaatttgggttttttgagatg

SEQ ID NO: 14266 - DNA, 3000 bp, Unknown
  misc_feature (1)..( 3000): cDNA_ID_1690384_gDNA_ID_2684096_Annot_ID_190126 3000 nt of promoter + ATG
gtaaaatgactaagataaaaaagtgttaggtggggtgaaaaaaaacagagaataaaaacctcgcaagcgagggaagtgatgaataacagagacaattggttatattagctgtcactcccatctttcatattccttcaccatctctctctctctcgatcttgtgaaccactacacacactaacacaatgagagagatccttcacattcaaggtggtcaatgcggtaaccagattggttccaagttctgggaagtcatctgcgacgagcacggcatcgattccaccggacgttacagtggagacactgcagatctccagcttgaacgtatcaatgtctattacaatgaagcttcaggtggaagatacgttcctcgtgctgttcttatggatcttgagcctggtactatggatagtatcagatccggaccgtttggtcagatcttccgtcctgataactttgtctttggtcagtctggtgctggtaataattgggctaaaggtcattacactgaaggtgctgaacttattgatgctgttcttgatgttgttcgtaaagaagctgagaactgcgattgccttcaaggtactatatatatctttttctgaattttccattatacgcaaattttctatagtgtttgatgtcgtgcatcataattcgtatatttactggatttagtttgattcaataatcatttcattcgtaatttgtctgacgtcaccgtatcgataatcgtttatcaccatagatctcttcttgtaatatagtatgatatctatctacataattagtaaaattaggtcacggtttagtaagtgtactatagtatgttttttttattctttttttttttactttgatgatcttgtttatctattattggtgtgcatcagtgcatgtgggttcttattcagtaatacgatcaatcaaatcgtcttatttaatgtaattgcaagacagcaacgaaataattgaaatgcaagtgctgttttctgtggagtgggatgttagcacttattattggtagggccaagctgttttgtatagtattgagatatttttttgtcaagtttttttcttcatattaaagcttcagagataagatattatatcattgtgatgtcgtgatcaaaacattttcaaggcaccgtgattacgggataaaagatggagtggtcctactacatcatatagatttcttggaattttgtagtaaaaagttaataaaaatctcttttgcctttagagtttatagataatgcttgtggagcccaaacaacaatctcacgtgattcgtttttttagttacttttggtcaggtctcacgtgattcgttttatacattgattatttaacttcaattataactatgagtctatgactactagtgtgcattgttattattggggagaaatattttttaacgcatattgtagattcattgattattgttttaaagcattgtagattcacataaacattatagttgatttagttagcaaggactagtaacaagatgtttgcttgactatatatgaacactttttcgtctcatcgatggaaccaatactatgtgaatcatggggctgcattattttacagggtttcaggtgtgccattcgttgggaggaggcacaggttcaggaatgggaacactattgatatcgaagatccgagaggagtatccagacagaatgatgctcactttctctgttttcccatctcctaaagtctctgacacagtcgttgagccttacaatgcaactctctctgtccatcagcttgtagagaacgctgatgaatgcatggtcctcgacaatgaagctctctacgatatctgcttccgtaccctcaaactcagcactcctagctgtaagtacacccaattcttatcctccattaacccaaaatgtatttaaaactaattctgatacattgcatgatgatgtagttggagacttgaaccatttgatctccgcaacaatgagcggtgtgacttgctccttaaggttccccggacaactaaactctgacctcaggaaactcgcggtgaacctaatcccattccctcgtctccatttcttcatggtgggttttgcgcccctcacttcccgtggctcgcaacaatacatctcactcaccgttcctgagctgactcaacaaatgtgggactccaaaaacatgatgtgtgcagctgatccacgtcacggacgttacctcacagcctctgctattttcagaggacagatgagcacaaaagaagtcgacgagcaaatcctaaacatacagaacaagaactcgtcttacttcgttgagtggatcccaaacaacgtgaaatccagcgtttgtgatatcccaccaaaggggctcaaaatggcggcgacgtttgtgggtaactcgacgtcgattcaagaaatgttcaggagagtgagtgagcagttcacggctatgtttaggcgtaaagcgtttctgcattggtacacaggagaaggaatggacgaaatggagtttacggaagctgagagcaatatgaatgatttggtcgctgaataccaacagtaccaagatgctactgctgatgaggaaggtgagtatgatgttgaagaagaagaggagggagattatgagacttgatccaccaaatcaaacattttacttaaaagacaaggaaacgactcttggaaatctctctatttaaatttgattgaaaaacattgaaaaaatgggaaatttgtttaaatgtgttttttgtttgagtaatttgttcaaagaaagtttgaagtttccatttattttgggtgtcttgtattttccatttgagataatacgtccttgcttctcaagctactgtgtagtatataaattttacacttctctcaattgtcccacatcgagtaaattagtataaaggaagctaaacttttgcctctataaataaagatacttcatttcccaccgacttttacatttgggcttcttaaaaaataggcttgacaataa

SEQ ID NO: 14267 - DNA, 3000 bp, Unknown
  misc_feature (1)..( 3000): cDNA_ID_4378600_gDNA_ID_2684096_Annot_ID_190125 3000 nt of promoter + ATG
tgatggctgaaaaccatgtgccaggtctctccaggagcatcatcagctgtgattttggtgttgagaaggcattttccagtgtaaggctcttttggtctgtacctgttaacaatcacaccttcctcgttcttctttgacactttctctactttctttgcaggagtaggagtatctgtttctgttgtgatttgtgcttttatggaaaacactcttttacctgtcactacattgttgcttttgtagtaaaaagcacccttttaaacacacccaacaacaaaaccagagagacctaatcaagatcccatcaacagtacattgatcttccaaaagtttttggtcatatttgagaaaacccagaagcacatttatccaaattccaaaactttacttaacatgttacttacaagacccagaagattattagcaaaaccataaaagcagagcatctctagactctcgactacacaactttttttgtgggatcttgactttatcattatccagttgagaaaagcttataaagtaccttagtaaacctgatcctttcaggagcaatggcacaacttgtagcgggaaaagaagaagagtttgaagatgtgagagaaacagcagcattcatggtagtcgccattgcagagcaaatgagatcaaactgagagaaaatatcagaggaatataaaaaggaatcacaaggagaaagataagagaaggattacaagacatttgtgtttgggtggatgaggttttaagaagagagtatctcgttcatcaaagttgtggttatcgttatttgacttgaggaagctatatatctcttttgttttttttcctctaaatatcttgtgtgtataaaatacgaaaatcaactcaaaacataagttttaacacatgttttttttatattaaaaccccataattatattgttttttcattgctttgcacttttttattttccagaactattttaccctcaattaagtttcaaatctcattagacacaatccaattgtatttaaaattttaattataaagcacaccaaaaatatgatgtggtcaagctttatacaagggccctttcctttaaatatactttacaatgttttatttttggacaagatattatcacccataactttcctacctgatcaaaattatatcatattttaccatttcacttttcaatcaatgcctatatatccacatttgcaaaatgatgaatgtatatacaaaattgaagttgtggattgttttgttttagggaatctagtttacatatggagatgatgtcacttccaagagagttggtactatccaacgctctctcttgtttccaagatgtttcgtctatcggttgcatcacctgaactatacgcgagacggtcccttttagactgtcccgaatgctatatctatgttttcatgttgaacctcccagctaaactcagctggtatgttctcgaccggaaaacatcaggtcctagtacagctaagagctaacaatctcttggtggctgttcccttgctccacttacatagttatatgtctctacgttcaagcttagccgtcgttggttcaacaatctttgtcatgagtgcttgtctgtattgctcatggactgcccatctaacatgtgtgccacgcagatgactgtgtctagtagcatagaaaaaacttgtgtgtaccccttgattgtgtcgaataaaacagaaagctcaaagtttacatgaattactaaattgtttctctttaaaatccttaaactatgtaccatatatgcatatgggattaagataattactacgcaataatcgaagtctaattcagggagactaatccaagtaattcacaatcttgattaagagatcattggtagttagaagtttcagtgcataacagtttctcaattggtcaatgtatttactttattgtttcggtcatctccacaaggtcgtcaaaccatatacagatatactataaagtagtataacacaaccaattccataaatctcttttctcaatatgaaaaacgaactagattaactacaaatcaacaagagtttggattaaaacaaaaacaaaggagatttgggaaagaagaaagtttatcatcagagaggagtgatcggtacatcaatcggccacaaaaggcctcagacgaccgtcgtgagaattttagatcaaatctcatcacttgaatttaacttcttcacatcaaaaaatcgattactttagcaaagtaaaacaatatcaaagatgaaagctacaaaaacacgaagaaaaaagagacgaatatagccggcgattatgggtactgaagactagtttgcctttttatataggatgatggagcaaatctagggtttagtttgacaattaaagcatacgacaccgtttatttttaaatgggctcgtctatttatctacatgtctggcccatgtatgactttactagatctagttctgaaattgaaagttataaatttttgtatagattactttcttcttccttatttttaacacacaatttattatatgaaaacaatttaactacattaatgaaaaaaatacaattttttcaataatacaattttgcataacgtgctcccatatctctactctacaactgggaaaaaatatattataaagcttgtttttgtatagacatattcatgtgtatacaacatgtcaacaacatacattggcaatatatgcacatgcatgctccaagttgctaattaaacactgaatctgaaatctgaaattatgccaatctaaaaacctttcggcggtaaattttgagtgaataagacaatgtaaaatgactaagataaaaaagtgttaggtggggtgaaaaaaaacagagaataaaaacctcgcaagcgagggaagtgatgaataacagagacaattggttatattagctgtcactcccatctttcatattccttcaccatctctctctctctcgatcttgtgaaccactacacacactaacaca

SEQ ID NO: 14268 - DNA, 3000 bp, Unknown
  misc_feature (1)..( 3000): cDNA_ID_2992752_gDNA_ID_2684096_Annot_ID_190124 3000 nt of promoter + ATG
actaaaccgtgacctaattttactaattatgtagatagatatcatactatattacaagaagagatctatggtgataaacgattatcgatacggtgacgtcagacaaattacgaatgaaatgattattgaatcaaactaaatccagtaaatatacgaattatgatgcacgacatcaaacactatagaaaatttgcgtataatggaaaattcagaaaaagatatatatagtaccttgaaggcaatcgcagttctcagcttctttacgaacaacatcaagaacagcatcaataagttcagcaccttcagtgtaatgacctttagcccaattattaccagcaccagactgaccaaagacaaagttatcaggacggaagatctgaccaaacggtccggatctgatactatccatagtaccaggctcaagatccataagaacagcacgaggaacgtatcttccacctgaagcttcattgtaatagacattgatacgttcaagctggagatctgcagtgtctccactgtaacgtccggtggaatcgatgccgtgctcgtcgcagatgacttcccagaacttggaaccaatctggttaccgcattgaccaccttgaatgtgaaggatctctctcattgtgttagtgtgtgtagtggttcacaagatcgagagagagagagatggtgaaggaatatgaaagatgggagtgacagctaatataaccaattgtctctgttattcatcacttccctcgcttgcgaggtttttattctctgttttttttcaccccacctaacacttttttatcttagtcattttacattgtcttattcactcaaaatttaccgccgaaaggtttttagattggcataatttcagatttcagattcagtgtttaattagcaacttggagcatgcatgtgcatatattgccaatgtatgttgttgacatgttgtatacacatgaatatgtctatacaaaaacaagctttataatatattttttcccagttgtagagtagagatatgggagcacgttatgcaaaattgtattattgaaaaaattgtatttttttcattaatgtagttaaattgttttcatataataaattgtgtgttaaaaataaggaagaagaaagtaatctatacaaaaatttataactttcaatttcagaactagatctagtaaagtcatacatgggccagacatgtagataaatagacgagcccatttaaaaataaacggtgtcgtatgctttaattgtcaaactaaaccctagatttgctccatcatcctatataaaaaggcaaactagtcttcagtacccataatcgccggctatattcgtctcttttttcttcgtgtttttgtagctttcatctttgatattgttttactttgctaaagtaatcgattttttgatgtgaagaagttaaattcaagtgatgagatttgatctaaaattctcacgacggtcgtctgaggccttttgtggccgattgatgtaccgatcactcctctctgatgataaactttcttctttcccaaatctcctttgtttttgttttaatccaaactcttgttgatttgtagttaatctagttcgtttttcatattgagaaaagagatttatggaattggttgtgttatactactttatagtatatctgtatatggtttgacgaccttgtggagatgaccgaaacaataaagtaaatacattgaccaattgagaaactgttatgcactgaaacttctaactaccaatgatctcttaatcaagattgtgaattacttggattagtctccctgaattagacttcgattattgcgtagtaattatcttaatcccatatgcatatatggtacatagtttaaggattttaaagagaaacaatttagtaattcatgtaaactttgagctttctgttttattcgacacaatcaaggggtacacacaagttttttctatgctactagacacagtcatctgcgtggcacacatgttagatgggcagtccatgagcaatacagacaagcactcatgacaaagattgttgaaccaacgacggctaagcttgaacgtagagacatataactatgtaagtggagcaagggaacagccaccaagagattgttagctcttagctgtactaggacctgatgttttccggtcgagaacataccagctgagtttagctgggaggttcaacatgaaaacatagatatagcattcgggacagtctaaaagggaccgtctcgcgtatagttcaggtgatgcaaccgatagacgaaacatcttggaaacaagagagagcgttggatagtaccaactctcttggaagtgacatcatctccatatgtaaactagattccctaaaacaaaacaatccacaacttcaattttgtatatacattcatcattttgcaaatgtggatatataggcattgattgaaaagtgaaatggtaaaatatgatataattttgatcaggtaggaaagttatgggtgataatatcttgtccaaaaataaaacattgtaaagtatatttaaaggaaagggcccttgtataaagcttgaccacatcatatttttggtgtgctttataattaaaattttaaatacaattggattgtgtctaatgagatttgaaacttaattgagggtaaaatagttctggaaaataaaaaagtgcaaagcaatgaaaaaacaatataattatggggttttaatataaaaaaaacatgtgttaaaacttatgttttgagttgattttcgtattttatacacacaagatatttagaggaaaaaaaacaaaagagatatatagcttcctcaagtcaaataacgataaccacaactttgatgaacgagatactctcttcttaaaacctcatccacccaaacacaaatgtcttgtaatccttctcttatctttctccttgtgattcctttttatattcctctgatattttctctcagtttgatctcatttgctctgcaatg

SEQ ID NO: 14269 - DNA, 3000 bp, Unknown
  misc_feature (1)..( 3000): cDNA_ID_3015586_gDNA_ID_2684096_Annot_ID_190123 3000 nt of promoter + ATG
tcttcttaaaacctcatccacccaaacacaaatgtcttgtaatccttctcttatctttctccttgtgattcctttttatattcctctgatattttctctcagtttgatctcatttgctctgcaatggcgactaccatgaatgctgctgtttctctcacatcttcaaactcttcttcttttcccgctacaagttgtgccattgctcctgaaaggatcaggtttactaaggtactttataagcttttctcaactggataatgataaagtcaagatcccacaaaaaaagttgtgtagtcgagagtctagagatgctctgcttttatggttttgctaataatcttctgggtcttgtaagtaacatgttaagtaaagttttggaatttggataaatgtgcttctgggttttctcaaatatgaccaaaaacttttggaagatcaatgtactgttgatgggatcttgattaggtctctctggttttgttgttgggtgtgtttaaaagggtgctttttactacaaaagcaacaatgtagtgacaggtaaaagagtgttttccataaaagcacaaatcacaacagaaacagatactcctactcctgcaaagaaagtagagaaagtgtcaaagaagaacgaggaaggtgtgattgttaacaggtacagaccaaaagagccttacactggaaaatgccttctcaacaccaaaatcacagctgatgatgctcctggagagacctggcacatggttttcagccatcaaggtagtgattccattacttgattctcacaacatgtttcttactttataatgattcttttcttgatggtaattgaagtagcatttatgtgtcttcgataggagaaatcccgtacagagaaggacaatctgttggtgtgattgcagatggaattgacaagaatggaaagcctcacaaggtcagactttactccattgcaagcagcgctcttggagatctcggcaattctgaaaccgtaataaaccatttcctttacaaattttacgaggctttgttttgtctggttaagtgaatgaaggagttgtttcaggtttctttgtgtgttaaaagacttgtttatactaatgaccaaggagagactgttaaaggagtttgctcaaatttcttgtgtaagtactaatgaataagtcttgtgtaagtttataacttattcacttattcaactattgtgttttcttttactttatttttcaggtgatttggcacccggaagtgatgttaagctgactggtcctgtaggcaaagaaatgcttatgccaaaggatccaaacgccaccgttattatggtctctcccttaaacctcaaatatcttgacttgcttatgactaaacctctataggttctgtttcttgaaacatcattaaacactagtaaacatccttcttcttcatgaacaccacagcttgccacagggacaggaattgctcctttcaggtctttcttatggaagatgttctttgagaaacatgatgactacaaggtaaagtaaatgattatctttttgattttgaccaaaatgtattaaaatctaacatctttgcaatcgttggaatgcagttcaatggcttagcttggttgttcttgggtgtaccaaccactagctctttgctctaccaagaggcacacacacgctaactcttcttctggtttcattcttcaaatccttccaaatcattaagtaaaatcaatcctcttttttttttgttttgaaaatcaggagtttgataagatgaaagcaaaggcccccgagaacttcagggtggattacgcgataagcagagaacaagcgaacgataaaggagagaaaatgtatatccagactcggatggcgcaatacgcagctgagttatgggagttgttgaagaaagacaacacttttgtttacatgtgtggactcaagggaatggagaaaggaattgatgacattatggtctcattggctgcaaatgacggtaagaagagctaattaataacactccaattcttgaaacattcattgcataagcaataacactctaatgactttgtggtggttttaggtattgactggtttgattacaagaagcagttgaagaaggcagagcaatggaacgttgaagtctactgatcaaaaagcctttgacatttctgtagcaaagtatagctgaacaaaactgtaattttcgcttctgaatttctgtattttgaagataagttttttagatatgttatactaaaaaaagagttctttaatcattatcatttacttcttcccattattttgctttaagttaaatgacacattgatatttatccatctaaaaaaaatgtcattttctttaactaattgataaggaaaaaaacaaatggttaatgaattgccttcagttgacagcaatctgtattttatggtagctaaccaatcctttaacaatatccaatcttattcttttatgcatctatttaaacaaagtaatggtttcttaggacacttgaatacttgagtcgttagttgattttgggttggactactaattcatgaaggttataatgttacctccaactccaagccataaaatatcatgagaaaaagaaaaagaatctcgattgaagatattttcaatttctatgaagacaatagtatggttgagatttttacaatttctatgaagacaatagtatggttgagattttttcttgaagccgaccaaaaaaaggagaaatctagcaggctaatgtttattctctcttttctttttgtcagaggctcatttgtcagtaaccatttgatcaacggctaaatcctatatccactaaaattcaaccacgtcatcagacataccaatatacagcaacacttgattgtagctaataaaaagatcgtcaacagaattaactctttaaatcacttctctgttatacctctctgtttcgctccctgaagaagaagaaacagagcgttcagatttctcttcaacataatcatg

SEQ ID NO: 14270 - DNA, 3000 bp, Unknown
  misc_feature (1)..( 3000): cDNA_ID_3015592_gDNA_ID_2684096_Annot_ID_190121 3000 nt of promoter + ATG
tctacgatgtcagtctcgtcgacggctacaatgtccagatgctggtggttcctcaaggcggctccggtcagaattgcagcagcaccggctgcgtcgtcgatttaaacggatcttgcccgtcggagctaagggtgaatagcgtcgacgggaaggaggcggtggcgatggcgtgtaaaagtgcgtgcgaggcgtttcggcagccggagtattgctgcagcggcgcgtttggatcgcctgacacgtgtaagccgtctacgtactcgcggatcttcaagagcgcgtgtccacgcgcctatagctacgcgtatgacgataagtctagtacatttacgtgcgcgaaatctcccaactacgtcatcactttctgtccttctcccaacaccaggtaaaattcctttaatacccttcttctatttactttcacccatttcgttaaaaggtgattaggaaatatttactctttcataagtaggatttttttgcttgttgtataatcgaagttactagatactcaattccattgataatcattaattttgctatacaagttttgtttttctttcaagagttttatgatagacattgtttgtcaggctcctataaaagagagacacgtgggaactaacttcattcacttattcctttatttgcagcctaaaatcagctgaggaacacagcacagagacaatgacgacgacaagtccaagttccggcagtacgacgtcgtcgcagatggtctacgaaggtgctctggacgaaagcagtggttcaccatctacgtatcacggcgtatcacgagcaatcacagtcgttcttctctcgcttgctttttgtcgtatgtggtggttcttctgaccagagattatttgtcttagtgtctgccacgtatgcgcagaaacaagaacgtatgggcctttagaaggccttttctcactatagtaaaaatatttctaaagtttttccacataatgtcaactttttactccacatgaccaaacgttgaatgattaaaccattcttaaggaaaatcaagaaagtaggctatattaaagcattaatattggtagtattttagattagtcttaagtctaaacatagtttttaggaataattttataattaattttaaaaattttgatgttaaaaaactaaaattttggcaatatacaatggtggtttttaactaattttttttaatatatatatatatatatatatatatatttatatatatttatttatttaaaaatagaaatattttaattttaaataacttaataattattacaacattgttgtagcgtcatcaaagcttggaaatggttggcgatgcttaatcatgttgatgttgttatcaaatttggaatttaagtcatttaaaacgtacataatcagagttcgatctgaaacaagggtatcgatattatcacacaagtgtttagtgaggcgattgctggcaatgaagatatccagctaccacatctaaaggaaatgactttgagcgtcatgacaaataaagacaaaaacaatcacctcttttacgacataacatgggctattcctcaacgtagggtattaatactctttaaattcaactacaatgtttataatccgtatctttaggcatagttctatttatgagatcgtgtagggcggcttcatctacattcataaaattatcatcgaactcctccagcgcctaaaaggtgtcgattttatgaatatcacccacccaccaaatgcttcatattatacattttttataattaatcatgcttactaatcagagtttacaaaacttgatttataatatgagattattcattctttatagaagaacataataataagaaaaaaacattagaaattagaatattatgtaaatatatgataaaactaaatatttcttagtttttgctcaactagtcctttaactaaatgatgtaaccaaaaaaaattcataagtttttcctcaaatatttttcaaactttatgtcaccatagttattatggcactagctactattaaatctaattctcatttttaagctttttataacccttctaaacaaacggaaacatttctataatggattagaaagaaaaaaaaaaagaacagatggggcaaaaattatactcggatctagttcggctatagaaaggatatggatacccggattaaccttattgattttcacatgtgcctctcgtgctttctatccttttgcaaatgtagaccaaagtattttgatattatatgccaccacgaggttgaacgccaggctatcatgacaagtcttaatacaaactaggccaatacccgcacgtttataacaatttacctcgagtgtattaatttgatttaactaattcgataaatatttttttttggtgtttttaataaccattttgataatatctgatgacaaaattaaaaaaaacattttcatttacgctttaaatataacaaatttaattattattaatgttaaggtaagtaattagaattaaatgttaacaatataattaaaataaataagtaaacaaaataacaaacgaattattaacttgagagtcagaataatttattagtggagaacagatggaccaataatctaaatttaactaatatatagaaaagcaacatgaatatattcctgaccttggtgtggacaaattttccaaaaaaaaagataatgtcagaagtggggtttgaacccacgccctcttacgaggaccagaacttgagtctggcgccttagaccactcggccatcctgacgttcctgattaaagatctcataaattcatcatatagaagaatcggatgatttagtgtcaccaattattttattaccaaacaaaagacacttgattgaatgaatcgccgggatcgaggagattagtagtaagcacatcatcatcactcagatctagtagttccacaaactcacattgggtcgttgaccagaaaaacacacagagaaaggagaaaaacatg

SEQ ID NO: 14271 - DNA, 3000 bp, Unknown
  misc_feature (1)..( 3000): cDNA_ID_3015619_gDNA_ID_2684096_Annot_ID_190113 3000 nt of promoter + ATG
tctgattggttaatttactgtatcagtcctccaatgtcattactcctgcttcaatttctctgaccactcacatgtagtccaatcggttcgttgttcattatgtattttactaccattaggtccaaacacttgaaacgttatgttatactgcgcctggaaccgaaacagagcggtttcaagttgacctggtcttcttccatggtaattgcaaatcctctgattcgaatcaatgaatgctacaatggtgtaaaatactgtgctacaatggtgtaccaaatttttaagctttcctttcatattcaattgattcaattaggttaagtatcataaaacgctttaatattcttgtccacacttgttctttctcgagggtcgaggctgtgtttattcgagttgtttttggaaaatcatctcgtattttttttcttttgagagaatagtgtagaaactgtggtcttatagttttagagggtaatacgaaaatgagagtgcgattagtaatggataactgaatttaagaaaagttcaaagtgtgtgaatgagaaggagtcgtaagagacaagcatcttcttcttataaccatctaaaccacatgcttatgtccactttttttctttctttctgagtgaaaaacactttagtctcccactctttatattttgtagcttcacagcaaaaattctcttttacttatcagacagataagatcatatagcaaatatgttgcaagatagagtttctggttctttgtctagttcgaaaatatctcgatgtgttttgtttctctcactcttttgtttcttcctcttgacgatgcatgcttcagcaaaccgcttacagcgagttccaaatccagggccttccccggcaccagagcctaagccatgtccgagtccagggccaaaccccgcaccagcgacaactaagaggacacataacactacgtttccggcgatcttcgcctttggggattcgatcttagacacaggaaataacgattatattttgaccttgatcaaagctaattttcttccatatggcatgaattttccagataaagttcccaccggcagattttgcaacggcaaaatcccttcggactttatcggtgactttcctctcctttatcatatcatgagaatgaagatacaaaatattcatgcttgatgcttctatatagtatgtactatattttcaatggaaatattcttatgaaaggttgtttttcttttcccgaatttcacagcggattatataggagtaaaaccagttgtaccggcatatttgagaccgggactgacccaggaagatttgctcactggtgtatcctttgcttcgggtggttctggctatgatcctttgacaccaatcgtagtagtaataacatcattgctttgaatttggaaattatctccttcatttttaatgtttccatttgatttgatttggttttatatctgttatcaatgttataagtagagtgcgataccgatgtcaaaacaattgacatactttcaagaatacatagagaaagtgaaaggctttgtgggaaaagagaaagccgagcacataatatccaaaggcctagccattgtggtagcgggcagcgacgatctggccaatacctactatggtgaacacttagaggaattcttgtatgacatagatacatatacctcttttatggctagctctgctgcaagttttgctatggtacgtgaaaccaatcctccgatttagttgtttataatatgaactagtatatcaaacctactgaatatgagtttaattttggcagcaactatatgaatcaggagcaaaaaaaataggatttattggtgtttctccgatcgggtgtataccgatacagagaaccacaagaggaggacttaaaagaaaatgtgctgatgaactcaactttgcagctcagctttttaattccaaactctccacaagtttgaacgaattggctaaaaccatgaaaaataccacattggtgtatattgacatctactcttctttcaatgatatgattcaaaaccccaaaaaatatggtaacgctcaactactcactctacaatggtgtttttgtgagaataagtttgagattttttttaaattcttttttggttttttgcaggatttgatgagattgatagaggatgttgcgggacggggctactcgaattaggtccgctttgcaacaaatatacatcacttctttgcaagaatgtgtcttcttttatgttttgggactcttaccatccaacggaaagagcttataaaatcttaagccaaaagtttgtagagaatgacatgggccctttctatgacaattaaatgtaaaatttaagatgacacatttgagatgaaatttggctaaataaaagctgtatctcatttggattagtgtcttcaaaaacatgtttattgtattatacatataaattgacatggagcgataaattgagttgtttttctaaagatttgatattattgtgctttgacaataatcggacagacaaaagtggacgactaaaaccaaaaataataaaaacagagtgtaaaatgctattatattatgtgaatttagccgaattgacacaccttcttcttgtttcacttgatcgaatccatctcattccaacaaaatattaactaaatataatttaaatcatggccattaacgaaagtttaaaaagaaggccaatccgctagaaacttctcaccctcagacacagtcgcacaggcatcagctttgaaatcgcgtaacaaaattttgtgggaagctattacatagacataaaccctaactccaaatccaactgtagttactttgataaacttttctggttaagtcaaagatagggaagatttaatagagtttattcctcatgagtttctatggattgagaagtcacgaaagatgctagaaagagtacttaagttcctacttgaaactggagaccgaatataagggaagtcttaaaacgtgtgatg

SEQ ID NO: 14272 - DNA, 3000 bp, Unknown
  misc_feature (1)..( 3000): cDNA_ID_3015623_gDNA_ID_2684096_Annot_ID_190112 3000 nt of promoter + ATG
gaaacgtgtgataaaagaagccttgagacatacgtacgcaactttaatttaatacggcacaaaaattgcatgtccaattccaaacagagattaaaaatgtacacacatacataatgacatcattagtggtatacaaacatatgcaaaatagtatcttaacatttatttcatctttatatttttgttagagaagctttttttccagagattgatgataggtgtagaagaaccatgaaatcgatattaattggatttgttttctttcttttatcatcatttcgtagcttcttcgtgaccactacctattcccaagtgatccatcaccgacgtctacggccatggccaccgccagaatctgggtccggcccatcacctggcccatctccatcaccacataacaaaaccacaccggcagtgtttttctttggggattcgatcatagatacaggaaataataataatctaacaacagaaatgaaatgtaattttagtccttatggtaaggattttccactcggagttgcaactggtagattcagcaacggaaaggtcgtttccgattatatatgttcgtactctttctctccctctctttctttctttcctcttcttttgtgccggacttggaagatttgtttatatcataacatgtattatgtgactttgaacataattggtgatagattgataatatactaggttatagtatatattatgattatatgttaaattttatgtttgttttacagctgaatatttgggagtaaaaccaattgtaccagcatattttgaccccaatgtacaactagaagatcttctcacgggtgtatcatttgcttcaggtggtagtggctattaccatttgactcccaaaatatccgtaagatgaaaattaatcacatatagatttatatctaaccatttatcctaatcatttgggtaaaatataaacagagagtaaagtcaatgttggagcaattgacatatttccaacgacacatagcgagagtaaagaggttagtaggggaagagaagacggatcaactgttagccaagggcttatccgttgtggtcgcaggcagcaacgatttggctattacatattatggtcatggtgctcaattgctcaaagatgatatccactactttacttcaaagatggcaaattccgcggcaagttttgttatggtacgtaactcatccatctttttcttttagagagttcatatagcttcactccaaataaagttaaaagttcatgcaatacgttcaatgatttcaaaactatatattatgatttattgtaaggtaagaagacactccaaaactatcataataccaaaaatttgcatgtaatgtatttaacattaaaaagtgacatttgtcaaaggtagtaaaattaacttgttagaagttaggactttagttttgcttcttaaaaataatcttacttttgttcaaaacaaaaaaaatcttagtaaaaaacattatagctattgatgtaacgaatttaatttttaacaaaagagatctaaggtactcaatagaataataatgtagataactagatgtacataaacttgacaaccaacaatattgaatttggtcatgattaatgtttttttctttttgggataaaatgtgaaattactaccaaaaggaattattgttttacaaaggttttaaactaaactaaatttgttcatgattatgtttaatatatggtatccatacatacataaattacaatttccttacaaagattttctttactggactaacgtaaataaattaataacaataacctatctatatggatacacttgaacagcaattatacgaatatggagcaagacaaatagcagttctaggaacaccaccacttggctgcgtaccaatactaagaactctaaaaggaggtcttcgtagagagtgtgctcaagatataaactatgcttctcagcttttcaacgtcaaactctccaacattttggaccaattggcaaaaaacctaccaaattccaatctcatttacattgacatatactctgctttcagtcacatcttagaaaattcagcagattatggtaatattagaacgtgaatatttaattcttataagtactaaactatacaagctcatgtatatataacttgagttgagaattaatgcagggtttgaagaaataaagagaggttgttgtggaactggatttgtggaagctggtccactttgcaatcgattcacaacatttgtgtgctccaatgtatctgcttacatgttttgggatagtctccatcctacccaaagattctataaaatcttaaccaaaatactttttgagaaatacatccacaatttaaattgagtagtgtgatcaaatgactcacattgtatgcttttatttttcttaaagcttgtgcagttgttataaattgtacaaaattattgtaagtcactatattgattaccaattgattttaagagaaacttttatcactcttcacatgctttcaaagatcaaatccatatcaatcagttcatttgatcgacagctattctgtttatgtaatgattatctttttctttttaggtcatgatgatgtaataatattatagctctctgaagtaaagtaatcaactagataacatgaaatataaccaaattatatgatttaatctgcacattgttgtgggggtaaatcagtcaaataattgaataagactgagtggtaagacttgatttgctggattggctaaatatatattatcagtccagtgatacagggaagagtgttgttctttaaccacaaaaacaaacaagtttcataccattattcaagggactcgatgaactctctcaacccttcttcacctttgtataaagtatgacgataaagtaaacaaattctttaaaaaaaaagaaaaactaaattgaaactaaaattcgaaacaaaaaaaaatactaacaaaataaaacctaaaatttatttgagatg

SEQ ID NO: 14273 - DNA, 3000 bp, Unknown
  misc_feature (1)..( 3000): cDNA_ID_2993154_gDNA_ID_2684096_Annot_ID_190106 3000 nt of promoter + ATG
atcaccactgcttccttgtgatacccactccgattaaacccactaagaataccattccaagacacaatattcgcctcaatacctgaactttccatctcagagaggatacgaaccacctcttctaagcaaccctttcgcgcataggcacaaagcaaagcactgcaagtgacaacatctttgtcagacattctatcgaacactttgcgtgcatcacccatcctaccacacctcatgtacatatgaaacatagacccctgaacaaacgcatccatatccaacccggaaacacacgacacacaatgtatctgtttacccactttaaaagccgataattcagcacaaaccttgaacaaattcggaagaacatgactatctggaatcaacccatgagagaacatccgagaaaacacaccaatcgattgcgtaaaaagcttagcctttgttaaagcgtatataagagaagagaaagagtaaatagtaggatccggaatcgattgcaagacgagatcagcatcgttgaaacaattatagttcgagtatgaagcaatgagtttagcggagatatagccatcgttttgagctccggatttgagtatacgagcatgagcttgtgttgtcttcgacaacgaagaagaccaatgatatgatgaagattctaagaatccaacgatcgattgaggaattttctctatcagtggaagaacttgttttgtcattgcttaactaaaaaataaaattttcccgcttaaccttaatcattcacttattaatcttcctacgtgaccagattattccacgtcaccacaatcagaaatcaacggctgaagatgaaggactgggtctcactcagcttctgagcaatcttagtcgttgattatgtcttcgagaaatcttggacgttgattctaccttctccgagttttataatctgttttcttaagaaaatttgattgatacagagagagcgatgatgattcgaacggcgttagtgttcgttgtcttcttcgtcggaacagtcgtacaagcgcagctgatacctccggcgaggcgtgatggatttttgtatccaccgggtcggaaaatcgaccgggatacgatacttatcgaggcgtatattgacccggtttgtccggattgtagagacgcttgggagccgctaaagctagcgattgatcactatggatctcgcgttgctcttgttcttcacctcattcctttaccgttagtgtttgatttctcttcccttcaatttcagttttcaatttctttagctagattgagaaattagttgttcgatgtttcaagtaattgtctaaatctatgcatgccatgaatatttgtagtgatttcaattgataagtagtttgagaaagtagcagattttgtttatgttgccatatctgttgtatgcaaattgttttattattgtgtgatgatgagcttagcttttggatcttgcagcttccatgacaatgcatttgtagcatctcgggctttacacatcgttgataccttaaacgccaatgccacgttcaatttgctggaagggatcttcaagcatcaggtttgattagtgtactaaaaaactaaactttgctgagattaaacagagaaaatgtatatccggcggttctatttcttgaaatgaatgtttatccatgcactccatttgatcagtacatatggtttggttgaaaatttgctgcaacagacattgttctacaactcgcaaacacaactcatgtcaagacctgcagttgtggaagaattaatcaagcttggaacagttacgttaggaaactcatatcattctcctttgaaatctggcttcagcaactcaaaatctgatcttgccactagagtttccttcaaggtgatcccttcagcttttccacttctcagtttcacttacttgaacattttcactagtataggtatttagattgcttattcaatttgttcctctgtattcgagttcatatcttcaactagataaccaaatggagtgatatggatctttcactgcattgtcactagtcattatctttgcgcagtaggagaatttcgggttctgtcacttgatttctagtagcttaccttaccttctatcattgctttgcttttgttctctttgcagtatagcgtctcaagaggagtctccgcgacaccaaccttctacgtgaatggattcgagctgcctggtgctggttctcccaaagattatgaaggatggagagacaccattgatcctctggttaaaccacaagaagtagacatacgagacaccttcctttcattcctcacgcaaccatcttactagtttgtactttctatgatgtgccaaactcccacctacttagttgaaaagtccagaagcataactctcatacatgttcatattgttacatcttcaactgtcttcatttgcagcttaatgtataataaaccaaaaattcttcaaatgcttctcatgttttgtataaacgataaaaattaaagtattaaaagttttatactgatgacaaaaaaaaaaagaaaaagagaaagagaaaagataccaatggttattgctggtctaatcctcgatttgatatttaaccggtttaaagtaaaaacttaaaaaccggaaatcgattagggcagttcactggtgcatgggtttgtggaagagaagttgtgcggctgttatatatatcagagaagcgccttcaacaaccgcctcttagggcgtataaaatcagaaacagaaacgagacaagaattaattctctcgtccaaatttcttctgggcagaaaccaacatttatccttatccgattcttctagggtttcggaagatctaaccagaaccttcgcaacaaggtaagcattcaagcaatttactgaggatttaagaaaaccctgtttcttctaaatcgtggattgaacgagaaaccttagtttccatcgctggttacatttttttgagaaggactcttctgattttgtgttgcttttcag

SEQ ID NO: 14274 - DNA, 3000 bp, Unknown
  misc_feature (1)..( 3000): cDNA_ID_3015642_gDNA_ID_2684096_Annot_ID_190107 3000 nt of promoter + ATG
aaaagatgatctggtattcatggttctatgaattggtgtagtgatgagatttggtacagtgtagattatctatatgatataattgtaagttcaaaaaatgcggtttcataatccagttgcatttatgttatttggatgcatcttggtgatttatatcaatttcttacgtttcgtgtcggatttagtagaaaacttgtacatgaatttgctttctcaaaagtgcaagttattgattaactgttttctttaattactttctcgctgcttgctattcaaacttttttagtacttagtcatgtgattagttgattttttgacatagaaattttgcttttgcttcttcttgaaacttttgtttttgtaacggaagttgttttgttatcttataggaaaacaaatcgaatgaagttatcttcaaggctatgggaagagctatcaacaagagtgtgaccatagttgagctgattaaggtattttctggttttagtctgtttcctgatctcagagttgtagttcttttgtgtatctgaagattatattgttatccttgatgcagagaaggattcctggtcttcatcagatcacatctattggatcaacggacattacagatacctgggaacctacagaggaaggccttcaaacgtatgtggtcactagactttagtatcaagtttattgttttaagtgtaccggaacacatgtaaccatgttgtattcttaattttgttactttgacctgttatttattaaaactcatctttttctcctgaagaattgagaccacgaggcatgtgtcgatgataaccataacactttccaaggagcagttgaacacatcctcagttgggtgagtttctaggactggttgttttgctatttctcgtctattctcttattggggattttgttgttttgtgtctagagaggtacattgtctccaatgctaatatatcttattaaataatgctataggtaccagtgtccgattcctattgagatggtgaagccattggctgagattgactacgaagggcaaggtattttagagtctcactcttaatgacgtttttaagctccctgccctgctgtcttttttaagtttttaaattatctctttcttgtagacggatctcctagaggcagaggaggaagaagaggtagaggaggaagaggaaggggaaggggaagaggtggtagaggtaggattactttagaaattgtttatacagtgtcgtagtttcgttgtaagcttttgcatgtgatttgtggataagcgtttgagtggactgtgctaattccttttttcgacttatcaggaaatggacctgcgaatgttgagtatgatgatggaggaaggggaagaggtggcagaggtaggatatctttagccaaatcgtatttgagtatagatttttgcatatgatttgtggataagggtttgaatgtgttgtgctatttctttttttgtttgatttaccaggaaacggatatgtgaacaatgagtatgatgatggaggaaggggaagaggcggcagaggtagaattgctttagaatatttctttccaaatcttagttttaccttttaacatatttgcatgtgatcggcggacaagtgtttgattggcttgtgctatttcttctttcggatttgccaggaagtggatatgtgaacaatgagtataatgatggaggtatggagcaggaccggtcatatggcagaggacgcgggcgtgggagaggaggtggacgtggtggtcgaggaagaggaggttacaatggccccccaccaccttactatgaagctcaacaagatggaggagactatggatacaacaatgttgctcctccagcagaccatggatatgatggtcctccgcctcagggacgtggtacgttgatgattttgttacactaatgttttctcattaaataatgatgagttgtaaatgtttaaaaattgttggaacaggacgtggccgtggaaggggaggtcgtggaagaggaggaggccgtggtggattcaacagatcaaatggagcacctatccaggctgctgcatgagcgaccagggtcattgaatgaagttggatctttcttacattctcatgtttttgtctctgttcttcaaagcaacttgttgccgtagaataatctttcgttcatgtcgctttaggttatatatatcctcatttattttatcatggatcttggattttcaagtttttattccttcaagagttttctagttttgtctcttttttgagttttggatatttgtttgactccaattacattcgtcggcgtattgacactaacaagtaaacaaccccctttggcattgcctttttccattggttcgtatatcagttgattatatattctaacaacataaaaagataacaagaaaaaataatgaataataaaattgtaattccaagttccaacgtgttttgagacaaaaagaaattaacccaacttgcgctggttgtgttttgggctattcgaagaaagcgtacgaaaataagtgagagaggtccaaacaaaactagtaaccaaaaagttaatcgccgttgccggggatcgaacccgggtcacccgcgtgacaggcgggaatacttaccactatactacaacgacatttgttgctcaatcgtaatgtagaagatataaatactaatatggaaaaaagctgtcttgaacaaaaagaaatatactttttttgttgtgtccaaaaaaaggaaaatacttaggaaagaaaagagtctcagcagcatcagctcgtccttaaatctgatccatcatcgtcactttctcccggcgaattccgttttatcgatttagtaagctctctgtctttatctctccgtctttctcagtcaacaaattggttgaaacttcaatcggttccttgaaatctcaccggcttagttgcatacttctgcaaaaaccctaaccttgtttttgtctttgtgaagagtaacgagatttgtgcaaag

SEQ ID NO: 14275 - DNA, 3000 bp, Unknown
  misc_feature (1)..( 3000): cDNA_ID_3015683_gDNA_ID_2684097_Annot_ID_190163 3000 nt of promoter + ATG
ataatatttagaagtttgtgctttttgatagtccggaggagtatgaatgatcaatgaaccctttcaactgtgaaaatttcgagtagattaatattaataagagtaaaattttcattaaagaaaattttcactaaagaaacaaacaaaatatcaaattaactaaattaataaagccctcttttatcagaaaaggtggcctacttcaaatgttagggtgtcttattggtttgtgatttaaataaagtttttgtaacttaaagtgttatgtaaaatctgttgttattcaatcatttttatacaaagattttgatgtagtttagtgttatttgtttaagattttgtaaaaagtaatttaaaatcttcataaatctagaattattggattcatacttttataaaattaataaagttttgtgttgttaaattaaaacaaaaaatctataattgttaataaattaaattattatgttattagtttataactttctacactttattcataaaataaagttataaaaaatatcatcaaaataagagattgtttggaaaacttacaaaaatattaaaaaaaccaatcaacaaaattataaaaaataagtctctaataattatttaaaatctatttactttctataattttataaacgtcatcaaaattatcctcgtattagttttatctggtgactttgggcattttccctttctcataaaagggcgcgtgactcaaaattaatgtatagatgtcccataatttcattaagaatagattgttattttaaagtaacgtatcttttatttatgtagacaatattgttttcacgcatgtcttactaatgatgataatatataattaataatgaagacatttattaggtcttatcaattatcaggaaaaaaaagaaagacatttattaggtcaatttgctgacgctataaaagaaagaccttatcatttgattccaacacaattcatacaaacatcttccaagtaagtgatttggttttgatcaatctttaacaattttctcgtattacaacaccatcaaactaacaagtaacaacaatcattttttctattttatttgatgaaaagggaaatagtttggtgatttctcgtaaagatgtttaagaaaatggataaaaaagcagcgcagagaattgcgatggaatacagagctatgatctcgaaagaatctttgttcagtattggttagtagctactttcctttgctatatttctaaataatcatttgttaattattagttatgttgtaatatattattaacatgctcgattaggtatacatctttttgagaaatttatttgcggggtttgtttttaaataacatgctattgtttaaaataacatgctattggcaaagcggattatttggcacaaaaaatttgtgcggaaccactacatatcatttttgtaaacaatgtttttcaaaattggctcgtttgagtcttaaacaatatctgatgacaaaaaaaacatgttattgtttaaaaatcattttaaaataaaactctttgtttaaaataacaggctatctagtgtgtgaaaccttattaatattttcatttgtaacaataaccaaactaattaaattattttaacattttatttgttttgtctgaattataacaatactatttggtgatgaaatgttttttatataggtcaaaactcgaacaatatatacgaatggactgcagtgatccggggtccagatggcactccctatgaaggtggcatgtttaatctcagtattaagtttcctacggattatccttttaaaccacccaaggttggttatacacatatgctattttattttttttctgaaaattgtttcctaaagattttgttgtttataaaagtaaatatgtttatgtatgtattacagtttacgtttaaaactccgatttaccatccaaatatcaatgatgaaggatcgatttgcatgaacattcttaaagacaaatggactcctgctcttatggttgaaaaggtttcaaactcgattcagatattttgtttattgtttttcgaattattttaggcatttaagtattaattttggttcataaataattttacaaacaggtgcttctgtcaatacttttactattggaaaaaccaaacccagatgatcctcttgtacctgaaattggacagctcttcaagaataacagattccaatttgaccagagagctcgagaattcactgctcgacatgctaataattaaaatttataaaattatttatcttactttcgaagtttgtcatatcgtatttattatacataaacagcttcctatcctatgctattgtcgacatcttttctattataaataaaagtcacattcttcgattagatttttcgttcacctcaaaatgaataccaaactatttgaatcaagacatgaatatcctatttgtacaaagaaaaaaaatgatcttttctatagaagtgtctcttttttattttgccatacacgttgagaataaatgatcttttatatagaagtcttttgcttttcttctgatccttaaaacaagtttagattttattttctatcaaactgttatgaaatatcactaagctcttttgacaaaaagaaaaaaaaatcagtaattaagcactaaccggaaactcaatttgaacgtaatgttaatcttacttttatttggattctcttaccatccacttgcacattaatcatgttttagcatatgcatcaccgtgtccaacatgaaaaccaaagaaatacaatacaattaattcggttcggtaatgtagaaaaatttggaagcaaataattgggtcaaaatatactttttcacgtgactctcgtaattgtattgtgattttatgaaaagaggtgcgcttgtaaagtaatattcacggcttttgaagattacttggtggaggaaaatgatcaggtggacaaggaatatattaacactaaatgtttagaagtcaaaaagatg

SEQ ID NO: 14276 - DNA, 3000 bp, Unknown
  misc_feature (1)..( 3000): cDNA_ID_3015679_gDNA_ID_2684097_Annot_ID_190165 3000 nt of promoter + ATG
attgaaatagtttagatattcaaaaagaaaaaaagatactcagctacaccaattaggacgaaacatatggtcacaaatgcaaagtttagaaatgtacaacgaactaaatgtattgcatgcccacatatactaaatatatgatgacatgtggtcaacatcacaaacatttttccgatatactaatcgtcaaaatccagtgttgaccataattgaccggcattgacaaacaaaaatattttgtatttttttaaaaattattttattgaattgtttatagtgttgtataatttaaaagaaaacatattatatatttcccataaatatattttgtatatctattgaatacattgattattataattagatagtcttttcaatttcaaaagtaaattaaaagtgaaataaaaaatattaagcgaatttattgtttttacattgtcaataaaaaattagcgtcttattgtacaaatgtttttactaaattcgttatcgttaattttctatatattaaaaataaaactttgcgacctttttttatttagactaaagaatatgtaaatttttctctatttttttaactatgtattatgattttaattttggcaaaaaactttttttttaccatgtaaaatttagacgaaagaatcttctacttaatttattcctaatgaaattaataaaatttattttcatttcccttttaatttagcttgtaaaaaaataaaataataataagaatcatacaaaatatattttagttaaatatagaatgtgtttatctattatacaataccataaactattcaatagaatgttttaagtaatattaaaaataataaaaattcatatatttgaatatttttgttggtctatgccggtcaacgacggttaacatcggaatttgacaattcgtataccgaaaaaagatgtttgtggtgttgaccacatgtcgtcatatagttggtatatgtgggcatgcaatacatctaatttatgtagttggttgtacatttctaaacttggcatgtatggccatgtatttcattatacttggtatagctgaatatctttttccattcaaaaataccaaaaatattaaaataaacttggaaaaatatcaaaaatattaaaatatccgaaatgcccatatatatccaatatacatgaaaatatccgaacagatccataaatttaagaaccaaacaggattcgaaccggaaattttgtggttcctatatagatcctacactctaaaacagaaaaagtcggaaccaaaccgaatacataatagatgtatacctaaaatcgtataaaatactatcctcatacttcatgagacaacatgtatggctgcaagtccaaaatggacgggacactgatgggctacacagtttttctgtaatcgataggagttaattaaaatcattttatttgctgtcacaaaaaactagcaacattttattgttgatactaattttgtatattttatttaattgatgttttaatgtaaataacaaattagtatattatttattgatgtaaatatatagatttgtatcaaaaacattttataaaaacattagttattataattgatgctaatcagctatatttgtcatatttatacataagtgatttaatatagtatcacttagttttgtagtacaatttaagtgatttaattcaacttttttgtagtacaattgtagttgcaccaacgaagttggaaaaaagattagagcacatcttattaaatcaaatttaaaccacactcaaaaccaaagatgtatatagttcaaatttacttcttatcgtactgataaatctacgtttatttcttacatctatatacaccaaatctttttaaaaaccccacacattttaaaccttttaatgtgatgtgaagctatgactccatgtgactggagttaggtctaggaaacaaaagtaaataaaatggcataattcaacgttttctgcccaaaaatatcactttttcaaaaaaaaatctaaactgaagtatttattctaatagatgtgtgattacatagttgagagattgcctaaaataccaaaaaaaaaagatatttgatttcgtattccaataggttccggtcaaatgaaaattttcttaaacgtccaaaagaatttttcggaggctcccagtaaattaaatagagactggaccacgaaaatttgcttcaaaaattaatgttctaatgttttggctgagatgatgcactagttataccacaattttcggtatctccatatatgtatatgtacactctatgagtctgttcgctcaaccttctgaaaatctcaacaatattttctgacaacgcacggttccagatgatgaaaaaatattatattttatctacaataataatttaaaaagttacaaataataataatttaaaagatttttttttattctatcttatcaaataatatcataacaaattttttaaatattttattattatatatatatatatatattaatgaactaaaatatgagaataactataaaatatttttgtatataaaaatatatcaaaattaacctcttaaaataaatattaaatagaattaattttattctataatcatgatgagagagaggcgatttttcttgcgatcgtatctcttcatcttcgcctcttctttgtatcgtttcttgacaagcggttgtcgccggttatcggcggttccttcagagttgatcaacggtattacagttatcaatcgcataactgacgctacccaatacctatttaaactatgtgaatgtctctggagccaatgggttgatcagagtgaaataagccaatttcctttgttcatattaatcatggcagactgcaagaaattgcactaggaattgaagatgaagcgatcaatctcccttttgatttgtgtgaagaggcgattagctaaacccgctatagtctaattgtgaaaccggtgaatccaaggaagcagaacttacgagca

SEQ ID NO: 14277 - DNA, 3000 bp, Unknown
  misc_feature (1)..( 3000): cDNA_ID_2181175_gDNA_ID_2684097_Annot_ID_190176 3000 nt of promoter + ATG
aaaaacccgtggaggagaagaggagcaaacacgaggacataaatgtatttggttcaaatattaaatataaaataaacttttatatgtataaatctatgaataagtatatgtaatttcgggtaagcggatactctttcgggtatcgggttcagatcgtgttttaccctatacccacgggtacgacaatctaagacccaatagggtaaatagctaatacccatacccacctcgaactgttttttttcgggtcgatttcggttcgggttttcgggtatgggttttttgcccaggcctacccgtgatgagccgcggtatacacgttccgtattccctttatgaggcttgcatttctatcgttcatgaagaccaattcagaagtatcgggtacaaccgtttttagcttctccaaaaaccaatcccaactagcatcattttcacctttgagtacgccaaacgctatgatgtaatggtaatggttagggtcttgagccgaggcaaatactagcacaccaccattcaaatgtgttgcatccacaattataactttcctcatcactttaaagccttcaatgctagctcccaaagctatgactaggtactaaaatttatcattctcatccaatttcaaatatgttattgtaccatcatttaccttcttcaacatgtacaaataactattgatatctttttagctttcttccgggctaccttttaaatcacaaaccgcattatatttcccccgtcgaatatgatactttcacacctaatttcgtcttaaccagcttcatgataacccttgaaacctgagtttccaattgtcccgaaaaatgatcatgaagaagagttgcgactaattgttgattgcctttccttttcctgatcctactactatctttacttagccgagtgcaaatttgcatcttattgtaccttctaatcgagaagaatatctgtattacagatatttgacgctcgtaaactctagacaattgttcgggcaattgctccggcgatttaaagatctcctccacaacaaaaacagttcttgcgtttttttttgcggatgttacataagtaaggacatcctcatcatcataaatgttcatctctttccctactccgaacaacggtgggttgtacctcatatgcaatttaaccttatttccatataatccaagcttcgtcaatatcctatcttctaatatggagatagttatcttctcccctaatgtcttcatcatcaaactatacatgcgaccttaaaatagatgatcaagttctctctcattgtatcctgccaaaacaatacacatactcagtcaatattactaatattaccggctctactacattttcattaatactagtcctaattatgaaatactacatgtgtcagtaatactaatacataaatgaaatactatatgtataagtaatactaattctattaaaacatactatctatatataaaaaccaattgtttaggtacaactatgcctagttagaccagtattattttcgcggcaagaacaaagattggattcaagttcaattcagtacgaatcagcatgtgaaatcaaattcttatccatttgcagaccaaatcgaccctaaaactatacttaaacttctaatgtaggtactaaaacacaataacccaaatctaattggattgaatctcaaaatcctcaaatcctaagtgaaagctctttgtagttctagaaacatacatgaactccgtatctcgatgcagcttgcaggaagagaataaacgacaacaatgcagcagcgagagagaggtgtcggagctcgaagtcgttggagaagaaggagctttaaacatatcgaataatttcttgattcttttttttttttactctttttttcctttttaattttaattcaatttcaattattcataagggtaaaatagtattctcactaatcattaaaagagaaagggatatgtagagtagaaagagatttaagaagttttgttgtgtttaaagggaacatgagagctattcaaaaacgaaacaaatttttttcaatggtttcctttattttctacttcaaaaataatattttaagtatattctatctctattttataattaattatgaataataccctttactttctaaacatatgaattttgacctatttatttgatttcatttagaatacattattataaaaaaatcacattccataacatttatttaaagtacgttgtttttccatttaatataaattattttttgtattttagtttgattggattaaataaaaataaatagtttgtttaataaaaaaatatactttgttataattttaaggaccattttgtaaataaaaaagttcattcaaaatatgaagatgtgaatagtataccttcaaatatgaagatacactattgaattcttcattttgaagataaaaatgaagcaccattggagaagatttctctatcttttacttcaaaatgaagaaaaatgtgaaatttaaagcaccattggagatggtctaaaaaagaaatttctttatgatttttttatcggtaaaagaagtaaatgactcaaaaagctttaaacatatcgaataattatgacccaaccaacctaaacggatcgcaaaattacacaagcccattttattcgggtcatatctaataaaacctaaataaaacactttctcactttttctctatggtaaaacagatcgacgacttttttttttccctttcttccttcttcttttagagaaaacctaggtaaaacatatcgtcaatcttcgtcaatgccatttgacaaaaacagatctatattcatttctcttatatttcttcaaagtcgatcttggtaatatttgtcgaaaactaagatattgggtaagttaaaattcgagttatttcattttgggttttgtgattgaaattaattaaagtagagtaactcgaagtgctaatccaaatgattttgtttgtaggtctggagta

SEQ ID NO: 14278 - DNA, 3000 bp, Unknown
  misc_feature (1)..( 3000): cDNA_ID_2729762_gDNA_ID_2684098_Annot_ID_137068 3000 nt of promoter + ATG
ccctgaaactataaggaaatgaattgcattgatctagtgtccactttgttttgcgggatacattgattttatttcataaagtggatgtaatttttcttttacttaatgagtcatgagtaaataaataaaaacgctacaaaaagtgatgcaaatgttttgaaccttgttaatgatgtttaatgctgtatatttggctaaggtcatataacataacatttggtgatttataatgatttatattttggtaactaatttctcatgcatatatcacatatagaaagatatgtctatatatatagaaagatatatatatatatatatatatatatatatatatatttgtactccatttgagggtattttctgataaaatatttcatagtcattcacctaactaagttccagaatttggttatctacctaattgaatcttgaattaagattgattatttatatataaacgaaaaagagtacgtatcctatggatatttctataattccaaaagataatttaggtggccttaataattactcttgcttcttcttcttctttaatattttgtatatatttttctgtcattaatattttgaaattatgtaatgtaccatataaacttttgacattatgttttcagatatattcttctgtggttacactaatattgatttgttttccgaaaggcattcaaaaaaaacaaacgaaaatagagagaaagtcgccctcgaaatatacgttgcttttcttttcttatgtgaagaatagcttcttcttctttgtgtctactataaacactaataatctttttttaatatgattatttttatttatttttgggcaaaatgtttttttaatatgatagtattactatatatttaggttgatcggaagttatatcctctctcattggcctatttttgactgttattttctctatccaaatatatctatcaacattgaatcctgccttattttatcgattcccaaaacacagcttaaccaatttggttttatttcagttaagttttcggttcacaaccaatatgttggagtgttactaatcagatagacgggtaaaataaattgtttgcacaacctattcatatagttaaaataagcgaatagagagataattgaaactacagtgaaaattaacaacaaatggaacatacgtccaagtagttgagacttgaggagtagaaagacaacgtaaggagttgacaaacatgtgagccatttgagactaattcacagacaactaaaatccaagagttatactagtaaatgctttggttattttaatatattttcaagtcgtctgcccgttgaaaactggagaaaatgtatatagagtactattcagctcgaagacaaaaatgtagtgactaaaattaaaatgcttaattggtcggataaacaatccaaaataaatgggaaatgagttttgagttgcgatcgtatcttgcattacaagaagcaaattttagggttaaagtttctgtcacataactccgttacacaattcgcttaattttggatatttgacagaaactaattaatatgtaaactttaatatatatattggattttaggcaatttaacaactaattagtggcggacaaatactgattattttccctttatatatatatatatatataattgaatgcttctatatttgttattttgttgtcacaatgtttttttttttaaaaaattaaatttgatatccttcagtccatcactagttaacaacattgccaaaatatactatcttttcgtcgaaaaaaaaactcaccatacaaactaagtgatttttcagtagtttgtgatcaatgcaaaaatgataaaattaatttaatgtttacaaagctgatgttgggtcgaaagacttggacgtcaaggataacatttggttctaaaatatatggacgtgaaagatagcataccatctttgggactgttcggataagaatgtgtgtgcattagttttggaaagtgtttggccactcggatctttttgtgataatctccagactatgaatattgcggaaatataatccatgatcagagaatatttggcgatgcttgatccatgaccgtaattggagccggatatgttatgatttgatctacaactattattacgctagataagccaattaattatggtaggtgatcgtgaatataacttcactgtccgaaaaagaatagtgtatatgttgccctgaaccatctatctcattaggtgctatgaactagtgagttttaagtatagagggtgcatataagtcgtttttccatcttaaatcaaagacatttcttagtatcttctagatatttcattcttttagtaccatataaattagggatttggacaattcacaattatttattttaaaccaaacaaaataattgttctccgataatcagatgtgacttatgtgatatagtacatataaatatacacactgtttaaatttgtctacccaatcggaatcatagaaactttattgtttacccaaacaaaacggtactgaatatcggaactttttttattaaaaaaaaactgtgagagagaaattgaatcaacgtccaagtcacttgatgcaagaaaaaagcgaaaccaattaaattcccgtaaaaacagaacacaaaagaacaggagagttaatgttctaactgacacgtgtccctaccttgccatacactcacacaattaaaatttctaactctgtctcttatccgaaaaataatcatctccaagtgtaataagaaaatcaaaataaaactctcatttcttcttcttcctcgcctataaatacaactccattctctcatctcctacatcacaaaacaaaaacctcacttaaaaaaaaaaaacagaagacagaaaaaaacaaaaaaaaaaagaaaaagaaaaataaacaaattttcttttcttttttttcctctaaagtttctattttgtctattcgtgtttttttttttacttcctgata

SEQ ID NO: 14279 - DNA, 3000 bp, Unknown
  misc_feature (1)..( 3000): cDNA_ID_2729758_gDNA_ID_2684098_Annot_ID_137069 3000 nt of promoter + ATG
gccgaggatcaccggaaaaccgccggtgatttagccggaccgagcgctagtgttaaagctggagctttaagtctctttgctgttcttggtatcccattagctgtaagtacacttttgtgttgtcttgttaaaaaactttttgctttgcttaaactaacattaatcgattcgttttttattatttacagattactttcagtactccttttgctctagcatccatattctcaagctgctccggtgcaggccaaggtaaatatatacatctttaatattaaagttactaaagttacaaatatgtgggaccgtaactattatattttggtttcatccaccttatgcaattataacataggtatttaaattgtttttgtgatgttttgatttacaggactttcattaggagttttaaatttggcgattgtgataccacaaatgatagtctcactaggaggtggacctttcgacgccttgttcggcggtggaaacttaccggcgtttatcgttgcagcaattgcagcggcgattagtggagtattagcgttaaccgttttaccttcaccaccaccggacgcacccaaggcaacgaccatgggaggattccactagtttactattttttttttttaatgaaactcatcaaatacagtattactgtgcgaaactgcaaaaacccaaataaaagaaaagaatggataaaatgataaaatctaataaaccttgggtcgtctgtatttcacccttttttagttttttttcttctttttttataacttttgtcacttattttaatttgaaatagaatgttttttttttttgcccttaaataagatttgtgtgttgagtacaattgtttactgtttgcttcggtagaacaaatatccaactagaaagtaattccctctaccctcagaaaagaaaattttgataataatgtatggcaattcttttatatatagggaacaagttgaacaatttatgtagtttagaacggtttaggcgataaataaccattaataataccagttaaattaattaatatgattaataattttaaaaatacttattaataaatattaaaacaattctcatgtaagtacataaaatataaacctagaagatattaaaatattaaatattaaataagaaaccttaaatattcttgcaaacaactagtccaatcaatatgacatttttgtattctataaacacactgtattataatataaactatacagtatgtttcttagcacagtatgacacttaacaacttgatgatttatactaggcaacaaccaatgtttttgaagatcatacaatatcatttataagtatatcattttttatattacaaaatgaaagattgttttggtcaacaatatgcgggcttgaaccctcagtggcgatacaacattttacatatctatatataagttttttccaccaatttttagaatatttgcctaaaatataagaatgtttatactgcttaattagtgagtaagaacaggtagtccatatccattttatacaattcggactcagttgtcacgacttcgttaattggcaactttggcaagtatgttgatttcagaacacatcgaatcaacaaaggacagtctattgtgttaagttgcaaacgatcaaaacaaggctggcgtaacataaatgaaggcctttgggctaaataaatataatagatacatcaaaatacaactttcaatttggacagacttgaagccttctataatttggcctggatcaatactccttttaagactaaggtgtatcagcccagtcttttgatttttgattattttttttgtaaaccgaggcaagatttttgataggcaataatcctactttataatacattcggagtgtgtattcaattaaacattttaaatgatttgtgttaaaataacaaattcagcctcacaatttaatgttaaggatacaatcatatcatcctttcattacctcttatgcaatttaccacaaatgattgaaacctcttattcaactagaggttttgaaatattgatatatatatttggattttgtaaataattaaggtttttaaattatgtcatttaattatttgaaaaatgagggtaaataagattttgtacatgactttttttaaggagttttaagtttggcaattgtgatactacaaatgatagtagtgtgacagtgtcaccttggattccattaattttctatgttcccttttcatgaaattcatcaaatagacaaatacagtattattgtgcaaaacccaaataaatgaaaaggtaaaatctaataaaccttggaccgtctatttcacccttcttttagtcttcttactgactttaatttgaaatagaattggtttttgtttttggccttcagtaaacattgtgtgtaactaaagtcttcttttgttaacaagaaagacccagaagatcacactagagaaaataagtcctttttatggcacttctttttgaattagatgggggaaaagttgaattactttactttatttttatttaggtaaataaattacttaatatgacttcaaaaaatagacattaaataaaatttgttaaacttaattaatttgatatttgattaattcaaattacttagaaacattttaattctcatgtaaagatactgaccaaaaaatattaaaaagtatatactactaaaataaggacgtccgttaaattataaaccttaaatattcttgtaaacaactaagtttagtcaactaaaaaaaacaaaacaaagaggagttaatgacctactgccacgtgtcctcacattgtcatgcactcacacaaatgagatttctaactgcgtctcttatctggaaaataatctcattccttcttcttcctcgcctataaatacaactccaatgtctcatctcctacatcacaaaactaaatccccactttcacaacaaaaaaactcttttctttttgtctgctcgtttttcttttcata

SEQ ID NO: 14280 - DNA, 3000 bp, Unknown
  misc_feature (1)..( 3000): cDNA_ID_2729754_gDNA_ID_2684098_Annot_ID_137070 3000 nt of promoter + ATG
gttaccacagtgaccgatgcgagtccagattcggtcgccgtcgtcctttcattgccgccggagtcgcactcgtagccgtctcggttttccttatcggattcgcggcggatatgggacatagttttggagataaactcgagaacaaggtaaggactcgagccattataatcttcctaaccgggttttggttcctcgacgtggctaacaacaccttacaaggaccatgccgtgctttcttagccgatttagccgccggagacgctaaaaaaacgcgagtcgcaaacgcgtgtttctccttctttatggcggttggaaacgttttgggttacgctgctggatcttacactaaccttcacaaaatgtttcctttcacaatgacaaaagcttgcgacatctattgtgcgaatctcaagacttgtttcttcttatccatcactctcctccttatcgtcacattctcgtctctatggtacgttaaagacaaacaatggtctccacctcaaggagacaaggaggagaaaacatcaagtctttttttctttggagaaatctttggagctgttagacacatgaaacgtcccatggtgatgcttctaattgtcacggtcattaattggatcgcttggtttccatttattttgtatgataccgattggatgggtcgtgaagtgtacggtggaaactcagatggagatgaacgatcgaagaaactttacgaccaaggagttcaggctggtgcattgggattgatgtttaattctatacttcttggtttcgtgtcacttggtgttgaatcgattggtcggaaaatgggaggagctaaacgactttggggatgtgtgaatttcatactcgccataggtttggccatgacggttcttgttactaaatcggctgagcatcaccgggaaatcgccggtcctttagccggaccgagcagtggtattaaagccggagtatttagtctctttaccgttcttggtatcccattggccgtaagtacacttttgttttgtccttttgttttcttcacaattttaggtttgtaaccgattcttttttcttgtgtaattattatgacagattacttacagtattccatttgcactagcgtccattttctcaaccaattccggtgccggccaaggtaattttcatttatttaaaatgttaagttacaaatctaatggtcagattctgataatgtaggacatattagcatttattgagttcaaacgtttgatttgaataattaattgaaaagattatgtttccaattttgtgtattattgtatctatctattcaaaagtaattctttcctttattgcataggagaaaaaagggagtaaatatttcctttgtaacttttttcaaagtcttttcttgttaatgtggattatctaccaagtttatctatagcatttaatagggtgagatttattaacttaattatattaattaagatttctatgtaatctgctcttatattttcattatccataggtttcatcattcatgcacctaatgtttgaaacgtagacagtttcttttgcaacataagtaaatatttaaatttaacgaaaacgtgtttctttttacaggactttcattaggcgttttaaatatagcgatttgtataccacaaatgatagtatcattctcaagtggaccattggacgctcaattcggcggtggaaacctaccttcatttgtggtcggagcaattgccgcggcggttagtggagtcttagcgttaaccgttttaccttcaccgcctccggacgcaccagccatgtcaggggctatgggattccattagttaactagtttttacatatatatgaatttccatctaatacagtattgttgtgcaaaagtgaaacccccaaaaaatggataaagtgagaaaaataaaccttggtcgtctgtcttttactgttctttagttttttttttttttttacttttgttattgatgttagtcaatttgttttcgttttgtttggacgttaataaattctgtgtttgactacaatttttttactgttttttttgcttcggtgaaagaaagatccaactagagaaaataatcccaaaacaaaaaatcaacattcaaaatctgagctcttttctaaaattaaattcaaaacatgaacttattctatgtaattttttttttttgttttaaagacatggccaatgggcctttcactcttgtcaaacccatttgagtcgggctttagtcataactcattttaaagattaaggaatatgaggccagttcttttgtcacaatcctagtttaagcttgtctcacttaccaattacgtctctcaaaagacaaattttaaaaaatctataatctctactctctaacatgtatatatatatgataaactcgttggctattacaacttttaaatcacaaatggcctgattggaaaaaaatgtatacataaatgataagtttgtcactgattaatgcgagaaaattctaattatttgcattaataaaattagcgtagttaggttttaaaaaggtttatacaatacattatacatatttataaatttaaatgtttttaaatttatattaaatttattttattatttagataaatcttaaataaaaagaaaccaaatattatttgttattttttcgtgaaatttatctttttaatatattttttattttagtaaaaagaaggaatggtggcgccggaaactgaccgtagggtcagtctaattactctctcagcgtttctctttttggtcctcaaatcttcaccttcaagatcttcttcgtccctcgatctccgatttcaaatctcgtttctccgttcaagcaacctctctgaattcctagtctcacagcaggaattagtactcggcgaagcgatttctgcttcgatctctacatctgaagttccgatctgacgaaatttagggttcgtctgggtcgaagttaaataggaaaaagatttcgaattggcttgaga

SEQ ID NO: 14281 - DNA, 3000 bp, Unknown
  misc_feature (1)..( 3000): cDNA_ID_2729746_gDNA_ID_2684098_Annot_ID_137072 3000 nt of promoter + ATG
caaatggttcaagaagatcgaagaaggaaagaggagcagcgaggatgagatcatcttctccaatatcggtaaatatgctgtgagttcaagcacacgccattagcacacacccacgcctaaacccttggtgtgacagttaaaattttataaacaagagatgggttttgcctaaattggtcttacaagcatctataactaaaggtttcaattcaagatttgcattattttttattgaatcttctatttttcttccttagttggtttgaagctttaaaccctttgaaaaacaagaaatggagactttgaaagttgacgaaacacacatgttttattattagtcaatagtaatttgatgaggtggagttataacattgatgataatagatagtgacaacgttctatgttcatcttttcctcaatcaatcactccaccggtagatgagatgtcaaattgaaactgcgttatgtcactctcattactctttttgtatacgtttctcatcttatagctaatccgaaaccaatttatttaaaactttataatagcataaaacctcttaacttcaaacaagtttcaactttcacatatcttatagggatcatggtaaaaatggttaaaagttaaacctgatttgcattacaaacagaggattacgtgtataagggctataaactatatattacctaaaaaagaaaactagagttgacttattgagtaataaaatcgcctataaatatcgtaacgaaagaaaaaagatcccaaaagagacaaaatattaatttgttaccatagttacagatttctttcgaataatcaatcaataaacaaaactctttctctacaagtcctaaaatccttagagaaagaaagaaataaaatagaataagagaacttgttgtagcagttgaagcagaaaataaacagagtaacgaatccaacatcacaaaacaaaacacaaactgtgtgttgtctctcttctttggtcttctcttcttcttcttcttctttttctttttaagtatttttattttttggtttcttgatctcagaaaaaatggctctgaatagtgtctcctctgaagaatttaccttcccatcgctagcttctcatgattcttctcaccattccggtcttgattcacctcctttgtggaaacactcaccggttacttcctttcgccggaaagattacgactttggtttggcaagattagtcattggaaaagacggtgatcatgatcagaggaagagcttctcgtacgtggagatgagaagtcgttggatcgacgacaaagaagaggagaaaatggatatgttatgggaagatctcaacgaagaattgcctccaagaagtcagagtttgagaattgtacatggcggcgacggtggagagaagaaaacggctttgtttcccgatgagagctctgccgtggccgtggggtgtgggatgaagttatcgaagaagacaaagaagaagacgaatctgaacgttttggtgttgatgagggttttgaagaagcttattgtgttgcgaagttcgtctcagaggtcgccggtgaaaactcatccacggtgattgatctccaccgtgataattgtgaattggggggttattttgtggaattcagaacttacggggcttttgtggagaaaattggaattgtctgaaaatgatttatttgtagtttagtttgggtggttcacaaaaattaattttagggtcctaaatttttaataacacatctgaagtcttttttggttcttcgtcttgattcatttgcctgttccgtggggtttggtttgaatatgtatgaatttataagatgaaaaatgaaagaggtcagaatattagggtgcaataataaaggaaggtaaaaaagatttgtatttgaaacattccacttgtatatgatatcactttttaaatgtgtgataaaaaagatttgtaacatctaaaacttttgggggtctttattttaaaatgagtctttatgaaatacaactttagtctgaatcaaaaaggttttctaaaaatgtcaaaatgtttgtagtcttgtacacttactcactagtcacttggttcatgccacgaaccgacctccctaaaatatttctccaatttgttttctctttaagttcacaatagtagagttttgttttctccctaaaagttatttcgaagaaaacatgttttttctttttcctttttaataaatcgaagattctaaactttagtctataatccctcgaaccgaaaattagaatgaattttaatcctcatgggaaaaaaaattgtacagtagtttgttcttctctttatactaacgtgaccaactacttcttggtttaaaacaaacatgtttaaattatcaatttactaaaactatgattctatagtaacatgtgaaatgagaaacatttcaatgtcaaaagtctggtccaattatcgaactacataaaaacattgtaataccttttatatatatgaagaccaccattaatgtcgacagaaaagatagccatgaatcatattcaagcatcaaaactgatttaggtatctccggaatcattgggagaaaaattaggtgaccttcatatgaaaaagatagagtagacttttttatttaacactacttggaagactttcttacctactctcactatagacccgattcgtcagaaccgggttttggattcaatttcggataacccctaaattggtacgccaattctcagtcactcggaaaaaaaaaaaacctcacctttgtccacgaatcgcaagtgggtcatagaaaaatcgaagcttttgactgatctcagtcactttagtctctctgcccacgacccttctcgtctactaagggttatctccatttgcccctcttcctgacaactttcaggtattacttgtcaataagatgtgaaattgagtatgtgcatcagatgtttcctctagattgaactgattccacctttgatatgcgcagacacgaaaactg

SEQ ID NO: 14282 - DNA, 3000 bp, Unknown
  misc_feature (1)..( 3000): cDNA_ID_2729742_gDNA_ID_2684098_Annot_ID_137073 3000 nt of promoter + ATG
tatgattagagaaaggaaaattagggatcgagggacatttatataacgaaaaaagtgaatggtgtgaaagggttaatggatagatggtcttgggatttgaacaaaaggctctctctccctcgcgcagtagacaaataggcatgcatgtgaatctgactccaaatcaagtgctacctcttttgccttttctatttttggtacccaatatttgttataattttcattttttctgttttatatatccattctcctcgaattctgtgtctaccttgtcatatgttaagtattttggatttttctttggactagggtcaaagagttactgagatgacgtcaccttaagccgaaaggtgatgaggtaaaagaaacgacagccaacggctttgggtggacccgtgcaagcggataaatcagatgaggaacaaatgattagttatgtgatagaaacaggtctgaatcttacgtgtcttacattcgtaatgacacgtgttaaggacggcgccaccaaaccagacaatgggagctggattgctggagaaagacttaagaacatatgaaacatattcctgtgttttactcttctccttattttttctttcataatataatgttcatatatacacgattcctgatgttttaatggccaatgttcgttcctttaggtttactataaatctgagtttagtttaatcatttaagaaaaagttgagattgtggtttcgagtggatctagctagactcacattataaaattagctgcggtggtatattgagtgagatttacgtagtaatccataaatgtacatgcgtgtaaatcctttcgacgttgagatgtttatatacttaataagttaatagtaatatctctttgacaaaaaagttaatagtaatatctcaacaactttgaggtattacgtgtcttatctatgggttaataagacatactaaaactaagacacatttcatcagtacctgatccagcaaacatataggaatatatttctgtagttcttcttcgggtttacaaatccagtcctttttaatccttgaattgtgaatttccaacaagccactcacaatttataactaggttttattactgaaaatatcttacatggtataagaatttatggtgtgtagctgaacatagtgttttaagaaaatagattaattatattcaaaacgtaatttttttgtcatctgattttattgataatacatggaatcgtgttatgaaatattatccaatcaaactgaagtttttggatatattcggaacatccatttgacctaattacgccacataaaaaccgttaatctaaaggatttgtcttgtgtgatgtaataataactaatgagcaatagacaaataaaaaaaaggtttggcttgtgcagtaactgccggtaaagtggagaagattggaaaaactttaaacaaaaaattgcggtaagagagagagagagacgccgaccaaaaacaaaccgtagatgtctatcccacgcgcaatcaaacctttccttcatctccttcttcttcttcttctccttcttcttatatcatcattttgcacccacatgtcacacacttaccatatacatataattaagcatactcgcataaacctatatatacactctaagatttctagctggtccatatgcatgtgatctaatcaaaagccaaactctccttgtctttgctatattaacaatcatttgatccacaccaccagagatttcaatcttcctctccttcttccttttgctactctcttttagatcgttcttgtgaaaatcgcttgcaaataacaagcccttcgtccaatctttattagctcgtaagtttcaccccattgctccttttagggtttttttgttttgttgctgtactcacttcatgcacgaaccagatgatgatacatcggcgtttgtgttttacgtttttattattcaaaaatacatacatattacatatagtatcgttttgtatcgtttcatatcttgaatagtatacatgtgtgtggtcctgttgagattgacccacaaatattagagtaaactggggaattgaaatcaatcatggtggggatttcggaatctatgtgtgtttctaagatattattgtttcttggaaattaattgttgttgcaccataatataatttatattatatagatagtctaggaaaataactcaagacaaagagtgtgtaacacactccaacctcagtgacttccacccgtcaagcttttcggctacatagcctttatatacgattattttacatatagttacagatatatacagtactgcttgtatatttttggtcttataatactaccttatgtcattatatatagtacatattatacaaagtttcaatcttttcatttataagcatcgttcggtatgtagaaggcgaaacaaacccttaaacctaatatttttttctggtccaaaaactttctctatcaagcttttgcattttttcttttaaaatagtaacagctcctccattgttgggtggtcccataaaaatacatcataaccatcatcagcaacatataatagcgatagccttaagcttaaagatccaagcttttggatataatatctagttacatgtatatatatatatatgtgtttgtatatttataggtatatagtatattatcgtgtgcgtccgtgtgtaacatcactatcattacccaacatacagcttttggaatttcattggacccaagagccattcgatccctttcttataattaaatataacgaagcttgtaataggctttggttttggtcccaaatacaaaactttaaggttgtgccttgtttgtctaaggttttcgcaatagcttccaaaaagacacgcttatgtttatatacatttcattttccttcatatcattctcttctctgccacttctccatcttgtttcttactcatttctctaacaattttccaaattaaatacgtttataggatcatcgtgg

SEQ ID NO: 14283 - DNA, 3000 bp, Unknown
  misc_feature (1)..( 3000): cDNA_ID_3447302_gDNA_ID_2684098_Annot_ID_190206 3000 nt of promoter + ATG
cgatttccagcagctcaatgacatttaccgttacaagacggaggagtactctcacaccgcggtaaacaagttcaacgtaatccctgactccatccctgattggatctttgacttcatgcctctccgaggtggctacttcgttggaaatgtcagtcccgcccgcatggacttcaggtggtttgcgttaggaaattgtatcgcaattctttcctcattggccacaccagagcagtccatggcgatcatggacctgattgaggcccggtgggaagaacttgtgggagagatgccgttgaagatatgttatccggcgatggagagtcacgagtgggggattgtcactggctgtgaccctaagaacacaaggtggagctaccacaacggaggctcttggccaggtgagttaccttcttttacaagtcattgatagatagttaatgggatctaatgggcattaagttgtcaaaattaccgaaaacattatataaatataatttaaggtcataaaaaacatgagaaaataaacgaatgcaaataaatatgatatagatgctaaacatgagcgattgaagagtaatagtatagtagactaagatatactatatgattagggaatccgatgccgaaaccgacattaattcttggatttgtttgccgtctatgatggccaaagaatattcaactcttaaatctgtttgaatttttggtttgtccaaaaaataagcagagtttgtttttataatatctttattgtaatggtagaaccaaaacaagatccacgtaaatactttcattcaaccctattttctatttctaacgccacatttgattaattttgttttttgtttggaaatataatcattcaatcaatattgttgactcatgtggctgatgcaaaatgtagtgcttctatggttactaacggcggcaagcataaagactggacggccacaaatagcacgacgggctatagagttggcggaggcacgactgttgaaggatggatggccggagtactacgacggaaagtctggaagattcatcggaaaacaggctaggaaatctcagacatggtcaatcgctggctatttggtcgccaagatgatgatggatgatccaacgcatgtgggaatgatctcaatggaagaagagaaacatatgaaacctcctcttagaagatcttcttcttggacttaaattatataatttcgttttgtgtttttttttcttcattgtagggccttttataattaccattaacagaaacaaaaatattcatagctcccaaattaactttaatatgtggaataatcaagaatggttgtcttgtgatcactatggtaccatggtctactacggaccaccaggtaataaggcatgggtttagaaggagtcattgactattgacgaatcaaaagtcttacaagacacaatccgacagaaacaaattagaaaaagaagaaaaagacaacagagtacgaccgttcgattaatatcatgcatgtacttatacaaccctacacttccagtaatttttggtaactttaccaagtcaaacgcagtataatctcttatgtaactactttgtgatacttgaggttatggatattttcgaatatgtctatttgagttaaaataaagctacggcctacgtcacatgtcatttaaaaagaaactaggttgaaattctgtgctatactaaactaaaagatgatacaagaatcaattacttttataagcaaattgaaaatctcaaaatacaagatttcatataccattttaagtgcatataggtagactaatagaaaagcaggtgaaactctatgagcctataatatataaactttgtgattctttatccacaaaatattaattccataggccatagacactttagatagtgtgatacaaaatgagcaaaccctaaatcctattgatttaaggtttctgatcgtacaacttcggtcaagttcatagaaaaactagggaaaagattcgtaaacaataatatttttctctgaaaatcatgatcaaattctaaaaaagagagagtattggatcgcactttgtatactttaggcttgacagggtcaacgagttgcttttatgtccttgttttattccagattttcggccatttacttttttttcttttctttaaattcttttggtgggaaaaacttttttcttttactggtaaagtaagaactgttttatctatatacattatcatggacttaaaacttgaaagctgaaatctaaaaattagtgataaagtttggacgaaaaattagcagttaactaaaatgatttgttttgagaccaaaactaataataataatcaagatctagctttttttcatgtgggaataagaataataaaaaggaggcaaaacgggttgttgaggagagtgattaacatgaatcaccgctcaccagtaacgtctttatcgacaaaaaaacaatttaaaaatggtgagtggattagtattagcaaccaccaaatagatttaactataataagataactaaactaattagctgtatataatttcttttaactatacattaattaatccctctcgtaaaataagtagatatgattgtagtcttttcaagtatgaacaaccaacaaatctcacactaaatatctccttcgcgttaacttaaacagtacacatcacgtagtctttatcaaaacactcttaaggttaaagaaataatacacctaaattaaagagttaattaggtgatgatcacggttaaagaaacttagatgggaaaatcaaggttaaaaaaattcacctaattttatttttattttataaaggttcttaattacatcactgatctataggattagatactctaagaatgttcatgttccattctaattaattatatatttaaaaaacaaatccgaaaattagcttgcataattatccaaaagtaacaatgatgatttttttttttttaactgtgtcaattttaattttaacc

SEQ ID NO: 14284 - DNA, 3000 bp, Unknown
  misc_feature (1)..( 3000): cDNA_ID_3015739_gDNA_ID_2684098_Annot_ID_190205 3000 nt of promoter + ATG
aactcggttcctttgtacaaagaaatatgagcttatgtatatacacgtctctttccttgttattactatctgatcactcttatctctatccgtttgcattgatacgatcctatctagtaaataggcccagtaggcctaattaaggtccagtaacataaactgatttgggctaaagtgaatgaagaaaactccatcccaccgttggccggtctattctcctccggcgtcgttgaggatctccggtggtttaaggaatcaatcacaccatgccaatgagatacctcaacgcaatggccgctctactaatgatgttctttactctcttgatcctctctttcacaggcattttagaattcccatctgcttcaacttcgatggagcattcaatagacccggaaccgaaattgtctgattcaacatcggatccattcagtgatgttcttgtagcttataaaaaatgggactttgaagtgggttgtgctcggtttagggagaatcataaagatgcgattttgggtaatgttagttcgggttctttacaagaatttggttgtggtaagcttaagatgaagcatgttaaggtattggttaaagggtggacttggattccggataatttggaaaatttgtattcttgtcgttgtgggatgacttgtttgtggactaaatcatcggttttggctgattcacctgatgctttgttgttcgagacaacaactcctccactacaggtaataaaattgcttgttgctaatcttgtcaaagtttgcgttttggaaagtagttatagatttggatgattgggacagattagatcacactgtctgttttttcttaccccaaattggatgtgatcttgtgatgtattcttcactctagcagatcttttagttctatgactcactaaaagatactttttcattgttgtctatatggttcaagaattttggtttgtaaagtggaaaatttcagagtttaattgtctacgtgagcttattgtaaaccagaagaatctttgtgtactgctattcttgttcttagtcaattcatttttgaaagttggacatagatatggataataaaggcaaactaaaatctcctatgttcttattttcccttcagtgcctgcttcactatagttttctttcaataattggatcccattgatgctgagtttcttggtttgtttccttagagacgtgttggagatccgctccgtgtgtacatggagctagaggccggaagaaaacgctcaggccgtgaagatatattcatcagctaccatgcgaaagacgatgtccaaacaacttacgccggttcgctctttcataataacagaaactatcacatctctccacataaaaacaatgtaagtaacgttttatacacccattccatactgttcttctttcatttcatcgttttttaattcgattgttaaacattgcacaggatgttctggtgtattggtcttcctcaagatgcctccctcacagagatcgtctagcaaagagcctactcgatttgattccccaccactcctttggtaagtgtcttaacaatgttggtggcttggactcagctctctctatgtatccagaatgtgtcgctgagcacaacgctgaagcaaaatggtacgatcacctccactgcgctatgtcacactacaaattcgtccttgcaatcgaaaacacagctgttgagtcatacgtgaccgagaagcttttctatgcgctcgactctggttctgttccaatctattttggggcctctaacgtgcaagactttgtccctccgcattccgtgatcgatggtagcaaattcggctcgatgcaggagttggctgcgtacgtgaagcggctcggtgatgatcctgtggcttactcagagtaccatgcgtggaggcggtgtggactaatggggaactacgggaaaacccgtgcggtgagtctcgatacattgccatgtcggttgtgcgaagagattagcagaagaggtgggaagaacgccggagtttgatgagccacatgtggtttcatttagtgtgggtttatgtaaatgtgatcctatgatctgtttctgttacatatgataacttttttgtcctatatagtctcagatcatcaagtaaatgctatcaaatcatgtgttcaagggacaaaaacagaattattcacttatgttagagttaaatgggatctcttggtgtagcttttccttaatcaaaaattcaaaatagattatgattgtgattgtgtagactaagttaaaaaggacaaaaatcaagtcataaccactttcctatatttacctacaataatcagaatcatttaaaacttatcaaaactaaaaccattcaaaatattgggtgaattaaagtttcgattgtttcaaaacgtctgtataagtatgacaaagagacatcaaaattcagattattgtcacatttttatcaccgtaaaatcttagaagaaagaaagataattttttttttttttttttaatgataatcaaagatattatgttagtagtaaaatagagaatggaaaaaataaattaattacatagacaaacgtgtaggtcataaaatcatttggtacatcaaattcatacatgggtcttctggtattatctattaacagctttaggaaagaaatatgagatcagatttttaggctaatcaaacaaaattttctataaaaccatcatatacataacaaatatgcacaagaagtgcataagaagaaagaaatcaaacagaaatgcaaacaaactagatatgatgattggtgatatatatatcttgaaattgtttctatccgcaaaaaagcaaacgctccaatcaacatgttttgccagcttgctaggtctctctataaatattggttccttctcttaacatcattttttcttctctcgagtgttgttaaagtttttgtatagtttgctatttttcgtgaatcaataaaaagagctttgttgaacaaattagctatctcc

SEQ ID NO: 14285 - DNA, 3000 bp, Unknown
  misc_feature (1)..( 3000): cDNA_ID_4254777_gDNA_ID_2684098_Annot_ID_190203 3000 nt of promoter + ATG
atatattgtttcggtttaagataaatgtatcacgcaattcaaacatatgtcaaaaaatcaggctgggaacttattcccagaggtttgtacctgttgctgtcttggtttacttaagacttgtgatatcagtttgcaatgtattggaaaataatatagtatttgccacaagattgttccatttcatcttctttttgtattttaatccgtatttgtatcaatcatattgctctctattgcaaggttcgtagtcaactcgcaaacacccccaccttacaattgccagttatcgattatttttacgctaataaatctaaaattccattttgtttcgttttttttttgcaatggaaacatttaaataaatacaaaagaaatacctacgataatggggtatttatacaaaaaaatgaatttgaaacaaaaaaatataatgaaaaaaagagagagttaaatttgctaagaatttattcttcaggtttctgttttcgttggaactaagtttggagttggagcaggagcaggagcaccgagaggaatttagtggggagcgaaaagaacctaaagaaacgtggaatattaatgatgaccaattctctaataacattgttagacataatttaatatgaacattactttcatcattgtcatttgtctgctaatgtattcgcgtgtttgcttttacattattgacttatgtctgaatattataacgccatatagttaaaacaatagacccctaaatgtatcatgagcacatttggtatccataaaaactgatggaaaatcatcacaaaagtgatagctatctcggtttatttagtatattatatcagattttgaagtgacttcaactcagtagtgactatttttacgtactaacttatatatgtaaatattcagcattcgcattcgcatgtgtatgggcatatatattatacataataaatgaaaattggatgagacaagatggaccgctctaagtgtgattgagatgtagcttgagaccaaagagaccgttatcatcatcaaccatcatgtcctctctttagcacatggaaagcaatatactatagaaattgtactatatatatggatcaagcatacgaatcagagtccattttgatgtgaaggcatcaaatctgcaaaattaaatcaagtttcttgagcgacaaagctgatgatatcattcttgcacttggagtattttctacaacataacctaagccggtggttatttaataatgtttagtaatcttgaattccatacatttacgagggagtgtctgcatagttgatagtaatcatgaagaagctaggtcggttcatttcatcaaattatatgttttacaaaaattgtatcaacatgacttgaatccattatcacagtaataaaagtttgaaacggaatgaatacaatattgagatgctgcaagataaatggatataattaatgctttgtcttttctttcttcttttaagccttaagtgtcacaaacgtaaacatcaagattcaataccataatgatataaaagatcgtgcgtgaaccatgtgaatgtgatcaaacccaaagtgaagctaacaagtaataacacatgtcaaagatatacaaacatttgtatttagagtgtataactataaccccatcccaagagtgtcgaaccaaaaaccataatctaagagatttataccgatcagatcacggaagaagttatagaaaaccgcatctcgttgattctgattttcgacaaataagatacaagccagcccaccgtctgcacggatactcaacttccctgttggtaatcgagttaatttcgaattacatgggtcaaattagaaaaactgttcttgttttatttgtttttaaatgggccatggggttttaatgtcttagtatttaatgggcttatttaaggccgactctaataatagacgaaattaaaaataggcccatttatccgttaattttgccatggtttttttttccatgaatattgcaagttttttttttggtgtaaatcttacaaggtttaagaaagaaaaagtgaattaatactactatcaaaaccgggagtaacagctaattatgtgtgtattattatggttttggatagcaatattatttaagcagataattattattttttgatataacggaagggaccatcatgttccgttgtctccaagagtttacgaacagatacaagttatctagaagattagttccaaatcataatatatatatttttttaatacaagtatacaagtttccacatcttttgttgactgtttattcgagaagaaacaaagataacaccttttgtccgtgtaatcatatatcaactcgtgggtcatgactcatgtatgatcaaacctaaacatcttcaaaaccggtaaaaaaatcagtaagtaaaacaaatattgagctgtaaaaaaaattcttagaattgttttaggcagatttatctttagaatttagagataaaacaaaaattgttaaaccaacaaatggatccacaaaacaaaaccatgagctctgaagtcaatctcaccagtcaccatgactcacttactacgtgtatctgtcttttttacatatattttgaaagtttcatcctttatcccgatggatgcgaataatacaaataacctaacaaaactcgaatcagagaattccagatattacttacataagacaattttagcaattagctttcaaatctcatctctttattctctctctctatctcttctcctcaagaaccctaaaaatctccagaaaaaagatcccaaatttcgtatttcaacgatctgaatctctctctctttcgggtttattttgtttcccgatatggtttagaatttgtgatttaaatggaagctgacgtgtcaatttcctgaaaaaacccttatcgcgaaattttccagattaccaaaaaaaaaaagattgaaacttttttcgatttgtttgaagaagaagcacggtaggaacgacgacg

SEQ ID NO: 14286 - DNA, 3000 bp, Unknown
  misc_feature (1)..( 3000): cDNA_ID_3015748_gDNA_ID_2684098_Annot_ID_190199 3000 nt of promoter + ATG
gaaaatgattagttgtagtagctaagaaaaaatgtgtaggagtacagaccgtagacgaatacttaaattcagtgaatagagagtcctaaatttaggaaaaggactaaaacagactaacaaagaaaccgtattgaaagggaaaaaaaaggaattgaaaactaatttatattgccgtgacgtaattgtcatactcatataataaagtgtactcaaaagaaaatggaagaagggaatgcttgcttacttcgttcgtcatggccataagtagatcatgtggtccaaattctctgtacacttctatctcaccttgtttcctaataacacagcgcttcacacccacgcgccgtcgtcgaaggtggcatttgaagtaaacccttgttcgaagaaaggaaaatctaagcagcacagtcacacacacaagttatgaatcatgaatgacataaaattggatctgagttttagaaaagaaaagacagtgttgagtggatcatcacgtgcgtgtgacacgcgtcgccgtcatcagttttggagtgggacactatcgttgaaactaaactgatctacgccattcattgtttgtgtctctctgacgaaaggactgaaatcccgagaaatcagtttttgtttcttcatataacacactttgacttttcgagagcgtttgagttatgattatttgtacaattacagtcacgtcatggtcaacgcttcgacttaaatcggggatatttccataccacagaagatgagaacggtctttaaacaatgtcgtgacggctctaaaacgcaccaccgtaacatccatgtaaaagcacgtcttcttgatcgctagatacaatatttacacaatatacattttgtcacgtgaatcggtgaatgtgatttttttttgtaatcgattagtatgaccatgcacaagattaacaaaaaaaaggaggctgggaggctggttataaaatattcgtaagatagctactatacatgttttgtcatattgagccacgcataagatgaatacagctacatttatttttgtgtatccatatttttatcctgatcgtgttttatcttcgtacgtttaccttttttgaattgatcaaccggtctaaggaacattcggctctaagctatcgacaagtttctttcattcatccgagacacgtatgacttggaaatgttgagttaagtctgacgtgtaaatttgtggttgtcatattcgaaaatttagtttcaccgcaacacgttttataaagtttatctttttccattttagatttaatcaactgtgtttataaaataaaatcataaagttacattttagtaaatcaatgcggcaacattctgatttcaagacatactaaaagtctttacgtaaatttgaattttctattcattataatttaaccaaagaaaagaagcttatgcagctttggacggtttcgaatgatttacagaaatacatggtatcatatagcccaataaatacaaacagacatcgctggtgccagaaaaagtggaatagtcgatttgaaacttctaatagaaagaaagacattatgtatgaaaaattgcctcagaaaaaaacccagcacaatgtactgtatatgttttatatatgtatctatagaaggaaaagataaagttgaaaaatatttcctccaaaacatttgcagtgaaaatatatagatttgccatctaaagtcttttaatatctcttattaaaaaaaaataagttaatgtatattacatcaaaatttatctagtatacaatttcctctaaaataaccaataacatgaaataaaaatgttaattaaattaaaatcaaataattaatttcataatatttattcaaatttaaattaaacagctagtaagaccaattaatttaagcaataaactaaaataaatgtaatttcaaaacctatctgacaaaagaaatcattaattttgattatttaaatttaaatatattttaacaactttaaggccaaaaaatttataattagttgtaacacatacatagtcaataattataaaccaaatcataaaatatatgaggcacatacttttttatttttaattgagattttatatactagattatataatttttaagtggaaattgtttttaaagagagatatttgttgggttacacaaataattattggttttaagtgttttgcattttgcaattactagaaaacaatatattttagagtatctaaagttatattttgcacataattaaattttatataattgggattttatatactaaagagtgtcagagtttttaagtgaaaacatattttagacagggacatattttgaattacactaataataaatgcttttgatactttttcattttataattattagaaatcaaatatatagatactttttaattataccatgatttcaaaattaattatgtggtaattactaattacattgttaactaaaaaaaggaaaaggacataaacacatacaaacacaaaataaagtttttgcacatttttcatgatgattaatagtcagtcttacaaatatatctttcctcttttcaaaataaaataaaaatcaggtggattctcaatttgacaattagagtggaaaacactaattgaaatttctgtaaagagaaagaaagtatattcgaaaaaaaaaaaaaatcagaagaagaagaaaaaaaaggctggcaaaaaaagaagaattttaaagtggctaagcagaaaaaagaaacaaaactaaaacactttttatttattcctttcagcagtcgccagctggcattatacgttttgccacgtgttattttctcaatgaccagtaatctaatgacgtggcacccacttgcttcacgttccacttcttctccataaatacagctctcacaatctcttcttcagctttctccattttcacctctctctctctgtgttttttttaactccgtttaaattttccgtctgaattttacaaaggaacactaatg

SEQ ID NO: 14287 - DNA, 3000 bp, Unknown
  misc_feature (1)..( 3000): cDNA_ID_3015752_gDNA_ID_2684098_Annot_ID_190198 3000 nt of promoter + ATG
acggtggttacgtcgattcatcagccgtcgagtcgtgtgtttcagatgtttgatacggtgcttcttttgagtgaaggaaagtgtttgttcgtcggaaaaggaagagacgccatggcttactttgaatccgtcggattttcgccggcttttcctatgaatccggctgattttcttcttgatcttgctaacggtacgttctcttttaaaatacagcttttaaactttcatttacgtagtgtatgtactaacacgataattaacttaaatcattatatgattgaattaaccgaatacttttactatatgacttatgattcccgttttatatttaatttgcgtgaaagtattcttacacgaattgactgatgataggatgatttttttttaaaaagaaatcatatttatacgtgtatatctatacgtataatatggatctttggtattgaaaccatgcataatacgatcatgtggggaggccgtgagggtagatatttgtgtagaaaactactatgaaaataacagctcgaccccaaaaaaagagagtaataaatgcttatttatgaacgttatcgccgacgtacgatgagagctatgcaagtccaagttttgatgtgtccctcgttgacgatggtcgtcgcgctggctacaaatttaattacttgatttattgctttgtctttggagttaaactagccctaatctatagctattacattagtacggttctagcattagattaatattgatatagcatcctttttctcaccgttttttttccaataattgtttattctaaagttaataattatgggcaattggggatacgtgttaagtctttctttctctttttttcgagtatgatttgtatgatttttggggtctaaaattttggcatattatatatcatctgaataaatgttattccctgcttttatatgaaaatcttttatcgcattacccattacactattaaaccatgctttttatttatttttgagggataataaaaagagaggaaaatgatattaattttggttgtttttaaaaaacgggtgtataggaaaacaccatgtgtctaactggttacaagatgacgtatggttttagcgatgggcattgtgttttctgtttcctctttatccaactttttcaaaaattagttcgtcttttttttgcactatctaaacttttccattttatctcttatctttttctgttttcccaataattcttattctctttttcttcagccaactttaaaaattaacatccttttggcttttacattcttttgatcaaagtagtcttctcacactctttctctctgcttttgttttatttattttgtgtgtggcgtttaagctacacgagtcgacggaggcgtgtggttttgattgtatgctcttacgtattgtccataaatccttgattcgggaaaactttactttaggagataaccgcctaagggaacccaatcacactctcgcatttagcgcgtgctgttaactctctttcaatcctcatcgaagcaataaaacatagagcttcgggaattggaatagtcagaagtcagggtactcttaactcagtttcaatgttttttgagtctcattgtgatttgtgaagaaaacctgcataggtatttgcattcttcatagtcaactctttttttgaatataaataatatttccacttaggaaatagaaaaggacttctaggaaatttacgatcttaaaatctaaagagacggatccttgaggtcacgttaatttattccaattcgtccttgctaatcctaaacaagctagtaagtaccaaataatggtacgagtgttttgacgttttaggcatatacatgattaaaaagtgtggaccaaacttatgttcgtttggtcattcagtgtactgatgataaatattcattctttcatggtccttatatacatatatatatatatatatatatatatatatatatactagggacatgcatcacatacatgatttaatgtgtttttttggggattgttataagagttaaatgactaatttatgtgaaccgaagacaaaacaaatctcatgtcttcgttgacttttcatttttggtaggagtctattaataagggaattgcttcacaaaatgtatgtatgtatatatttatatatgcacatggtatgtatattttggtgacgccataggtagagtaagaaggcattaataagatgggggaataaaattggcacatagaaatagtttgttgcgcacgatggcatatatacagtagtattagatttcaatttaataatttggtgggtattaagttctttgtctccacgaaccatatgcttcacattcaatctttctttgtattattatctctgaaaaaagctcatttcattgaaccaaccattcacatgaccattcgatctatttcatgagtatataactatataatattataaatgtgcatgtatgcgatgttccatggggggaaagttaataatcgcatgcatgatcttactaagcaagaatcttctttgactaattatttcgttattagaaagatcaaatatgtttgctattttttcacgaggagctgttaggatattgctttcaacgtcaaattacaacagtaaactccacttgctttaacttattattgatcaatttgaaagaaaagaacaacataattaaattttctattccaaaattattgcttttccaaaagctggcttatgacatttcatgattacacttgtcgagtattgactatgcatttgttcatttatttattgactttctcaaacttttgttccactcaaattcagttttaatcttcttgataatcctcgtaagaaaaaagcataccacgtgtttaggatagactaattattcaccttacttagcataagcttatctaaggaaaagttaacttcaaatagattatttgatgatgctcaaacattttccatttattaaattttggaatcgatatcatg

SEQ ID NO: 14288 - DNA, 3000 bp, Unknown; identical to SEQ ID NO: 14282
  misc_feature (1)..( 3000): cDNA_ID_2729742_gDNA_ID_2684098_Annot_ID_190195 3000 nt of promoter + ATG

SEQ ID NO: 14289 - DNA, 3000 bp, Unknown; identical to SEQ ID NO: 14278
  misc_feature (1)..( 3000): cDNA_ID_2729762_gDNA_ID_2684098_Annot_ID_190189 3000 nt of promoter + ATG

SEQ ID NO: 14290 - DNA, 3000 bp, Unknown
  misc_feature (1)..( 3000): cDNA_ID_4254777_gDNA_ID_2684098_Annot_ID_137078 3000 nt of promoter + ATG
attcccagaggtttgtacctgttgctgtcttggtttacttaagacttgtgatatcagtttgcaatgtattggaaaataatatagtatttgccacaagattgttccatttcatcttctttttgtattttaatccgtatttgtatcaatcatattgctctctattgcaaggttcgtagtcaactcgcaaacacccccaccttacaattgccagttatcgattatttttacgctaataaatctaaaattccattttgtttcgttttttttttgcaatggaaacatttaaataaatacaaaagaaatacctacgataatggggtatttatacaaaaaaatgaatttgaaacaaaaaaatataatgaaaaaaagagagagttaaatttgctaagaatttattcttcaggtttctgttttcgttggaactaagtttggagttggagcaggagcaggagcaccgagaggaatttagtggggagcgaaaagaacctaaagaaacgtggaatattaatgatgaccaattctctaataacattgttagacataatttaatatgaacattactttcatcattgtcatttgtctgctaatgtattcgcgtgtttgcttttacattattgacttatgtctgaatattataacgccatatagttaaaacaatagacccctaaatgtatcatgagcacatttggtatccataaaaactgatggaaaatcatcacaaaagtgatagctatctcggtttatttagtatattatatcagattttgaagtgacttcaactcagtagtgactatttttacgtactaacttatatatgtaaatattcagcattcgcattcgcatgtgtatgggcatatatattatacataataaatgaaaattggatgagacaagatggaccgctctaagtgtgattgagatgtagcttgagaccaaagagaccgttatcatcatcaaccatcatgtcctctctttagcacatggaaagcaatatactatagaaattgtactatatatatggatcaagcatacgaatcagagtccattttgatgtgaaggcatcaaatctgcaaaattaaatcaagtttcttgagcgacaaagctgatgatatcattcttgcacttggagtattttctacaacataacctaagccggtggttatttaataatgtttagtaatcttgaattccatacatttacgagggagtgtctgcatagttgatagtaatcatgaagaagctaggtcggttcatttcatcaaattatatgttttacaaaaattgtatcaacatgacttgaatccattatcacagtaataaaagtttgaaacggaatgaatacaatattgagatgctgcaagataaatggatataattaatgctttgtcttttctttcttcttttaagccttaagtgtcacaaacgtaaacatcaagattcaataccataatgatataaaagatcgtgcgtgaaccatgtgaatgtgatcaaacccaaagtgaagctaacaagtaataacacatgtcaaagatatacaaacatttgtatttagagtgtataactataaccccatcccaagagtgtcgaaccaaaaaccataatctaagagatttataccgatcagatcacggaagaagttatagaaaaccgcatctcgttgattctgattttcgacaaataagatacaagccagcccaccgtctgcacggatactcaacttccctgttggtaatcgagttaatttcgaattacatgggtcaaattagaaaaactgttcttgttttatttgtttttaaatgggccatggggttttaatgtcttagtatttaatgggcttatttaaggccgactctaataatagacgaaattaaaaataggcccatttatccgttaattttgccatggtttttttttccatgaatattgcaagttttttttttggtgtaaatcttacaaggtttaagaaagaaaaagtgaattaatactactatcaaaaccgggagtaacagctaattatgtgtgtattattatggttttggatagcaatattatttaagcagataattattattttttgatataacggaagggaccatcatgttccgttgtctccaagagtttacgaacagatacaagttatctagaagattagttccaaatcataatatatatatttttttaatacaagtatacaagtttccacatcttttgttgactgtttattcgagaagaaacaaagataacaccttttgtccgtgtaatcatatatcaactcgtgggtcatgactcatgtatgatcaaacctaaacatcttcaaaaccggtaaaaaaatcagtaagtaaaacaaatattgagctgtaaaaaaaattcttagaattgttttaggcagatttatctttagaatttagagataaaacaaaaattgttaaaccaacaaatggatccacaaaacaaaaccatgagctctgaagtcaatctcaccagtcaccatgactcacttactacgtgtatctgtcttttttacatatattttgaaagtttcatcctttatcccgatggatgcgaataatacaaataacctaacaaaactcgaatcagagaattccagatattacttacataagacaattttagcaattagctttcaaatctcatctctttattctctctctctatctcttctcctcaagaaccctaaaaatctccagaaaaaagatcccaaatttcgtatttcaacgatctgaatctctctctctttcgggtttattttgtttcccgatatggtttagaatttgtgatttaaatggaagctgacgtgtcaatttcctgaaaaaacccttatcgcgaaattttccagattaccaaaaaaaaaaagattgaaacttttttcgatttgtttgaagaagaagcacggtaggaacgacgacgatgaatcgtgctttggtcctacttttatatgtttgtactgtttcttgtttagcttcaagcaaagttattttg

SEQ ID NO: 14291 - DNA, 3000 bp, Unknown
  misc_feature (1)..( 3000): cDNA_ID_3015739_gDNA_ID_2684098_Annot_ID_137080 3000 nt of promoter + ATG
ccgttggccggtctattctcctccggcgtcgttgaggatctccggtggtttaaggaatcaatcacaccatgccaatgagatacctcaacgcaatggccgctctactaatgatgttctttactctcttgatcctctctttcacaggcattttagaattcccatctgcttcaacttcgatggagcattcaatagacccggaaccgaaattgtctgattcaacatcggatccattcagtgatgttcttgtagcttataaaaaatgggactttgaagtgggttgtgctcggtttagggagaatcataaagatgcgattttgggtaatgttagttcgggttctttacaagaatttggttgtggtaagcttaagatgaagcatgttaaggtattggttaaagggtggacttggattccggataatttggaaaatttgtattcttgtcgttgtgggatgacttgtttgtggactaaatcatcggttttggctgattcacctgatgctttgttgttcgagacaacaactcctccactacaggtaataaaattgcttgttgctaatcttgtcaaagtttgcgttttggaaagtagttatagatttggatgattgggacagattagatcacactgtctgttttttcttaccccaaattggatgtgatcttgtgatgtattcttcactctagcagatcttttagttctatgactcactaaaagatactttttcattgttgtctatatggttcaagaattttggtttgtaaagtggaaaatttcagagtttaattgtctacgtgagcttattgtaaaccagaagaatctttgtgtactgctattcttgttcttagtcaattcatttttgaaagttggacatagatatggataataaaggcaaactaaaatctcctatgttcttattttcccttcagtgcctgcttcactatagttttctttcaataattggatcccattgatgctgagtttcttggtttgtttccttagagacgtgttggagatccgctccgtgtgtacatggagctagaggccggaagaaaacgctcaggccgtgaagatatattcatcagctaccatgcgaaagacgatgtccaaacaacttacgccggttcgctctttcataataacagaaactatcacatctctccacataaaaacaatgtaagtaacgttttatacacccattccatactgttcttctttcatttcatcgttttttaattcgattgttaaacattgcacaggatgttctggtgtattggtcttcctcaagatgcctccctcacagagatcgtctagcaaagagcctactcgatttgattccccaccactcctttggtaagtgtcttaacaatgttggtggcttggactcagctctctctatgtatccagaatgtgtcgctgagcacaacgctgaagcaaaatggtacgatcacctccactgcgctatgtcacactacaaattcgtccttgcaatcgaaaacacagctgttgagtcatacgtgaccgagaagcttttctatgcgctcgactctggttctgttccaatctattttggggcctctaacgtgcaagactttgtccctccgcattccgtgatcgatggtagcaaattcggctcgatgcaggagttggctgcgtacgtgaagcggctcggtgatgatcctgtggcttactcagagtaccatgcgtggaggcggtgtggactaatggggaactacgggaaaacccgtgcggtgagtctcgatacattgccatgtcggttgtgcgaagagattagcagaagaggtgggaagaacgccggagtttgatgagccacatgtggtttcatttagtgtgggtttatgtaaatgtgatcctatgatctgtttctgttacatatgataacttttttgtcctatatagtctcagatcatcaagtaaatgctatcaaatcatgtgttcaagggacaaaaacagaattattcacttatgttagagttaaatgggatctcttggtgtagcttttccttaatcaaaaattcaaaatagattatgattgtgattgtgtagactaagttaaaaaggacaaaaatcaagtcataaccactttcctatatttacctacaataatcagaatcatttaaaacttatcaaaactaaaaccattcaaaatattgggtgaattaaagtttcgattgtttcaaaacgtctgtataagtatgacaaagagacatcaaaattcagattattgtcacatttttatcaccgtaaaatcttagaagaaagaaagataattttttttttttttttttaatgataatcaaagatattatgttagtagtaaaatagagaatggaaaaaataaattaattacatagacaaacgtgtaggtcataaaatcatttggtacatcaaattcatacatgggtcttctggtattatctattaacagctttaggaaagaaatatgagatcagatttttaggctaatcaaacaaaattttctataaaaccatcatatacataacaaatatgcacaagaagtgcataagaagaaagaaatcaaacagaaatgcaaacaaactagatatgatgattggtgatatatatatcttgaaattgtttctatccgcaaaaaagcaaacgctccaatcaacatgttttgccagcttgctaggtctctctataaatattggttccttctcttaacatcattttttcttctctcgagtgttgttaaagtttttgtatagtttgctatttttcgtgaatcaataaaaagagctttgttgaacaaattagctatctccatggaccgaccaaagaaacgggacgtactacgagcggtgaattcgatgagctctctatgcgagaatggcaaaaaaaaggaaggaattcgagcagtaaactcgatgtgctcgatatccgaactgacggatgaagacctactgtctcggctgcttgaccgtccaagactcaaacttgaacggaaaatatcatacgaggaa

SEQ ID NO: 14292 - DNA, 3000 bp, Unknown
  misc_feature (1)..( 3000): cDNA_ID_2729868_gDNA_ID_2684103_Annot_ID_137082 3000 nt of promoter + ATG
atatgtctgagtctggttgcggtcttgcagaaatttaaaccatgtgttttagatcaaatatgattcattccaactaaatgtattcagatttagatggtgctctcgagaaattgttcgatcattagaagaaactaaatcatttagatgcgaggatactcactaacttgagacttgagtaaaagtgttctaaattttccttttgaaaagtaccagaagattgtatattataatcttttttgtcaaaatcgcaaattctaaagcaaacctttaaagttgttgatttcgtaatgcaaaactcaaacgcaattgcaagcactttaattgatcaaatcaaagctgaacaacgagatccgtttgctacgttgtcactacttttaaagttcaagcaagtcaatacaagaagaaaaaagttaacagaaatttttgattaagcaaagtatttacgatgctctctgcatatattatataaagcacattaaaatcgaatatatatttgagcttgaccattacgcaatatattctcactagctttctttcttcgtttgtcatgagattcattgtccccaagaaaaaatgacatgtgatgtgttacaaaaccttaagacaagtggcatggacggctcccgagtctaatttcgagcttcttcaatttaatcatgtgttttcgtaaaaatcattagaagattctttctcatctgaagaatcaatcatttatgaattatgcataaactatataggttcagccagggtgttttcgaaaagctatactcgaataaggtgtggaactgtggactaaaaaaacacacgatacggtagtccgatccaaataattgcaattcgttgagttatagcctattctaatacattttgcagctagtaataatataatataataaaactttttcataagttagtgacaccaaaaagccaaacgtgacgaagctgataaggataagtagatgataactgataaagataggagttgtatagaggaaaaaatatttgatgcttaacgccattgattattacatttttggcatgctagtggtccctacaccttttagttttctcatataagatcatttttcttaataaaaaaactttttataaaatatatacattgagcctaacaaaataatatcagcaagttaaattcttcttccgaaataacaaattctagttgaaattcgatttattctttgttacaatttgtttctcagacgtcgggctttattgtccgtaacttgcatgtgggactggccaagtgatcagtgcctaaaatactcaatttcgagttaagcctaaaatacccaatttcgagtaagcctgctcaaacctatcaaccttaattcatttgataatagtgttattttccaactacctctatttgcaacattaatacaccttgtaaatgttagaggtcaaagacgacgaatctctttccatatcaacgtttaaaaaaaaaaaacactgttcgcaaaaatcatgggaccgttggttgtcatttgtcaaacgtcaaagcctgggaccattacatttgtcattaaactttggaatatacgagcttattagtgatataacatgataataaccccattttcttaacttatatgccttaatcaaatgcttaaatgactcaactaataatttttgtagtgtttcatcctgattacaaagtttataaaagactacaatttcatccaaaaaatctctagcatttactaattaatatgtaccaaatcccataacaaatacagctttttgttttcccattttttgtctaacatttatcaggtgccaatttatctacttacacaactgtactactcatctttatcaccaatatattcttccataatagaacaatctctctgtaaagcaaggaatcaagagtttacttcataaaatttgagtcccaaaaaaggattaaatgcaaattacatttacgtaattacgtattgttttcaggtagacgaattaaaaaccccactaataaaagggcacacggctggtggccccaccattatcaccactcataacattttgtcccacgcgccttcgcactattttaacttacacgcttgccctccccactcgctacgacatgaatgatctcacccgccaagcaggcgcgtgtaaacaattattcatacaacgttgtaaaattactagcaaaccaattatattaagtagttttgttacaaaagaaacaaattaaaaaaattatgtgtgtaagaattctgacctgttgttattagtaattgactaattgtagattggaagaatatttgttcaggaaagttatttaaactgtggttaatttcttactgtttctggatactattatcctttgacttcttaattagttatgaaccttcactttcaaggttctacaaaatctaaagttactacaaaagcacagatttatctcaattattagaaaaaattaatcagggtaaattgaagagtaagtttttttcgattcttctagggtaaacaaaaaacaaataaagaggaattaattggacccataattcaaaaaccccacgattctcaaccaatagccactcctgcatctatctctctccttgtgaatgtgaacacaaaaggacaagaagagaaagttgagagttttcttttgattttcgcttgtctggattcgaaccgaatcgccattgttgttgttaccaatattcttctctcttcgtcttcttttgtctgaaaaaaatccaaacattatttcagtttctccattggaaaagcgcaacaaaacatccatccacgagtgtttcctcgtttccttgacacatgtttttcgcatcattcattcattcttcatcattttaaactaaaagaaacgaaactgacctaccaagcaaagttcctctacttgcttcatcttcattcgtcatgatttccctctttttttactttaccaatttcttgaattcttaaacccaaagacaaagcctttcgatttcctatagatactttcagatg

SEQ ID NO: 14293 - DNA, 3000 bp, Unknown
  misc_feature (1)..( 3000): cDNA_ID_2729850_gDNA_ID_2684103_Annot_ID_137087 3000 nt of promoter + ATG
aatatcagctgagacgataatctctccaaattcaatctcagagcaatcatcagttcataagcaagtcacacaagcggttctcgagaaagataatgatggatctttcaaagtgaaagttgtgaagcagattctttggattgaaggagttcgatatgaactccgtgagttgtatggctcgaccactcaaggtgcagcctcgggcttagatgagagtggttcgggtacagaatgtgttatctgcatgactgaggctaaggacacggccgtgctgccttgcagacatttggtaacactttctcaatcttttgcttgtggtttcacaattatcatttcattttccaaaccttatcgagatctctgcctgatagctgataataccaacatgaactgtcatataaacttccaaagttatgcattttctttgatagacagttgttgttttcgatcagatccaaccatcaaggtctatagatcactttagaattagtttcaagaaaagaactttgtagttgctttattcaaacgtcttataataatgctgtatgtccttctttgcagtgcatgtgtagcgactgtgctaaagaattgaggcttcagtccaacaaatgtccgatttgtcgacaacccatcgaagagctcttagagatcaaaatgaacagtagtgatgaacaacactagtacaaaaaaggttctttctttacataaaacaccattcttgattctttcttcatttttctctgaaaccctccatatctgaatctgtatttccgctatcattgttgtgcaacttccttcattccgcatatagatttgtttgatctaatgctttgtatttgcaagatataagcatcatcagtacatgtatagataacttcctaacactctcaccaaactacttaatgtttgtaattgaatgcttttgttggtttgcttaagcacaaggatcctatgttgtggtccaagtctctcatagtatccaaacaatttattcacaagatctagatattaacatttgcagagttgctacggccatattatttaccatttatctctcaccagaaagttagaaattattagagaacttgaagaatttggtatttgcagagatataagtaaaagaaaagagagaaaaagaggagaagttgaagaagaagaagaatcatttttctgcctttttgcctattaggctatataagtttaaaacatcaattgaagaaaaagctgcccgaggaaaaagaatgtttcccactgaggtttagcttaaaagaaaccacaaaaggtccttttaaaattaaaaattcgattttttttcttttgacagaatggtcaaacttttgagttaagaaaagtcttaatatgatctgttattatgaaaaacagttttcatggtggatttttttttttttttttcctggttgattgcttgaggacaaaattatgtctatttagcttagttttatagctgaaaattcaatttagttaaagatcatttaattgactaaaagtgaaatgatatcaacggtgacgtcgaagagaataattaccttttaaaggccaaaacgtacaataatgcactttccgaaaatatgaagatgaaaacgaatccaaagggaaaagatggtaacacgacaaaaagcttgaggaattaatgtcattttgtgaagaagaagaagaagaagaagaagaagaagaagaagaagaagaagaagaagaagaagaagaagaagaagaagaagaagaagaagaagaagaagaagaagaaggagagccatgtcatatgcagagacactcatgtgaccaacagctatcgaattaggcaaaacctcaacgacaaaaatgaattattcatctcaccatgccacatttttttaacctatcaattgctttttttaaaaacaattatacagatctttttgttcggaactttcccaaatgtgtagattatgcttcttaatattcattttctctatcaataattggacaaccgtcatatcaaatctgtgttagaagtcataattttcaatttctattatttgcttagatcatctagttaagaatgtgattaattataaaattagccatgcttcatttaaataaacaataaattgtccttcaccaagagaaccctttttccatgttgtcaaaaacgcttcaccaagaaaaccattacattattttttcccaaagaaaaccgttatcatatttaaaatataattaacttgattatatctcacttttaagaatttcggtttcatgcttgattaggctttatcaacaacaagcgatgatagtaaatgcctcgatgaacaatgaaatcgtgaaaaaattgtattaattaaatgcaattggaaaacaaatagtattattattaaaacaggggaaacttaagagagatctggccgaaaacgtgattatgttcactatataaattatgaaatactatacgagaggccttcatcattaaaaagattcataaaaacgagccccacaccactcttttttttcttgttcttctaatgctaatctttttgttgaatttattacaaaaaatattgtctaaagtctaggcaaggaaataagatactattgctcactcctttctggctaataaattgaagcagcgactttacttctctctctctctctttctctctgactctgaaaaagatgaagtggagaagttaatgttcaccaacttaatactgcaaagtcgaaatctttctttcttcttctttgccttctttcaagtgctttccctctctcattctccttcttcctcctctgtttctttgttgttctaaacttaaaaaaaggtatcttcctcagttacagcatatatgtctatgtaatggtgtgttctcttctttgcgtctttgaatgtgataaacataacaatttgtgggttattatgttgtccagattgaagttgcaagtaacagaggagctgtctcagatctggttctaaagcgagagaaagagattttgagttgaggaaaaatg

SEQ ID NO: 14294 - DNA, 3000 bp, Unknown
  misc_feature (1)..( 3000): cDNA_ID_2729846_gDNA_ID_2684103_Annot_ID_137088 3000 nt of promoter + ATG
ttgttcgattcaaagcttcgttcagccatggagattcaatgcttactctgttcgaatcagtccttctccgtcgccgtttatgtcaacgaaacccaatctagtatcagagaaacctcaccgccaaaatctcaccttgatgatggctccacgaaatctggttccgaagaagacgaatctcacttcaaactcgacccgggtccagttcgagtggataaccgctggatctcagaagaatttcacggcgaatttgatgagaggttggttggctccgggaggagcgccgtgtagagaagcgaagaccgtcgagatttcagttcccggtgtcgacgggattgattctgtggagttaaccgccggagagattcatgaattcaaatttcaagccatagacgaatctggaaaaaacgtttgcattggtggggactatttcgagactgatatatccggcgagaactggaaatcgagaccaccggtgaaagatttcggcaacggaacttactctttctctttacaggttcatcctgagttcgccggagatttcaatctcaccgtcattttactcttccgtcattaccaaggtcttaagtttagtacctcacgtttaggctttgaccgaaagcttcgcaatgttagattacgctttgttaagacgcctgacgttactctgccggagctccggtcatgtaaaaaatctgattttaacagagatgcttggtctggacgatggactaggcttgggaagaatgatgagtgtcagattagcaatgacgggcgttaccgctgcctcgctgcggatttcccttgccggaaaccgtggtgcgacggtgcggttggagctatagagagtaatggttgggtttactctagccattgctctttcaagctcttctctgcggaaaaggcttgggattgcttgaaaggcaaatggattttcttctggggagattcgaatcatgttgattcgatcagaaacttgctgaatttcgtcttgggtcatcctgaaatccccgctgtcccgaggaggttcgatatgaagttttcgaatccgaagaacccttcggagactgttaggatcacgagtatctttaacggtcattggaacgagaccaagaactatcagggccttgattcgcttaaagacagggactttagagaattgctcaagaagtacttcaacgaagaaacaaaccgtgttcccgacgtgatgatcgtgaactcgggtctacacgacgggattcactggactagtcttagagcctttgcgaaaggtgctgaaaccgcagctgcgttttggagagaagtttttgacggggtcaaaagcagaggattgcaaccgccagaagtgattttcaggaacacaatcgcgacaggcgggtacgcgagaatgctagcgtttaacccgagcaaaatggaggcgtttaacggagtgtttctcgagaaaatgagggatgcgggattggtcacgagcgtagttgataacttcgatatgacgtatccgtggcactacgataaccgttgcaacgatggagttcattacggaagagctccagcgaaaatgcggtggagggacggtgagattggacatcagtactttgtggacttgatgctcgttcacgtattgctgaatgcattgtgtgtaagatagatgtggtaaagtttggtaattaggaagagtcacggattctttgtttatgtgtagacttaatttttttgaagtatagattattattatttgggaaaactcaactcaagcttgagttatattgtataatagcaagagattggagcaacaatagtgtactatatgtatctggttgacatttttctgataatgataattttgaattcttggatgataaataagtacaagtttaaaattttggctcaactcagcttctctctgtttcattcctctgttctaatttcttaatcctctacatacggtaatttggctgattgagaatttgggtttcatataatcatctccatggattctgaaagcaatattctataggagaaagggtaaaagaatagaccaaatatttaaggcagtgtcttaaggaacataatgccacaattgggtcagatgaataatctttatcattgtaaagcctaatattaagaagaaaaaggagataattggaaaccaaaagggagattaaagtttacatacttcataatggtgaaagttcaagcaaagtgtgtgtagattatgactatattattgttttgttttaacaaaaaaaatgatatattcttgatatcttttggaagtagcaagcgaggtatatgatcaacttgataaatagaaataacgaagtatttgtcggcgtcacacataccaaattttccttcaccacatgaatataattatctcttagatttgctggtttattatgtgaagcatgttttttgaataaacagatcatattatcaattgagacttgaaaatatttaaaatgcatagctccatttggtttttgtttttatcgtaaattaaatttatgagtcgaaaactagactagttttttgagacgcacgctattgataattcaatttggtctctttttttttcatcaattcataattcaatttggtcttgactcttgatcaacatgatgaatcactaaaacaaggacgacattccactatccggtttaatctggttaagatatttttgactcctttctatatggtgtaaataatctacaaacaaatttatttccaaatctttgtggatcttcaacatagtttttttttgtaccaagcaatttataacaattgtggtttaagaacattggttgaggtttggtttggtgtacaatcatcactggtaaaccgaaattgacttcttctttttccatttttcttttagaaaattcatagtattaaagtacaatattcctcttgcatttactatttggcacacatatatacaaaatccagtatcccactcttgtgagccagccatcaaaagaagaaagagagagagaaaaaatg

SEQ ID NO: 14295 - DNA, 3000 bp, Unknown
  misc_feature (1)..( 3000): cDNA_ID_3610931_gDNA_ID_2684103_Annot_ID_137091 3000 nt of promoter + ATG
ttcagtgaggagaaaaacgctttctcaattatgaactctgcatctttgtcactgattcttctcacctgatctgttgcagatatttggtcaaagagtttattaaaagataacataatataaagtgaaaaagcaatgctgctttctctcattggttgtgcatagagcaaggacagagaaaaacaggttcgtacgtaagaaacacacattaactgtgttctgcttcctttgtattctctcacttttctcttttttcagaattcaatctctggaaattttcttcctaaagattaaagagaaccgtttggaccagatcagcttgcctcttggtaatggtctctcttctctttgttcccaatttctgtagctttcttctttctccctaactcgtctgctctctttgtctcttcctctcacagttcatacgtcttccatggcttccggtgatgttcttcctagattcttcactgtcttcctctcccattgcagctccgaatccatggtgagatttttctctggaatatttcatggaaaaagctgcttgggttgatatgtttcttggatacagtaacgatgtgaatgagatctgcaacattatcttaattcttaactctatatgtttaaatctcttgacactgacaaaagttttaactttcttcactaatgagctcaggattatctctgtttgtgttacttatgtttgaatatgatagagtatgtcaaactaaacactgaatttcctcaaagagttttctcctttgttgaaaaaattgaacaagaggtcttggtcttgttgtttgtctgtttacctccgcttgcagacagagtctttagcttatattttgctcacttttaacagtttagtttatgctacatctttgtgttgagcaggtgataccaaggtcttactacaatcttttaccacgtccgttgcccaagactgcgattctcatcggaactggtggaagattttggaaagtagcaatgacgagcaagcaagagcaagtgtattttgaacaaggctggggaaatttcgttgctgataaccagttaaaagagggagaattcttaacttttgtgtttgatgggcacaaaagttatgaagtaagtatctatggtcgtggagattgcaaagagactcgagcagtcattcaagttgaagagatctctgatgatacagaagatgacaacgtttctcttcatagccctagcaatgtttcacttgatagccttagcaacgattctcatcatagcactagcaacgtttctcttcgaagccttagcaacgattctcttcatggtgatgctgagatagagagcgacagtgagtattctcccgagaacctaccctcagcctctatatctgttgaatccgttgaggtggtgaatccaacaacaagcaggcagagaagttgtaagtaaacattgttcttttaactgatgcttataaccgaagctgtttagaatttgatctcaaatgggaattttgcagacaagaggaagaccattgagaatccacatctgtatttggatgatccaaacaatgtctgttttgagacgtgtcttaagcttagaaagtttgagctggtaagacttcattagatattattatctcgtctcattaaaaatcctttcacgagttgatgattatttttctaactaaagctctatatacattatgcacagttagttcatgcacagttggtgaaagactacggcttgatattcagcgacaatgttgactatattgacggatatggaaaactaaccgcgaaaacgaccaagtgggcagatcaacgggtttgcataaacaaatggcagaaaatatgcgagagaaaccagttcacagagaatgactccatcctatgtgaaattctccgcaacgaggacaaagtggtttatgcaatcaagattcacatcttccgcgatgcagcagcaagcacttgattctctgatgcagttctgcaattgtgtttcttctctttcgagtctagtcttttgtagtaaactattagaatgtctaatttcaaaacatgtttaagacttttgagttctcttgtagactttgaagtaaacacaatgaggagcaggcttaagcttacccgttaatcactctgtttctcttacaagttacaatcatgtaaaatgggttagaatgatcgttttaatatgttaggtacagatttcgtaatttctcgaaaatgtgatatctcttcttcacaacagaagaacagattattgtgaaagtcaaaacaaaaaaaaatctctgaaacaatggcgtgttgcttagcttcgtgctgtgcgtcggcgacttgtggattatgctcgtcggtagcatcggggatatcgaggaaatcagcgaggatcgcttattgtggtctcttcggtgcctctcttgtcgtctcctggattcttcgtgagactggtgctccgctcctcgagaaactcccttgtacgattctctcatccttttctgaactgggtttgtgaaaaaggaggttccttttagccgagattgatgattggaattgaaagagaccatcaaatttcgaaattgggttttctttgatcttgtcaattggaattgaatccggtggttaacgatagatttgggtgatgtcttgtgcttgaatcttactaagcgtttaagtatgaatcttaatttgtattggttcagtggaaatttggttgctttgtagctgcaacagattgataattgtgtactagaactttagaaatctcaatctgtgttgatttggatgtttttcaactttcaattgcgtttgtttatgctttgtgttaacctgcttgatctaagagagaattttgagtgttgcaaaaggaaacttcatcgcctattgatacaaatctccggttttggatgttgtttgacaaacagggatcaatacttctgattcatataccaaagaatggtatcagcaacaagctgttcttcgtgtgagctttgggaatttcctcttctttgcaatatatgctttgatc

SEQ ID NO: 14296 - DNA, 3000 bp, Unknown
  misc_feature (1)..( 3000): cDNA_ID_2729831_gDNA_ID_2684103_Annot_ID_137093 3000 nt of promoter + ATG
tcaaactcattataataagcggatattgaagtcagcattttcttgttcacataggtcatggaattactggaaattaagagttgacgtaatgcactagaataatgtatgaactaatcgtaaattaaaatatttcttgagaggaacttgattatggtttatggtgatgacttgcttccggcataactctttctgtgtcaagctctaaggcagtaaggcttatatttgggtcaacatcattatcaccatatcaatttacttactggttttagaaattggatacaataaacatgttccgagattgttggaactcagccgccatcttgaaaagttagatgatacttaaattattatgaacaatgctccataaacatttataaagtaacaaaattcaaaatgcgagtatgaatcacatactgtatgatgataacataatccatgtagctatgtataaagatacgatgcttaatcaaaagggttctctgtagtcaggggccaggattcatctaaatctttggttggaatgggttgccgcacataccgataataaaattgtctcggtcttcgatggatccgtgtctggagacagcaagccaatatgttgttacagacaatggcatctgcaagaaaccatcatgaaaacgttaacaattacagaaaaatgtgcattccgtatacccgcaattcccaaaacatagttcccaaacttacagactatacaatacaagcctatgaacttttgcaagaaactccctcagcaaagcagctacctttcttccttatacttggaagtgttttcaaggattcaagacatattgaaacatgcctaatcaactaatttagccaggtggttatctagattctctaacaaatgatgtcattgcgacagcatatcattatgaaaacccataaaaacttagtactagtgcatcgaactttccaaagcttattgctcaattgaatctaagcaagtcaaggtttttctatcaatcagacactggaaagtggagtgctttaaagcaagcaagcaagtagagtacctctgcacatcaaatcctgacaatcctttgatgaactttagatttctcagcatcgataatcgattccacgcggttaaccgcatcatcaagcctccctttggcattcaccacaacgtaatcaaagttctttagatgcctaacctcttctctcgccgtagcaactctaacaagcaactcctcttgactctccgtcttccgatcaatcaacctctccaccatagcaagctcactctccgccacaaggaatataaacacagcagagttaccaagtatcctccttaacgtctgagctccttgaatatcaactctaagaacaatgtcttcccctttggccataaattcctgaatctgcttctttggaatccctttgtattctccataaacaagtgcgtattcaagaagctcttcgttctccaccattgacaagaactgatctctcgagacaaagaaatagtctttaccatcaacttcaccaggtcgcatcggacgactagtggcggtaacaacaaaatgaagaccttcacgaacctcacgaagcttgttgatcactgcgtctttaccaactccgcttggaccgctaataacgatgacgatctgattcggcggcgggatgattggatcggcggtgaaagaagaacccaattgaaattcgagggaacgaagcgactcgggtttggtgggagattggataggggacgaattagggtttcctgggatatgggtatcggtcattttcaaggaggagtacgagagagcagaagagtgacggagtggttgaggaaaagagcgggggatgaagatgggtttgttggggaagatgatggagcgagagaatgaagaacagagcttgcgaatcatttgaggagtaaagtagcaacctttgggattcccaaagaagtttggtggagtggattgggtcactcgagccaccgatgctttgccgcgattttgacctgtatcttcgcttaagagcttagcacgatatcaactagggtttacttgttcaaaattccttttggtagatattagcctaatatatacacaaaatattcgatttatgatgaaatttgcacagaataatctatatttagcagcataatatttttcgattagccatctatttattaaatactcgattagcctaatgattttttttgacataagttaaaattgactcatgttttaaaaataaaacacatgtaattttgtattggtaaatacaattcgacttgagattcgattacaaaactgttaaaaagataaataaaaaaagaatgaaaaaacttaaaaaggtaaaaaaaattgtatctctttatttgatgtattgttctattttactggttggtcataataaaatcgaataacacttgaacttattttatgcgctaatttatgtattattattattttgtaggtaaacacaaatcttaattgtgagaaatttcagattatgatttgcaaagagagtaaagaaaatattatcagtttaatctccttcctaaaaataaacaaacaaatatttgctgctaaacacaattagaaaggagatgtaataattttagtatttcttaagttgcgacgttatatattcgcaacctaccaaactgttgtgtttaaaacttaaaccgatctatcaagcaagtggttcctctctctctctacctctcgtttttggccaacgtcgtcgtcttcacgatccacgacgattcagttcttgagttccggcgattatcggtctctcacttctggttccgttgaacccctcatttctcttctcgcccgtgctctcaaattccgatatttgcccctgtgattcgaaaccctaatttcgcctatcaatctggaaaatctctcaattcgaagactttagcagcgcaaagatactctatccgggtaataagatcgaagaaaccatcaatttcttaccaaagtcgtgattcttggatctcgtctttgtttgatg

SEQ ID NO: 14297 - DNA, 3000 bp, Unknown
  misc_feature (1)..( 3000): cDNA_ID_2729823_gDNA_ID_2684103_Annot_ID_137095 3000 nt of promoter + ATG
aatttctcacaattaagatttgtgtttacctacaaaataataataatacataaattagcgcataaaataagttcaagtgttattcgattttattatgaccaaccagtaaaatagaacaatacatcaaataaagagatacaattttttttacctttttaagttttttcattctttttttatttatctttttaacagttttgtaatcgaatctcaagtcgaattgtatttaccaatacaaaattacatgtgttttatttttaaaacatgagtcaattttaacttatgtcaaaaaaaatcattaggctaatcgagtatttaataaatagatggctaatcgaaaaatattatgctgctaaatatagattattctgtgcaaatttcatcataaatcgaatattttgtgtatatattaggctaatatctaccaaaaggaattttgaacaagtaaaccctagttgatatcgtgctaagctcttaagcgaagatacaggtcaaaatcgcggcaaagcatcggtggctcgagtgacccaatccactccaccaaacttctttgggaatcccaaaggttgctactttactcctcaaatgattcgcaagctctgttcttcattctctcgctccatcatcttccccaacaaacccatcttcatcccccgctcttttcctcaaccactccgtcactcttctgctctctcgtactcctccttgaaaatgaccgatacccatatcccaggaaaccctaattcgtcccctatccaatctcccaccaaacccgagtcgcttcgttccctcgaatttcaattgggttcttctttcaccgccgatccaatcatcccgccgccgaatcagatcgtcatcgttattagcggtccaagcggagttggtaaagacgcagtgatcaacaagcttcgtgaggttcgtgaaggtcttcattttgttgttaccgccactagtcgtccgatgcgacctggtgaagttgatggtaaagactatttctttgtctcgagagatcagttcttgtcaatggtggagaacgaagagcttcttgaatacgcacttgtttatggagaatacaaagggattccaaagaagcagattcaggaatttatggccaaaggggaagacattgttcttagagttgatattcaaggagctcagacgttaaggaggatacttggtaactctgctgtgtttatattccttgtggcggagagtgagcttgctatggtggagaggttgattgatcggaagacggagagtcaagaggagttgcttgttagagttgctacggcgagagaagaggttaggcatctaaagaactttgattacgttgtggtgaatgccaaagggaggcttgatgatgcggttaaccgcgtggaatcgattatcgatgctgagaaatctaaagttcatcaaaggattgtcaggatttgatgtgcagaggtactctacttgcttgcttgctttaaagcactccactttccagtgtctgattgatagaaaaaccttgacttgcttagattcaattgagcaataagctttggaaagttcgatgcactagtactaagtttttatgggttttcataatgatatgctgtcgcaatgacatcatttgttagagaatctagataaccacctggctaaattagttgattaggcatgtttcaatatgtcttgaatccttgaaaacacttccaagtataaggaagaaaggtagctgctttgctgagggagtttcttgcaaaagttcataggcttgtattgtatagtctgtaagtttgggaactatgttttgggaattgcgggtatacggaatgcacatttttctgtaattgttaacgttttcatgatggtttcttgcagatgccattgtctgtaacaacatattggcttgctgtctccagacacggatccatcgaagaccgagacaattttattatcggtatgtgcggcaacccattccaaccaaagatttagatgaatcctggcccctgactacagagaacccttttgattaagcatcgtatctttatacatagctacatggattatgttatcatcatacagtatgtgattcatactcgcattttgaattttgttactttataaatgtttatggagcattgttcataataatttaagtatcatctaacttttcaagatggcggctgagttccaacaatctcggaacatgtttattgtatccaatttctaaaaccagtaagtaaattgatatggtgataatgatgttgacccaaatataagccttactgccttagagcttgacacagaaagagttatgccggaagcaagtcatcaccataaaccataatcaagttcctctcaagaaatattttaatttacgattagttcatacattattctagtgcattacgtcaactcttaatttccagtaattccatgacctatgtgaacaagaaaatgctgacttcaatatccgcttattataatgagtttgacgtatcttatgatgttaatcaataattgctaaccgaattttagattaataattttataaaatagctttttgttttgcttgtttaggacaatcaatttaaggtttggtttgtacgtgacacaaggcaacataaagggtttaggggcggcttttctagaacacaagtcaagcaacaggcctctcataaagtcaatgacagaaaattttcttcttgataattatttacaaggaagatcgtcttcttaatataatgattggatgaagaaaataacaccttttttattattgtttgacagaaaataaaacaggaatttgaagttacactttcttgcactcttccttttcgatttttgcctcattgttgtcttcttctccactctttgcctttcttaagtcttgctgtctcttatacacacaaatagatgcaacatatatatataatcatgatgccttttctcatttgtatccatcatcaacgaaatcctaattaataacgaaaaggagaattctcgtaaggtata

SEQ ID NO: 14298 - DNA, 3000 bp, Unknown
  misc_feature (1)..( 3000): cDNA_ID_3033327_gDNA_ID_2684103_Annot_ID_190324 3000 nt of promoter + ATG
tgctataacggtgacaaaaattgttttttctctagagtagtgaacagaatcatacagattttatttttatttgttaaggtttgctaggcatagaaaaatttggggtgaatgatgtaaatcttttttacctgcagctgtacaattccgcacaaagaagctgcattgcaatgttgtgatgaagttgatccattggcaaaggtctgatttgctaaaaacagcagataattttgttcgcaaccccaatcactatcagatagcataaatagccatcctgcttcaacctgaatgtttacttttaatatcatacagtctataggagctgtgaacactatactaaggagaaaaagtgacggaaagttgttgggttacaacacagattgtattggttccatttctgctattgaggatggcctacgaagtaagtctatgttcacagctttttgctccatttggagaagtttcggttttagtcatggagccttctcctctgtttgttttttcaggttcaggtgatccaagcagtgtaccttcttcttcttcgccattggccagtaaaacagtggtggttattggtgctggtggagcaggcaaggctcttgcttatggtgcaaaagaaaagggggccaaagttgtaattgctaatcgaacttacggtaaaatacatgtccttaattggaaatttcgctttgtgaacaccttagattattctattaccggtcatgctcgaccttgacaatactcttcttctcctcgtcttttattggttataatgttagatgtagtaactgatgatatgatttgttttgttcctgatgttgtgtttctaaagaacgagcactagaactcgcagaagcaataggaggcaaagcgttatctctgacagatttagataactatcacccagaagatggcatggttttggcaaacacaacatctatgggtatgcaaccaaatgttgaggagactccaatttctaaggtaagctctccttgtaacagctcatccttttgttttctataggtaacgaaggaactgttctatcctttttctgttattgaaataccaaaagccagcttatcgcatgcaaactttgttgaaatcttaaatctataagacaaattagtaagctagcttgtctttgtttcccccaggatgcattgaagcactatgcactggtctttgatgcggtatacactccgagaatcaccagactgttgagggaagcagaagaaagtggagccataactgtctcagggtcagagatgtttgtcaggcaggcttacgagcagtttgagatcttcaccggtttacccggtaagtgacactaatactggaacaaaaccatgtgttgtattaaaatttaaacaaaagaagcctacttaatggtggtccctttgttgtgcagctccaaaggaactctactggcaaataatgtcaaagtactgagacatagcttaagtgtgtgtgtgtgtacttccatgaaaagtcgtcgattcaataaagctttagattgccatttgtatgttccgagaatgtccttttttgaggccataagccgaatgactggttctctctttgtatttatatatatgtataaactattaagcctaacattaatcttttttaagtttctttgatttgatgagtctactataaaaaagaagggttaagttgcatactagtcactttttaaaacttaattggaaaagtagtcactttactattcataatttgtaaaatagtcatttttcactgtttgattcgtacacttagtttgtacactatttttagtgtacagatgtatataaaaaatacacagcgtacactttacatttgcacactaaaagtgatgtacaatccaagtgtacgaatcaaaccgtgaaaaatgactactttgcaaattatgaatagtaaagtcactactttcctaattaagtttgaaaaagtgactattttgccaacacacccaaaaaagaactacaccaactatgactcggtgttctaaatactgttcttctgtaatgaaagcttgatttgaaactcaaaattgaaaatttcgtaaatttcgtaatttgatattattagaaaaccgaaagaaaacgcatcggatttcgagatttattaatttcgcacgaacgaattatttgattcccgccaaagcaaatagagcaaatataggaattacagtttaacccgccaaattgaaaatggattataaaatctcacaaaagaactttcggttcagttttctctgtcttattttcgcgggcagctcacatttctctccaccgtctcctcgtcttctctcaccaaagtaagcttttttcttcttttttttctttcagtttcatgtttccattattgattgattcaaaatctcaaccagcaaagaattaaaaaatgattcagaactgattctcaaccatagcgtttattgctctctctctatccacattcacatcacatgggcttcgtttctttgtacttcactttccattttgattttttctttcccaacttgaatttgatttgatgatgattcgtttagaatactctgcgtcatacggaggagtcttaattctaactaaaattgaaggtttgatatgcaattactttaaaatacgtcatcttttctaattaaccccaaagttgattaaatttactaaaatcatcaaaagaagaaattagatggcatttagtttcacattacaggcgtcgtgaactttagtcggattcattcctctccggtgagtttctgtaatttctctcactctccaattgagttacctcctatttcataattattcctctgatcgtataaaggttttaatttggagaatccaccctcctctgttttatccgctccacaattcgccgccggttttgtctctgctgttcgaattctcgattctccgatgagttcttcaactgttttgttttgttgagctccttacttttaggtttctttctcatttgctttaattacttccgaccaaaatg

SEQ ID NO: 14299 - DNA, 3000 bp, Unknown
  misc_feature (1)..( 3000): cDNA_ID_3015858_gDNA_ID_2684103_Annot_ID_190321 3000 nt of promoter + ATG
ttttttttatccacttatatcaataattaaatatacgtatgttgttgtcactctactcttttattactggtctttacttctgtcttcatttattaataagattctttaattttccattatctactaattaacaaaaaaaatcgacaaaggaaaaatacgaatcatattcttgtcgttgattttcgatgatgatttgatgacgatgaaaattcaacgttacgagtttcagaccctcatgttcttgtcgattgccgtcactttccaggaaacatatcattatcccttacttcttacgcatttaaattaactactgttttttctttctaactatattatgtgattttctatgtatagttttaccaacaacaaaaaaagaagaaatttaaaggaagctcacctttccaaaatacttgaaagtgagaaagaaagaaaaagctacttttgaaaaaaaaaactttaaatttaggttgatgaactttataagcggctttatctatctactaaacaaataatcgagtttttaattcatgaccagaatttcttgtataaactaactactcgtcttatctcccacgtaatagaccaccagggtgctatgattataccattccaaagaaacccataatgcactttggtgggttgtgtagatttatatatggtattaagttaatgatatgttttatgaaaaaaaagagagttaatgatatgttaattaagtgggttttgtttatatagttgttgtgtacatttatctcaaatattcaaacatacatatatgatgttttgtacaaaccttttttaaacgcatttatttaaagagcactaaaacatttgttaatacaacatttggcaaaccctgtagaatctcttaaacaaaattacaacttttgcttaatcaaatttgtagttctacacgaaccaattcataggacatgatttataaatcaacatcgcatataacatctatctatgttttcttatatgaaaatttagtagccgtttgtttatgcagcgcgtattctaacagtttgttgttatcgcaatatattttatatttgtatgtacctatatatagtaataaacaagtttgaatgcagtgaaatgcgatgcacatctcccaaaagagcttgtctcgaacactcgacaatcatcgtcatcgtaatagaatccacacggtgctccggagaacttatagctcatgttggattctatgtttcttctgcaacatgtaagctgtaacaagacaagtttgtctccatcgttaaagcaaaagataatggaaatttataactttccatttgtgtttagtcattctacactgaaattaatgtgtttgacaagtaaattagttcaacgattagtatggtcgaacctcgtaggatggagcatcgtgtcccactcctatcactatcaattaccaaacacaatgggaaagtagacactggtcaaagtatcatatgtcaaaaacatcatcatataactaccaacccaagagaagtgtgtgttcattgaatcttcttaaatggaataaaaattcgatttgatatcaaagatttggcttactcatctctactcaaagtcatgctttacataaatatggtgggtcgatctaggctatctaattaaagccaatttttagctttccttgggaagaccaaacaattgagagatggttaagttttgtagaaaaagacaaagatctccaattgttaggcttttgtttggttcttcttttaggcaaaccataagagtggttagctcgtcgggtaagaaacttatagtatctatcgtgctcgctacatatcgcttgctgatcaatctaacttgtgatcagttttcaagtacctagattagatgaacgcatgagtaattcgatttaacactcacagtacattcatttggaaatcaacaagggtgtcgaaattgatcacaatacaatcaatctgcacttaagttttagagaatcctacaaagagtttcgatagaactctaaattgaaacgtttatttgatctatgatagccataacaggcaaaagcaagcttcttttgtcttatcacttcattttctgctctgtaaagaggacatggcgattaactcgaggatcgtacttacggaactcgagcttctcaagaagtcccttggtactcttcctcttgacatagaagaatccagttccagctgctgaaactagacggatgaacatgaacgtcttcttcctcttgtctcccatttctttatcaagaatgacatcacattacattaccattcttttcattacagataactaaaatcctccgaactgatgaaacagaggtcacaaaacgtataaagtttccatttttttatagctataattcgaaaatgcacaaactttagaaatggatttgtttctaaatcatatgggacaatgacttttctttgaaatctatgaacctagagattcgaaaatcaagcggaaaacagatctaaaacctagaatccagcaaagaaatctcagttcgagaacaaactacaacaagacgaacacgatacaagcaaagaaatgaaaaattagcaagaaatgagtcaaaatccaagaagctagaatgattagcgtacctgaaaattcgaattcgacggagtccgaaaattgatttcgccgacgaagatgacgggtgataaaccctacaatgagaaatcgggttttgaatcaaaccaaatgggctattaagttgagcccaatatcagcccagcaaagcgacatcatcaaaacgcagcgtttaattgtcgagagccaatttgcttttgttgttgttcttcatcatcgcttttagttctctcagtggagaagaagactcgagtcatctgcagaaaaggtgagagataatgtttgcaaattttcatttagatttcgaaacttattttctcaaatttctgatggattcaattgatttttcagattcccgatcggattggatcatataagattttagggatttggaaaaaatcttgagctatg

SEQ ID NO: 14300 - DNA, 3000 bp, Unknown
  misc_feature (1)..( 3000): cDNA_ID_3015862_gDNA_ID_2684103_Annot_ID_190319 3000 nt of promoter + ATG
ggtttgttcttgatgaatcaactgattgggattgctcctcgacctcaccggattattctccgcagaagacggagagcgcctacacaaacatgagaaaaggttccaggaaataagtttcaaaagttagtgagaggatagaacaataaattagtataaagatcaaggagcaaagacacaggtatggttcaaatcattatccacaaagagtaaagacaccacaaaatgaaatattttatgacctttttaaaaccaatcaaaaccaacagcgaaaagagaatgagaaacgaaaacattatgacactgacaagaggataaaaagctcacatccaagttcggctagaaagtggctgaaaaccatctaccaagtttccattctcaaaacctgatactggcgattgatttcttcgagaaaaccccatattctggtcaggaagaatatctgaccgactgcaacaaaaattgagaattttatagaccgatattagttacatcaaaaaaaccaggatatcagtaaacaccatggccatgtctatgacatctcattcataccacctaggccacacaacaaactgataaaatctgaaagagtaagatacatgatgcagaacaaggaaggtgtaaactcccacaaggacagatgttaaaaggttaaggataagatagggatacaaaacagacagaatgtttatttcagaaagatcctgctggcataaatgaccttgatctaaaggaaatggcataaacgacctttttctttttgaatcttgtgatcgaccaatctcaacagcatcagttcccattctggaaagaatgtgagatgtagcaggtggagacgtggctcgactatgttcaccatgatctttcaagaaattccttgatccatcgtgcccatattgaggatttaaattaggcctgtgaggaaaaatgaagcaggtaaattcagctaagtcgttaagaaaaatccagcagcttgcttattaaaggctataagccaaatccagcgataatgatctctttagagcttcaaagccgctgccatagtaagcccttatgtattaggcagagaaacttatagcactccgccacactctactttcttcctactgctataatttcaattgcagaaactgaaagcatttgagatgtgtgattaacacagccgcatatgagtaatgacactcttcttagtcaaaatatgtcacgtacacttttacctctgaactccaggaaattggtaaggtctcacagaggggcttgtacgtgaagcttctggaccccatgctattccattgaaaggttctgggatcctgaaaaacatagcatcaaagtgttcttataactttctcggcgtaaaaattagtgcaacatatagaagattcaagcagaagttttacaaaaagaatcaaagccaaagaaaacagaaaatttggtttatcccatcttcactgttttgggttcccgaagatcctttacaggtataaggagtgaaaaaaaaaaaagagagccataatagtaagttatctgacctttgaattccaccaggttggtaaggttgtcctgaggagggtgatggattttgaaaagccgacggagatggtattctattaattggaggaacactgcaagcaaaaaccataataacttaggctagaatctaaagaagaagaaaacccgagagtagactgaaaaattaataattgaataagtaaccaacctaacatcatcattagacacatagaactgaaagagaaaaggaataaaagcaagccatacgattaagaatgtctaacctttgaaccccacctggtcggtaaggtttccctatagagagctgagggttttgagaagccgacagaggtggtgctcgctgaattgaaggaccactacaagccaaagttacgaaagaaaactgagcgaatttacgaaagaaaactacaacaagtagcacaataggctcttcctatggaggctcagaaacaacctaacatactcgcatagaaagaaatcaaagctgtagagctaaggttaatctaaccttcgaattccaccaggtccaaaagattgtcctgcaaaggctgaatggttttgagacgccggtggttgaattgatgaatcactacaagcaaatccaacattcgcagtgtgtaagaataaaaaagaaaggtacaatctaagaacaaaaagcaaagtaaagcaactcgcagcttctcctaaggaagatgaagaagcaaaacccgactgcctaagtgatatagaacacaatatcatagaaaattcaagatacttctctcattctcatgatcctaaacactttaatacaacgatagcatatatgtaaatttgacagttcaaaaaaatctctgagtataatagatccatagcgtgaaatgaatcctaaaaatctcaaaactcgaagaaaagtccgattgaagcatagatacatctatagagaatgaagagcacacctagtggttgaagaagcaccgaacggtgtaaacggcgctggcttagagctcatcggacctaagtccttcccgaaaggcctaaacgccattctctgagaaaattccttgacttgattatcgctgcctctcttctaattctccttcaaccttcgtttaattacgtcgccggctaaagtcgaaaccggagcaaattgaattttctgttctggtgacgcctcttccgtccggcgaggattattttacgtttaaaaccaacgacgtcgtttttatttccgaattttatgttgggccttttaagtaacaataggcttattatgggctttggtcaaggaacaagaataattgttcaaccaagaagaacgtgcgcatgttgtcaccatctcccttgagcctccttgttttaggtagaacatcaacttttcatgaccgttgacattttttttccctctttattttccgagaaaaaataaataaaattatcctctagttttcgatctcgatcatctggatccaagaaattactacgattgctata

SEQ ID NO: 14301 - DNA, 3000 bp, Unknown
  misc_feature (1)..( 3000): cDNA_ID_3015870_gDNA_ID_2684103_Annot_ID_190314 3000 nt of promoter + ATG
tcttactattttacttaacttttggaattacagattttaccagtaccactatatatatgatgagatcgtatgatgttatcagggatttgatcacataaaaatcattattttcttgcatgaaaagcatgcattaatacattttaggggagtttgttacagtattctaattttggtacttccaaaaaggaaaaaaaaaaacccgccgacgcaatcaagtgtaaaaagaaatgacagcaaagcaaattgatcagaccaattttgtcctaaaaataaacaataatttttgtttccaaaaaaaaacataaaccagtttctaagaatctaaagaagaagaaacaaaatctaaaaattcactccgatttcattggacaacagacttgtcttgttcctatttcataggaaatggattttttttggagacaaaattttgtgtgagaaacagtccgaagttcaatctcttccccacatttagactgctaataaaacaagcctctccccaaatcctttattctagcctttccctaacaatggctctattaactaatcaatctttttaatttgtaatgtttaaaccttttttaaaaaaaaattaaaaaaaaaagtgaaaataataataaaagagtttacctgagaattaggttcaggatggcctcaaggagcctctcctatacacaactcctaggcctcctgtcctttatactcctcttggtcacaaccaccactatggcggttcgtgttggagtcattcttcataagccttctgctccaactcttcctgttttcagagaagccccggcttttcgaaacggtgatcaatgcgggactcgtgaggctgatcagattcatatcgccatgactctcgacacaaactacctccgtggcacaatggctgccgttttgtctctccttcaacattccacttgccctgaaaacctctcttttcatttcctgtcccttcctcatttcgaaaacgaccttttcaccagcatcaaatcaacctttccttacctaaacttcaagatttatcagtttgatccaaacctcgtccgcagcaagatatcgaaatccatcaggcaagcccttgatcagcctcttaactacgcaagaatctacctcgcggatatcatccctagcagcgttgacaggatcatctacttagactcagacctcgttgtggtagacgacatagagaagctgtggcatgtggagatggaaggtaaagtggtggctgctcccgagtactgccacgcaaacttcacccattatttcacaagaactttctggtcagacccggtattggtcaaagttcttgaaggaaaacgtccgtgttatttcaacacaggggtgatggttgtggatgtaaacaaatggaggaaaggaatgtatacacagaaggtagaagagtggatgacaattcagaagcagaagaggatataccatttgggatcattacctccgtttctgctgatattcgccggtgatataaaagcggttaatcataggtggaaccagcatggtctaggaggtgataatttcgaaggaagatgtagaacgttgcatccgggaccgataagtcttcttcactggagtggaaaagggaagccatggttaagactagattcaaggaagccttgtatcgttgatcatctatgggcaccgtatgatctgtaccgttcatcaagacattcattagaagagtagagaggcaaaagaaaaaaaccattaaacatggcacatataggagaggagaagatacaaaagaaagcaggggtttttagcgatcaaagagagccaaaaatgtttcattacaaagtgaaaaaaagttgtaatgttaaacacattgttgtgcatttgagctcagagtgtgtttcatcacaagaagagatagatggtattatcatcatcatcattttttttttctcctttcttcggttttgtttccctctctttgattcaaacctttagaatattcctcgtgtaatatacataggtacaaacaaaatggaggattaaattcattctttttataaacagagaatcgaatctaaattgtttacaaatcatcaaaactttatcactaaagaaaaaagatccgacacagaaactagcgacactgtttcgaaattccggttacagacagtggctgtctgaaatcaatctacatcaatccagaacaaaacaggaagacaataagttttaccagaattaaggcgagagacgtcacaaatctgcaggattctccaacaagcaagcataaggaacttttggccggtatagttttgtccgcttcggtctcggtttagtggaattcccgacgacaagcttacaccgccgatcaatttcgtgtctttctttgggttagattccggtgtctggtaatggcgaatcactaactaacggattctctgatttgtaactaacataacgcgggaaaaaaactaaaggacgagcaaaccaacctcagctgattattagagaaaaatattgatatacagaagaaccctagatacctccgatcctcgaaatcgatttgtatcttcaggggaagaataaatgtgtttccttttttcaaatctgtaaaatttataatgataaagatgacttttttattattattattaaatttgagttgagactcgagaccatgtcctttggaaagttaataaaaaacagagtattttttaagtaatgttattacatttggtcaaaaataaaggtggagcttttttgctttgcttcttctcattctctctctctatctctatatgtatctctgtctatcttcttcttcgtttcaagccctaaattgtgtatcttctttgttgcaatcttctctacgaagagaatggtgaagagggtcaagaattgagagactccaaagtgaagtctaatcggcacacaaacttgaagcctttccgagcggtcttgcaatctccgtcgtgttaattaaaggaagggttttgcgttttctttcctgattcggtcgcttctatggacatg

SEQ ID NO: 14302 - DNA, 3000 bp, Unknown; identical to SEQ ID NO: 14297
  misc_feature (1)..( 3000): cDNA_ID_2729823_gDNA_ID_2684103_Annot_ID_190309 3000 nt of promoter + ATG

SEQ ID NO: 14303 - DNA, 3000 bp, Unknown
  misc_feature (1)..( 3000): cDNA_ID_2729831_gDNA_ID_2684103_Annot_ID_190305 3000 nt of promoter + ATG
aacttgattatggtttatggtgatgacttgcttccggcataactctttctgtgtcaagctctaaggcagtaaggcttatatttgggtcaacatcattatcaccatatcaatttacttactggttttagaaattggatacaataaacatgttccgagattgttggaactcagccgccatcttgaaaagttagatgatacttaaattattatgaacaatgctccataaacatttataaagtaacaaaattcaaaatgcgagtatgaatcacatactgtatgatgataacataatccatgtagctatgtataaagatacgatgcttaatcaaaagggttctctgtagtcaggggccaggattcatctaaatctttggttggaatgggttgccgcacataccgataataaaattgtctcggtcttcgatggatccgtgtctggagacagcaagccaatatgttgttacagacaatggcatctgcaagaaaccatcatgaaaacgttaacaattacagaaaaatgtgcattccgtatacccgcaattcccaaaacatagttcccaaacttacagactatacaatacaagcctatgaacttttgcaagaaactccctcagcaaagcagctacctttcttccttatacttggaagtgttttcaaggattcaagacatattgaaacatgcctaatcaactaatttagccaggtggttatctagattctctaacaaatgatgtcattgcgacagcatatcattatgaaaacccataaaaacttagtactagtgcatcgaactttccaaagcttattgctcaattgaatctaagcaagtcaaggtttttctatcaatcagacactggaaagtggagtgctttaaagcaagcaagcaagtagagtacctctgcacatcaaatcctgacaatcctttgatgaactttagatttctcagcatcgataatcgattccacgcggttaaccgcatcatcaagcctccctttggcattcaccacaacgtaatcaaagttctttagatgcctaacctcttctctcgccgtagcaactctaacaagcaactcctcttgactctccgtcttccgatcaatcaacctctccaccatagcaagctcactctccgccacaaggaatataaacacagcagagttaccaagtatcctccttaacgtctgagctccttgaatatcaactctaagaacaatgtcttcccctttggccataaattcctgaatctgcttctttggaatccctttgtattctccataaacaagtgcgtattcaagaagctcttcgttctccaccattgacaagaactgatctctcgagacaaagaaatagtctttaccatcaacttcaccaggtcgcatcggacgactagtggcggtaacaacaaaatgaagaccttcacgaacctcacgaagcttgttgatcactgcgtctttaccaactccgcttggaccgctaataacgatgacgatctgattcggcggcgggatgattggatcggcggtgaaagaagaacccaattgaaattcgagggaacgaagcgactcgggtttggtgggagattggataggggacgaattagggtttcctgggatatgggtatcggtcattttcaaggaggagtacgagagagcagaagagtgacggagtggttgaggaaaagagcgggggatgaagatgggtttgttggggaagatgatggagcgagagaatgaagaacagagcttgcgaatcatttgaggagtaaagtagcaacctttgggattcccaaagaagtttggtggagtggattgggtcactcgagccaccgatgctttgccgcgattttgacctgtatcttcgcttaagagcttagcacgatatcaactagggtttacttgttcaaaattccttttggtagatattagcctaatatatacacaaaatattcgatttatgatgaaatttgcacagaataatctatatttagcagcataatatttttcgattagccatctatttattaaatactcgattagcctaatgattttttttgacataagttaaaattgactcatgttttaaaaataaaacacatgtaattttgtattggtaaatacaattcgacttgagattcgattacaaaactgttaaaaagataaataaaaaaagaatgaaaaaacttaaaaaggtaaaaaaaattgtatctctttatttgatgtattgttctattttactggttggtcataataaaatcgaataacacttgaacttattttatgcgctaatttatgtattattattattttgtaggtaaacacaaatcttaattgtgagaaatttcagattatgatttgcaaagagagtaaagaaaatattatcagtttaatctccttcctaaaaataaacaaacaaatatttgctgctaaacacaattagaaaggagatgtaataattttagtatttcttaagttgcgacgttatatattcgcaacctaccaaactgttgtgtttaaaacttaaaccgatctatcaagcaagtggttcctctctctctctacctctcgtttttggccaacgtcgtcgtcttcacgatccacgacgattcagttcttgagttccggcgattatcggtctctcacttctggttccgttgaacccctcatttctcttctcgcccgtgctctcaaattccgatatttgcccctgtgattcgaaaccctaatttcgcctatcaatctggaaaatctctcaattcgaagactttagcagcgcaaagatactctatccgggtaataagatcgaagaaaccatcaatttcttaccaaagtcgtgattcttggatctcgtctttgtttgatggacacaattagggtttccaaggaggttcctggatcttcgaaatcgaccgcacagtcgctcacggagtcgacctctcgcacggaaaccatcaatggctcccacgaattcaagatcagcggctactctttggtcaaaggcatg

SEQ ID NO: 14304 - DNA, 3000 bp, Unknown
  misc_feature (1)..( 3000): cDNA_ID_3015890_gDNA_ID_2684103_Annot_ID_190303 3000 nt of promoter + ATG
ctcaataaataagacgattgtcactttaaaaagaaaatagtaattatccaaatatcaatttcagagatttttttggctaaaaagataaaagagctagctcagatgttataattatcagtaaatggaaaaccgttggagatttagtacaactaacaatttttgataagacaatataagaattttcttcttcttagattagtagttgtctattttcaataccactttagcttaatcaaagtgtccattcacattattcacaaaaatagttcatctattttattaatcttcttactttgattcaagaattccttttttttttgttgttgctcaagatagaatttagcttatacataaaaatgatactttttcgcagttttaaaattctctaagaaaccaaactgataaaatttaaagcgcaagagaatattaaagtaagaaaaagagtaaattattacagaatctcctcactaaacgagcttatacgttaatggctctaatcttgaatatgttgttgttggccgttgaggctgtgtttaatcatgtgacttttaactccaaagctaccaaaagtcttcggcccaagagaaaagagctacatgagtacattctacattcttcagccaataatgagactccctactatcttaattattgggccgaatatgggcctacattaactatttaatgggcttgatagtattgttagcatctagctttttatgattttgtttcagtgaggagaaaaacgctttctcaattatgaactctgcatctttgtcactgattcttctcacctgatctgttgcagatatttggtcaaagagtttattaaaagataacataatataaagtgaaaaagcaatgctgctttctctcattggttgtgcatagagcaaggacagagaaaaacaggttcgtacgtaagaaacacacattaactgtgttctgcttcctttgtattctctcacttttctcttttttcagaattcaatctctggaaattttcttcctaaagattaaagagaaccgtttggaccagatcagcttgcctcttggtaatggtctctcttctctttgttcccaatttctgtagctttcttctttctccctaactcgtctgctctctttgtctcttcctctcacagttcatacgtcttccatggcttccggtgatgttcttcctagattcttcactgtcttcctctcccattgcagctccgaatccatggtgagatttttctctggaatatttcatggaaaaagctgcttgggttgatatgtttcttggatacagtaacgatgtgaatgagatctgcaacattatcttaattcttaactctatatgtttaaatctcttgacactgacaaaagttttaactttcttcactaatgagctcaggattatctctgtttgtgttacttatgtttgaatatgatagagtatgtcaaactaaacactgaatttcctcaaagagttttctcctttgttgaaaaaattgaacaagaggtcttggtcttgttgtttgtctgtttacctccgcttgcagacagagtctttagcttatattttgctcacttttaacagtttagtttatgctacatctttgtgttgagcaggtgataccaaggtcttactacaatcttttaccacgtccgttgcccaagactgcgattctcatcggaactggtggaagattttggaaagtagcaatgacgagcaagcaagagcaagtgtattttgaacaaggctggggaaatttcgttgctgataaccagttaaaagagggagaattcttaacttttgtgtttgatgggcacaaaagttatgaagtaagtatctatggtcgtggagattgcaaagagactcgagcagtcattcaagttgaagagatctctgatgatacagaagatgacaacgtttctcttcatagccctagcaatgtttcacttgatagccttagcaacgattctcatcatagcactagcaacgtttctcttcgaagccttagcaacgattctcttcatggtgatgctgagatagagagcgacagtgagtattctcccgagaacctaccctcagcctctatatctgttgaatccgttgaggtggtgaatccaacaacaagcaggcagagaagttgtaagtaaacattgttcttttaactgatgcttataaccgaagctgtttagaatttgatctcaaatgggaattttgcagacaagaggaagaccattgagaatccacatctgtatttggatgatccaaacaatgtctgttttgagacgtgtcttaagcttagaaagtttgagctggtaagacttcattagatattattatctcgtctcattaaaaatcctttcacgagttgatgattatttttctaactaaagctctatatacattatgcacagttagttcatgcacagttggtgaaagactacggcttgatattcagcgacaatgttgactatattgacggatatggaaaactaaccgcgaaaacgaccaagtgggcagatcaacgggtttgcataaacaaatggcagaaaatatgcgagagaaaccagttcacagagaatgactccatcctatgtgaaattctccgcaacgaggacaaagtggtttatgcaatcaagattcacatcttccgcgatgcagcagcaagcacttgattctctgatgcagttctgcaattgtgtttcttctctttcgagtctagtcttttgtagtaaactattagaatgtctaatttcaaaacatgtttaagacttttgagttctcttgtagactttgaagtaaacacaatgaggagcaggcttaagcttacccgttaatcactctgtttctcttacaagttacaatcatgtaaaatgggttagaatgatcgttttaatatgttaggtacagatttcgtaatttctcgaaaatgtgatatctcttcttcacaacagaagaacagattattgtgaaagtcaaaacaaaaaaaaatctctgaaaca

SEQ ID NO: 14305 - DNA, 3000 bp, Unknown
  misc_feature (1)..( 3000): cDNA_ID_3015894_gDNA_ID_2684103_Annot_ID_190301 3000 nt of promoter + ATG
tgtgtttacttcaaagtctacaagagaactcaaaagtcttaaacatgttttgaaattagacattctaatagtttactacaaaagactagactcgaaagagaagaaacacaattgcagaactgcatcagagaatcaagtgcttgctgctgcatcgcggaagatgtgaatcttgattgcataaaccactttgtcctcgttgcggagaatttcacataggatggagtcattctctgtgaactggtttctctcgcatattttctgccatttgtttatgcaaacccgttgatctgcccacttggtcgttttcgcggttagttttccatatccgtcaatatagtcaacattgtcgctgaatatcaagccgtagtctttcaccaactgtgcatgaactaactgtgcataatgtatatagagctttagttagaaaaataatcatcaactcgtgaaaggatttttaatgagacgagataataatatctaatgaagtcttaccagctcaaactttctaagcttaagacacgtctcaaaacagacattgtttggatcatccaaatacagatgtggattctcaatggtcttcctcttgtctgcaaaattcccatttgagatcaaattctaaacagcttcggttataagcatcagttaaaagaacaatgtttacttacaacttctctgcctgcttgttgttggattcaccacctcaacggattcaacagatatagaggctgagggtaggttctcgggagaatactcactgtcgctctctatctcagcatcaccatgaagagaatcgttgctaaggcttcgaagagaaacgttgctagtgctatgatgagaatcgttgctaaggctatcaagtgaaacattgctagggctatgaagagaaacgttgtcatcttctgtatcatcagagatctcttcaacttgaatgactgctcgagtctctttgcaatctccacgaccatagatacttacttcataacttttgtgcccatcaaacacaaaagttaagaattctccctcttttaactggttatcagcaacgaaatttccccagccttgttcaaaatacacttgctcttgcttgctcgtcattgctactttccaaaatcttccaccagttccgatgagaatcgcagtcttgggcaacggacgtggtaaaagattgtagtaagaccttggtatcacctgctcaacacaaagatgtagcataaactaaactgttaaaagtgagcaaaatataagctaaagactctgtctgcaagcggaggtaaacagacaaacaacaagaccaagacctcttgttcaattttttcaacaaaggagaaaactctttgaggaaattcagtgtttagtttgacatactctatcatattcaaacataagtaacacaaacagagataatcctgagctcattagtgaagaaagttaaaacttttgtcagtgtcaagagatttaaacatatagagttaagaattaagataatgttgcagatctcattcacatcgttactgtatccaagaaacatatcaacccaagcagctttttccatgaaatattccagagaaaaatctcaccatggattcggagctgcaatgggagaggaagacagtgaagaatctaggaagaacatcaccggaagccatggaagacgtatgaactgtgagaggaagagacaaagagagcagacgagttagggagaaagaagaaagctacagaaattgggaacaaagagaagagagaccattaccaagaggcaagctgatctggtccaaacggttctctttaatctttaggaagaaaatttccagagattgaattctgaaaaaagagaaaagtgagagaatacaaaggaagcagaacacagttaatgtgtgtttcttacgtacgaacctgtttttctctgtccttgctctatgcacaaccaatgagagaaagcagcattgctttttcactttatattatgttatcttttaataaactctttgaccaaatatctgcaacagatcaggtgagaagaatcagtgacaaagatgcagagttcataattgagaaagcgtttttctcctcactgaaacaaaatcataaaaagctagatgctaacaatactatcaagcccattaaatagttaatgtaggcccatattcggcccaataattaagatagtagggagtctcattattggctgaagaatgtagaatgtactcatgtagctcttttctcttgggccgaagacttttggtagctttggagttaaaagtcacatgattaaacacagcctcaacggccaacaacaacatattcaagattagagccattaacgtataagctcgtttagtgaggagattctgtaataatttactctttttcttactttaatattctcttgcgctttaaattttatcagtttggtttcttagagaattttaaaactgcgaaaaagtatcatttttatgtataagctaaattctatcttgagcaacaacaaaaaaaaaaggaattcttgaatcaaagtaagaagattaataaaatagatgaactatttttgtgaataatgtgaatggacactttgattaagctaaagtggtattgaaaatagacaactactaatctaagaagaagaaaattcttatattgtcttatcaaaaattgttagttgtactaaatctccaacggttttccatttactgataattataacatctgagctagctcttttatctttttagccaaaaaaatctctgaaattgatatttggataattactattttctttttaaagtgacaatcgtcttatttattgagccatttttttgacaaaacaattttttttcttttcacttctgcagagaaaataggagcgacggtggagagagagaggacaataacaaaacaaatgcatgtgacgccaatcaacaccatacacgacgtattaattgtttaaagtaaaagacaacagtacccctaccggcacaccgacgcgacttcgttgcccacatg

SEQ ID NO: 14306 - DNA, 3000 bp, Unknown
  misc_feature (1)..( 3000): cDNA_ID_2729846_gDNA_ID_2684103_Annot_ID_190299 3000 nt of promoter + ATG
tgaattcttggatgataaataagtacaagtttaaaattttggctcaactcagcttctctctgtttcattcctctgttctaatttcttaatcctctacatacggtaatttggctgattgagaatttgggtttcatataatcatctccatggattctgaaagcaatattctataggagaaagggtaaaagaatagaccaaatatttaaggcagtgtcttaaggaacataatgccacaattgggtcagatgaataatctttatcattgtaaagcctaatattaagaagaaaaaggagataattggaaaccaaaagggagattaaagtttacatacttcataatggtgaaagttcaagcaaagtgtgtgtagattatgactatattattgttttgttttaacaaaaaaaatgatatattcttgatatcttttggaagtagcaagcgaggtatatgatcaacttgataaatagaaataacgaagtatttgtcggcgtcacacataccaaattttccttcaccacatgaatataattatctcttagatttgctggtttattatgtgaagcatgttttttgaataaacagatcatattatcaattgagacttgaaaatatttaaaatgcatagctccatttggtttttgtttttatcgtaaattaaatttatgagtcgaaaactagactagttttttgagacgcacgctattgataattcaatttggtctctttttttttcatcaattcataattcaatttggtcttgactcttgatcaacatgatgaatcactaaaacaaggacgacattccactatccggtttaatctggttaagatatttttgactcctttctatatggtgtaaataatctacaaacaaatttatttccaaatctttgtggatcttcaacatagtttttttttgtaccaagcaatttataacaattgtggtttaagaacattggttgaggtttggtttggtgtacaatcatcactggtaaaccgaaattgacttcttctttttccatttttcttttagaaaattcatagtattaaagtacaatattcctcttgcatttactatttggcacacatatatacaaaatccagtatcccactcttgtgagccagccatcaaaagaagaaagagagagagaaaaaatgaatatgaaaacatcaaagatgaagttcacaaaagagatgatagagtctatcaaagacaagctcccgaggctcagcttcctccgacaatgctacggtggttgcggcgaccggacgcatttactcccttgctccatcgccaccacttccacccgcttttggaacctctccgaccgtcccgtggagctccagattcgggtcggttcaattctaaaacgggtccacactctcaaacctggccgttccaagaagcttagacacagaagcattcacagagcttacgttgatgaccaggaaggacgtagatggctgtactacgacgacacttgtctaccgtacgtatgggttcacgagactggtacggacttgtcgaagatggtgaagcaacagtacgtgagtctcgaggatctgagggattactcggagattagggtttttaaggatttacagagaggttgtgtcgcagttgagaaaagagacagagcttctgctttgtgttgattctccttttctcatgcttcgaattaatgtcttgattttctcttttgaaacttatcgttattggttagtttatctaaattatttccaagttatattatgtgatacatgatgcatgtataactccgtctgactcttcttgaatttggatttattgggattaaacaacgtgatcacaagttgatctctttccaaaaggggtaactagatctctgaattccaaactaatcacaaaattttatttatcttcgtcggttgatatttgtggtagttgaggattatatgtagtggaaaaagcaaatattatatttactaatttagattcagtcagaagatgacattattaagttaacacaacttggttagtggtgttgttacttatagtataagtgatctttgctatgatgatctgcgaatgatttataacccaaaaattagtggttttctattattgtttcccaaaatggtgatgcaatatttaaataaagtttcttataattaagactatccatcctgaagtaaattttgttctcttatttggtcgagaaacaaatactatttagagagatcttatctttacacatttatcgatgatcaataatgtgtgtatttattttgatttttttcgttggagaaaggcaacaaaatccagtgaggtgccttgatggcaggcaaaataatgacctttcctctgatcctctcccactttgatagtccattaatcaattcattcaattgtgtcatatatccaatatccaatattcaacatttgatgcaaataatatacttactggttcaaactcaactaattagtgcaactttaatggctgacatgatatatagtaatagcattagatacgaagtttttagaaatcgatttcccgcatgagaggtaaggtatattgtagactcatagaaaaacatgtctctaatctctatagtctatagttgtagagttgacttttgagtagcataatttaattattacacacggtaagttgtgattaggtggtaaaaactatacaaagtcaaagttacgaagaaaactgaacaactaaccaattattttatgtaaacattaacatattaattaattttctacaacaaaagtctaaaaccacatattaaaccgaactcaataccgaaaccaaaccggaaaagagaagttttgttactcggtttaaaaagtaaaaaagagaaaagtcaaaaaagcattaacgaatcttgaacaagacatcttctagttcttcttctaccaaatcttgtttttcttcagtctctctgcttctcactgttgtgctttctgtcttgtctctgtctttcccattgtcattctctcaccaatg

SEQ ID NO: 14307 - DNA, 3000 bp, Unknown; identical to SEQ ID NO: 14292
  misc_feature (1)..( 3000): cDNA_ID_2729868_gDNA_ID_2684103_Annot_ID_190292 3000 nt of promoter + ATG

SEQ ID NO: 14308 - DNA, 3000 bp, Unknown
  misc_feature (1)..( 3000): cDNA_ID_2729795_gDNA_ID_2684103_Annot_ID_137103 3000 nt of promoter + ATG
gatctttaacgacatatgtcaagtaactacagttgtcagttttgggtttcaatgtaaagcaactcattttccttctttctttattctactatatcgagaactattagtgtaacacctatgttttcaacgtcaaagtgctccgatataatatattttaggagctgtgtgtaaacaacatttcgacttgttcttctttctcgcaaacatcggaagaatccaccgggaaagtatcatctgccttgcgcttcctcgattcattctcctcagatatctccatcatcgaattatcatcatccgcgtttttcaatttggaatccatgttggagtaaacaaccctagatctacgagaaacgacgacttttgtagttgatctaagtcacgagactcgatcgcaactatttcagggggaaaaataatctattttcaaatttttcatcacaaaaagttgtattatatatttaacgtaagttgttttaatataattcaagttaaccagacgaaaaaaatcattctataaagcgagacgatacatgtaacaacaatcagaaacaagaaaatgaaactcgatcaagaaaaaaaaacttttaatgttacagagaaaaagaggagtttaaagtctttaacaagctttacagctacgtctgcaattcccagggatctctggagttccaaccatatactctggattctttccacattctccaagcactgcccatctctcacagctctcgtttacgtcagtacagttaccatcatgtgtcaatatcttatcgaatgagtccacgtggatccacttagtagccgaccatttctctccttcgatcactggacaacctccgtgaaggctaaaggggtctgggattgcgtcttgttggaggttgaagaacaacagagcattccctttcttcggtttcactaataacattaccaaccaatatcaaacacaaacattcttagagataacatggaaagaacaagtcatgattccttttatatatagctcaccagcgattcctttctttgcacaatcagaaagatcgtctttattctcagaaagcgagcggcgagagaattcctgcgcagaaatattcatcatacagaaaaagagtaaagacctatttgtccacgtatatagagaaccaatacaagattagcaattgtggaaatgtaagcggaaattggtggtattgtctgaaaaacaacaaacctgtgcatcggggaaaacagtttctccaccctttgtgacattggacagatacaagagaaccgttgctatgcggtgtccaccacgggcaatgttgactttgtcgtggaagtagtcaaagtgagcatcatatttctgaccgtgctcatatctcaatacctgaaggtcttccccgttttctgtgaccacaaagtgaagaacttaggaaacaataatatcttctgaaaaaccctttcaagaaactcaacaacagttaaggttccttgtcaattgacattgtgaaacagagagaccactattgaaaaaccattcagattgttaaagttaccttttgggagaaatgtccatgttgagagcttgtcctcgataccggaaacaataggatcctgtcattaaacaaacgaagcttcacattaagattgtaatcacactgagatatctaaatttctcaaatctgttcctaataatcactaagtatcattcatcatccttcatccatacacagaagtaaatttatgtctagctatcaccctaaaacctttttagtagtaaacaacaatcacaaatcaacacaatttggggtcaatttactaagatctcgacttatcaacatcattttatcaaactctgatgaccagttcaatatgtgtgtgaacttttggattgaattattctaaaatttctatttccatcagatcttgaggggtttgacttatcagatccattagtatcagaaatcacatcagagattcagagttcttgaggtcgagtgtcataaattagaatcaagatcaattccaatcaagccattcaatgagatctgatgtgccgaattaaaattgcacctttcctttggagataaaagtgccggagctggtacgaacatcactgacttgactctcgccattatcgttatcagcaaccgcagatctctgcagattctctttcgcctttccccaaaaaaaaaaaaaccaaaattagatactgaaactagcacatttaagccaaaaagtttccaaatttgagctcaaacccaaagagcaaaattcgcactcacaagagagattagatgatcacattccaagtccgtcaaaaaaccttcatacacaaatgccctgaagaaacagtcaatacacacagttggaggttcaaagtttccaaatttgcttcatttctcactaaatagacaagagaaagagtaaaatcaaacctgggcttcgacgaaacctgtttgactttagaaggattgatgatagaacttggagaactaatcagacaagtggaagactgaagcaagacgagcaatatagcgacgaacaacaacaatccgagccgagacatcgacattatagcaatcgtagtaatttcttggatccagatgatcgagatcgaaaactagaggataattttatttattttttctcggaaaataaagagggaaaaaaaatgtcaacggtcatgaaaagttgatgttctacctaaaacaaggaggctcaagggagatggtgacaacatgcgcacgttcttcttggttgaacaattattcttgttccttgaccaaagcccataataagcctattgttacttaaaaggcccaacataaaattcggaaataaaaacgacgtcgttggttttaaacgtaaaataatcctcgccggacggaagaggcgtcaccagaacagaaaattcaatttgctccggtttcgactttagccggcgacgtaattaaacgaaggttgaaggagaattagaagagaggcagcgataatcaagtcaaggaattttctcagagaatg

SEQ ID NO: 14309 - DNA, 3000 bp, Unknown
  misc_feature (1)..( 3000): cDNA_ID_3438233_gDNA_ID_2684104_Annot_ID_137104 3000 nt of promoter + ATG
attacgaaaatatagggtcgcttattgcaacatatgaaacgtataggaactaaattaaaaaatacaaataaaggtcttctccttcccgtctagatgtagaaatccctaaaacttgctactgttttgcatacggggcttgtacaaataaaaaccacccaattcctacgctttcctctacaaattgtccccttttttttttaacttttatactttcaattcatctttggttctgtagaattcccaggaatcagcattccactgtaagctactggtttctctaattaactgtagatcgatcgaacttttatagattcgggattgtttctcccaatatttctgtagaaattactacaaaaaaaattagattttcagctactctgagtctaccttgaatcgtttgaaatcgaaaaccctttcctttaatttcaaagagtcgcttaattagggtttaggatagatggagaagaagaaggtgacgattccacaagtgtgtcatggccattcaagacctgttgttgatttgttctacagtccaattactcctgacggtttcttcctcatcagcgctagcaaaggtgataatacttttggtttcttacaaaagtttggatttttttggtcaatttagttactagaactgtgcaaaaattcatgttgatcgaattgagaacttacaaaagtctttgagttttctctgagtaatacttatttcgtagttcatagagttttgagaatactcatgtcttgatggtttagattcgcatccaatgttgagaaatggggaaactggagactggattggtacatttgaagggcataaaggtgcagtttggagttcttgtctggataacaatgcattacgtgctgcatctgcttctgccgatttttcagcgtatgtgtttaattttttttggttcattaagtcattatttgcgtatgttttatgttcttagatacagcacatttatccaattttttgttatcttgttttgttcagcaaactttgggatgcgttaacaggggatgtgctgcattcttttgagcacaagcatattgtccgagcatgcgccttctcagaggttcgttcaacctatttactctctccatatagattctcgatttggtcaactggggttttgtaagatggtaggctaaaagaattggaattatctactgaaatactttaatcctgttttgtctttataggcataagcttttgtatctctgtgttttggattatcggttgtgggcaggttgttatgtaatagctcttattcaggcaactgcacggaatttaagtaaaaagctttgaggatttgtttaattaggtgatagtgaaattgttcttcagattggactattcttaaacatttgttgtttgtggatggtgtcgatccgcttttatgcatcgtcactaattgaatgacatttttctttcactaggatacaaaatcgttgctcacaggagggtttgagaaaattcttcgtgtttttgacatgaatcggttggatgcacctcctacagaagttgataaatctcctggttctatcagaaccctcacatggcttcacagtgatcaaacaatattaagttcatgtactgatattggcggtgtaaggtatgaactaaacaagacacagactaaatacacattgtcgcacataaaaaggcatagtttgatagacgttttgtttgcttttccgtctcctctactgctatcttatacaggttatgggatgtgaggagtgggaaaattgtgcaaacgttagaaactaagtctcctgtcaccagtgctgaagtgagccaagatggacggtatataacaactgctgatgggtcaactgttaaattctgggacgctaaccagtaagttctcattctaggaagagaatcaaatattttctaattaccttttgtatcttgctcaaaccccatctttgccccttgctttttcttccaagttttggactagtgaagagttacgacatgccctgcaatattgaatctgcatcgttggagccaaagtctggtgaaaaatttgttgctggtggagaggatatgtgggtccgagtgtttgatttctacactggcgaagagattggtaagtgactttcaaaacatctatgctatcatattccaaatcagacactgtcatattacctttttgtcgtccaagttaaattccagatagcttcaagcttaattggagtttctgactctgttataaactccatgagtgaagagcttaatagatctttgaagcatggttctttaagctcctgcgaggttttggttttctgattgtttcatttgtgtctgaaacttaggatgcaacaagggacatcacggtccagtacactgcgttaggtttactcccactggtttatcctatgcctcgggatctgaagacgggacaatcagaatctggcaaacaacaccagcaaatcccgaagagaacgaaactagctcgaggagagtgaagcatagcgtggatgaagtttcaaagaagattgaaggctttcacatcaacaaagaaggaaaaaccgcagagaaaccatctgatacttaagctaaactgagcgtacaaaaagcctctatatgtcttagttcatgatttgctatgttttgtttccagactgaatgattatacagagaaaacaaacaaagatctccctctcttcttttgaatcaaaacatgggtgttaaaatttaatagttttctttcaagtgtctttttcaatattgaactaaatttagggacgaatttgtgatttatgattatttgactttagattgggcttgggcttttttcgcaggttggggtataagggtaaaatcgtcatttgacagaccgacttgtctctctctatctggggaaaacgtctatcgggagactcctcttcgagctcatcttcttctctctctttttatctttggttgtgcgatctcctttctctttcaatctccaaggattttactgtgagatatttggcgggaaa

SEQ ID NO: 14310 - DNA, 3000 bp, Unknown
  misc_feature (1)..( 3000): cDNA_ID_4254789_gDNA_ID_2684104_Annot_ID_137106 3000 nt of promoter + ATG
atttttgtctaaattcaccggcaaaagttaatattttgcagtttgatcgagtgaaagattgacgatgagccttcttgtaaccagaaaaacccgatttacatgagagaacctgcaaaataccatagaaaagagatgagcttcaaccacaaatatctcaagctaataagtgagaacaggagagcagtgtttttacagcttcttggtcaatcttgtggtacattagcttccttcttgctccacagctttttcgataagctaccacgacatgagctagaccgaaaaccgcagaagatagtaacaaaaccggcattccccatgagatcttgaggtgatagaccttagcctcctcaagagtagaattcacagtgaaaacacaagttttaaccaaaagaagaagaatccctccaaaggaagataacattactgtttcaagatacagaccataagctaatcttgtgtcttcacataaccaagagagacctgtttcaatagaagctcaatgaatcagaatgctaacatttgtgttttgagtaagagagaattaatgagtccgtacttacagataatgacgagagatctaatgagcgagacgagtggtacatcaatgagagaggtcttgaaactatactgacgaaaatgttgtgcaggggagtgacacgtgaggcacgtgatgctagagacgataagacaaggaactaccacatcagccaccgtgatcagaaccggtaatgaagaagctaacagagacgccgtcattgctgccacaaagaacatcgtccttaaacatcttcgtgctttctccgccacaatccatgacttccacgccgccatctataaatccggtggtggctaaaacaacttcaccatttttttcgaattcagacaaaacgttatagctttatgtaattaaaactttgtaacggttgatatattatagaaaacaatgcaattttcaaatattattggtacacagaataaagtaatgagttgtataagataaagtaaataaatgagtgggaaatattaaatgattaatggaccaaaagacagcaaagacaaagaaatgataagtgtgtttggaggaagagtggcacatagaagcatgtgaatgttaggttcactcttataatattcttccagccattttcttctgtctttgttcccccaaaagtttagcttacttactatgtatacaccttttgtttttactaaaattcgtttttattaaataatttggtaacaaatcatatcgtaatttatcaaatcacgactgctaattttctttgtttgtttactctataaataacgaatatccatttttgttatgtatgcaaagaaaggaaaaaaggttttaacttttcagaaactagaaaatatggctgtctacagataattgagatgcaataattatgaagcaatgatctggcagaagaaatcaagatgttgtttatgaattatgactagataattatgggatctttaatatcagaaagtaaacaaaaatcttcttataatgcataattgaataacaaatcaatactttaataattatgttcccatgcatgttactgcagaaacattggaataaaaatggtacaccgatttatgtacgttgcatatcaatacaaatatacaatacgaggaaactacttaataatctatttttttcttttctttcaaagaaatacttaataatgtatatactatgatttatcttatatgttcaattgttcataaacattagatgagtcatccttcttattattacacatctttctcgtatcaaattaatttatctatctataaatcattgtgattttgtttattattcatgattgctcggaagcttcttgtttaataaaaatttattgccaaaataatagaaatcgtaatgtatattagacttattactttattagtattacgcatttggtggttcacaattaggaatactgtatacattttgtctagaagagaagtataaatgggccgatagtttaactaccagaaggcccaatgtgttttaaaaaacaatgcccacttaccaattctttcaagttttcaactagattggtggggaaaattgacgattaaaccggacggacggtataatccattggggtaggtagggaaacgagcgaaccgaaccgggggtaggtgaagtcttatccgacatgaaccaaatcgggtcgggtcgaatccttacaccaacttttcgcaccaactctctactgaccctaccaacccccatagtggttggtgaaaggactaatcattttctaattttttcttaatcatatattttttacatttaaatcacatggataagatcgtaaagttgctaaatgacgaaccaaaatgatctgtaataacgacacaaagtcatactataatacataaaaaaaatatgcaactgaaaccagatgataatttatagttttacacttttattgaattattagaatgtgaaaaatgaatctttatttaaatattgtatgcttattataaattttaaatttacataaacgaattactaatatttttatatataaataatttacttattgtaggactataaatatataattaagtaatgtgaataataagatacaaaaaatttaaatatatttatggtatgttttctattttcagtgatatatttttattaaaaagagccgaactttattagacagtatactaattgttgtctaaaccaatcagaaggctaaccaatcttattaataaaatataatttgactaaaaccaaaatgttcacatagttttgatatacattattatggctaatgggttaatctttaggacaaaatggattatttttgcattatacaaaatttaaaataatataaatgacattttctttaattaattgtatttaatgccgtatatattaagtataaactcatttctcttcctcttgaaaaactcactttatcaccaccaaaaaccaaaattcactgccaaaaaaaacacatcaaaacg

SEQ ID NO: 14311 - DNA, 3000 bp, Unknown
  misc_feature (1)..( 3000): cDNA_ID_2701811_gDNA_ID_2684104_Annot_ID_137117 3000 nt of promoter + ATG
aaaagattgattttttaagttttccatgtaatatttattggttagtattggtgaattgtaattttcaagaaaaatagttaattatcattggtttacagttataaaaaactgtaaaacactaaaaataatatatttataatcaacatttaatatgtttttttaatatgtgtgttttttctaaacaatcaaacaaaaaggaacagagggagtaaaaaagagctgtataaaaaaaacttgagagtaacgtttttgataacatttttgataaaagtatttatgattggtaaaataaaagttatacaactttttttttgtttatcaatcaaagctttaaaatattaaggaccaaattaaatatggcttgagctataggtttactagctgtaagaaaagaataatttgattacttcaaattttacattgtacaagacaaaaaattatctaaaatttcttaaaaaattatgtttatgacaaaaacaagagaaaatttgaaatgaaaaacaaaaaaaaaactaatccacaatactttaaaatagtattcttattatttcttaaaatataataacgacaataatttttgttagaatcattataaatcatatttatattttattatcctaaataaaaaggtggaaataattttatttatctatttggggtttgttttcttctacaattaccaacaagataaaaggataacgaggaaaatgggtgacttttctcaaatatatatgctggtgagactcctttttatacacattcttgaatcctaaatccaacatttgggctccacatttcacaataccacatcgttactttattacctatttattaatttcccaaccatctcacatttcgaaagctggcaagctgacggtggacaatatttgctgatcgttctagttttcgatagaaaactcgtatttatcgtttgcataaatatctactttatttgcactaagtcaaagtttagttttttttactttttagtgacgaaaaaaagttcataagatccgttcattgccaccctcaaataatcctttcattatctctttatctatttgtatagaaaattagtttgtgagaaaaacgcatcaggtctgatatatatatataaaccaacgattaaaggtttaagaaataataaaaattagagtgtgaaaataataaaatttcgcattactcaaacagttggtaattcttgcttatattgttatgtaactcataaccaaaaatagatatattaaataatatattgttatatattaattatcaagataattaattaattttttgttaattgatgaatttctttataaaattccaatggtcacaaaatacaaagggaatacaaaagcgtgatatgacatttgaaacgtaaaaaagcttttttgaattttcactttgttgccttgtgtggcacttaagcgggtcccattttacagcttgccacgtgtcgacgtaatgtactcagaataacacggtactattggaagcatgcaccttcagttatttgtccacacatgataatcaaaaaaaaaaagtgatacgtagaagtttttgcattggtaaaaaatattttaatttatattctgttttcattaaattttaaattattctattttaaagtatttgtttaaccgttaaaaggtaaaactatatagtataccacttaagtttagggatgatgaaaaaaactaccacgtaaaacaataataaatcggttggttgaaaccttgcaagttccatgtaaatttattaaagtatatattattttaaaaatattttatagataaaaaaactaaattaatagtgccgtgcacttttcttatatgatttttgttattataattttttttaatttttttattataacttactatagagacaaaaatatatatatgcttattggatgaaaacaatcgctatcgttgttaatggtcgctcgtgtcaagccacactttgagcctatatgaacacagacgataatgcatggttaaagaggttaagaaagtcattatcgactccgaaatcactattttaccctcctttgccttggttagtatcgtaatttaaaaagattcgacatgattagtcagactttgtatatgtgtcgaattgtcgccactctttatctccttttagtacaaaccaaaccacactaaactcggctgaattatgggagattatgtattattattgattgccaacaaattctaatattccgggtctaaaataataaaatattattttttggggtacaattgttaattacaaacactaatctgagattaacagtattttgtaggtcaaacaaactttacaaaaaacaaatggttttatcatcttatgaattgaaatctacagaagatgaaagataaactacgatttaattctagctaagtacatatagatcaaattaattagtgaaaaggatcaacaaagcaaattaaatgtactctctcatgattcacgaagataagatagcatcatctattttaatttgaaatcaatgatagaaatctctttacctacaccttcctacacatatgggtcaaaacgttttttttttggtatgacattttattcctttttcctgttgctaatctacatatataactacatagcgtacagctatacatattaaatatattagatctctacaataggttaaactgtaacacaaactattgatttagatagctacggtaattaatacgttttgatcgtccatattccacaaatataaatagaaataccatttgatgtgtaacaaaaaaatctcatagacatttatggttttaatacaaaaaaaattctcaaaaattgtaaataaatacgagtggatacgatggtctacgtacaaaagattccagaggataaaagccattttgatttgtcgttttaatgccttccatttttaaaaagaaagattactaacgccgactctctaaaactctctcaaaccataaaaaatattctccgatcatcattttaatg

SEQ ID NO: 14312 - DNA, 3000 bp, Unknown
  misc_feature (1)..( 3000): cDNA_ID_2729923_gDNA_ID_2684104_Annot_ID_137118 3000 nt of promoter + ATG
gtgaaaatttaatgtgtctaaagtgggtttgggcttaaaaaaaaacccatcatatttaacattgttcttcaagcagtatggggagtcaaaaaaaccaactcaacacaaatcaaatcgaacagttccaccgaatttgatatttttttaaagttcacattcacacctttaaatagaagctggtgatacatttcctaaggaagtgattaccagaatatcccactcacttttttctttgttttaagttccgagaatagtcttcaactattattatcaagtaatgtttaactttctattatttaaaaataaactaaaattttttagcatctacttactgataaacgtagtcaccagtcatattagttctttgatagaaacgtactttagtgttttgagacgagattttttttcgaaggaccactatattatttgtttcgagtttaaaatattttctaactaatgctagagagtagtcaagccaatccaaagtaagttatctttcaaaactctgcttaatttgtttattaactaaatcagattctgtaaacttttttgtaccatggtggatttaaatttcagctgataattttaaatgttacggaaaaaaattctggatcagttttaaataataaaagaaaaaaaaatacgaatacatttaacaaatatatgtcatcgagtaagataacctaaactttcggatacacacacgtgtaaaaacaaaagtactttgttcaaattccaagaaattattaactggagaaaaacaaaacaaaggatagcgaaaatgttatagataaggcaaattaaaaaccaatctttgactacccattcgttgtcatttgattaaatgataaaatataaatcattgatttaaaatgagagatagaggtaaaacaaaatatagaaaagtagcatcaaatggctgttagcacgaaaactattgagtgaaagaaaccctaaatctttaagttccactatagaattagataacgatcataatatagtgatatatttgatatctcgtctctgtgactccgtctaatcttttgaaatgatgtcctcttcctcacttcacttcatcaaaaaaaaaaatgtcatatatatgtatgcttaaactttcataaaaaatttaatgatttcagtaaaatgttctagggttagattatattataatataaatttcaagaaaaattcattcgtaaatttttttcatttatgaaataccacaactgcatgaaaactaatcaatggataaatacagacaaaaaaaattacatcaatacgtgatcttataaaacaaaatctgaatatatgtatagggtctatagctaatttcaatttcgattatattatatgcaaacttgatgtggattacttatttttcggttaagatgttttatctatggtggatttacataaaactcaacaaataattttgctaagtccttaaattagttagacatattggtgaaaccgacactaaaaatgtagataaaaatattaatttatacattatccaacaaggattttatccaaatcgtggtatctatgtgatctaatggttataagtggaatttaggtgttctaaacatgctcaattagtcaattatatacttcactttccaactcaaaacagcatattccgagcgaacaatatggatttttatactataacacccaatttctaaattaaacaaaaattgcgaccattatatatggttctatcttttaaaaaccatggaactaaatgatgaaactatgaagtttttttttcacaaaaaaaaaaaagaaactatgaagttttttaccctatattttttttaaaaaagatactatgaagctttgaagcagctactacgagttgtgtttgttaatgtttctgaaaacaaaaataaattgaaaaaatctttagtcaacatcaactcgtgttttttctcttctcccatcgttataacgtctttttgacaaatgacaaattgcgcctaacttctacgatagacacgtggacacgtgtcgtcatgatgtagttttgtccgtatggaaaacgctttccatgttgtaacctaagatacattgaacagttcctttgtcctttcaacttcgcttttttcgaagctctttcccttaccctaccacaacattacgcgtgtccttcttattacaacatttggcacatatacatttcagaaaacccgtcaacaaaaaacacgtgaaataaaatatctcttcctttaccagttcacatatttcatggttactgttcaatcatttcgccaaaaaatctttttttttttgggtacaaatttggccaaataattgttcctttattctgaaattcagtcccctacacgaatatatagaccaccaaaaagtacatggacggttcaatgttgattaaatcgaccaagataaagtcaataatgttttgtggtttagatgtcgtctggttactatattgacaataaactttgtaaataaaaaatatccttaaaaaaaaaaaaaaaatcctaaaaggaaaatcgaaaatcatttttttaatttgttttacattacttaaataattaaatagacaatcctaggaaaaaaatctcgattaaattaaatattatatgtgaactccaaatgtctaagcagcaaatttccaaacattcatttgaatcttattttgattggaaaatacttttaaatttagcggaacattattgataaatagatgaataaacaaatgttaataaaaaaaaccatttaaaaaaaatagtacgaggaagagctaaatctactcatgtaggttcaatgaactcaagggattgcataaatcacgacgatctaactgacacacgtgtcagaattcaaaagtgtttatagataaacacaaaaatgggtcccatattcagtacacacgttaatcagcggcggtggattcacctatacactgcgtccatatataagtagcacgagacccaaacattattgtcaaaaataagaaagaaagaaaaaaatatg

SEQ ID NO: 14313 - DNA, 3000 bp, Unknown
  misc_feature (1)..( 3000): cDNA_ID_2729909_gDNA_ID_2684104_Annot_ID_137122 3000 nt of promoter + ATG
tcttgttctcttgaagtcaaattttggtgatgagattgtaatctttatttggaacatatgtaggatatagtgttttgactttcaaatcagttttggtacaaaaatatgtgtcggtgcgatttcttgtagtggactctttctcagatctgattcaagaatcttgtttcttgatcgatatggagcttcacattgtgatttgaagatctttgtagactttaagacctttgtagataagcgtagcttactacattgttagatctcagattagtggttttttgatgcagaagaaaatggctgaagatctatcattttgcttaagtttcttgggctcttttgtttgttgttttgcagggtaaggttgttccggatggtgagaaggaatttgagcattgtgagtatggctcagacatagctacaagttatggagctggtgcatttgtgcttctcttcattagtcaagtcattattatggtggctagtcggtgtttctgctgcggcaaagctcttaaacccggtggttcaagagcttgtggcattatgctcttccttatttgctggtaaaactctatacttaacacaatctctataatttatgactttgacttgacacatcattctacacttggttttgaacagggtgtttttcttgattgctgaggtatgtttgctcgcgggatcaatcagaaacgcgtaccacactacgtacagaaggatgtggaacatcgaaaaccctcctagctgtgaagtgatccgtaaaggagtgtttgctgctggtgcttcctttgctctcttcactgctattgtctctcagttctattacatctcctattctcgtgcccgagacggttaccaaaccccacattactagtgagtagtgagatccagaacaagaaaagctaaaccctgaatgagtttgtccatttatccactcactgatcaataggatattaaaatttgatgatgttagtcattttgcttcttgcttgtatcacaattgtttttttttgttttcttgtgatgtataaaatcttattaatatagacagctattctacatttcagtatctaagcttattgttacagtgtaagttttatacattttagagttcataacctggaaacagagcttgtgttggatcattcatgtcgagtaacatgtaggccattcctccgataccttcaaagagagagaagggtctatctcctccatgcatttgaccttctgagattaacttctctgatttatcgagtaggaaagacgcgaaagctttagcgcggtacaaatactttgggtttcttgttaaccggtatagagaaagaaacacgtatgtgtttccgctgataccgtgacagattcctactcgtttaagcaatccacggctccacacaacttctcctgcctccattgctgcctctacaaattccttagtgttataaacctgacgatatccagaaaatgagttttgcattgtggttttacttactgataagagtacttcaatcaacaaatgattacctgagctgcctttacaagtgtgagagcaacaccaggagcaccgtgacaccagtgaacaaggcgatctgatttgcttccttcactagataggtaattcccgctaggaaaacggttttgtatcatatagcttagtgtacctttgacatctttgatttcatctggttcaagttccgtatgcatcaaaacattcatgatcccagctaaaccgtgtgcagccccccagtacctcttcccgtgccactcatacatcaatggacaagttcctttattcccgagttgtcttcctgccctgaagatttcctcaaccactgatctctgaagatatagagatatcataaaatcttgaactttcttgagtaagtcaattaaccaaagaaattttataactttattataccattcgttcagatgatatactctcctgaccaatatgcttattcaagaacaaacacgcccacaagtatcctgctctaccatatagcaactcatatggcaagtcactaggaagcctaatctgttaaacagatcaaagttgcaacactcaagcaaagtatagaacaagttatctattttcactagagcaaaagaaactgtaattagtaattacccctcggaaacgggctaagtaacgatcatataactggtcatcacctaaacacttcgctgcaacagcaccaagagcacatacaccagcatagccacatataaatgtcactcgcctgatagaaaccacaatcattaccccgaaatgaattcatgaaaattggatcattgaagaaaattcacttactcagaatctcttgaagctacatcacaagcttcaacattctctaagcatagcttaagatcatcttcatttctagtaacctgataagatttgaacaagagataagctgtcccaagaactccagtatacaagttataatctcgaacacgttttccagatcgttcccatgtctcccagactacctaaaacagaatcaccacacaaacaagagaaaacacaacttcactagactaaagaaaagtcataaattcattataactacataacttcattataactcaaaatcatatataatcaaattgaaaagtgagttactttatctttgatgcttagagcatatctgtgaagcttctctgagaatgatttgtacggaagtgatagcagtttcgtcaacgaatctttacattcggtaacagtttcttcttctccggataaatcttccggtacaaactccggcatctcatttcggaaaaaccgttctcccatatctctctttctctcagcggttgctgcagaggaccgcgaagaacagagactaacgacgaagtgacgaagtgacacatcgttaccattattaatgggccttaagttaagcccaataatgaccggcccatgattttttctctctgtttcgtctctgaccttaaaacacttgctaaaaccctagagaaaacgtctctacgcggaaaaacaaaaaa

SEQ ID NO: 14314 - DNA, 3000 bp, Unknown
  misc_feature (1)..( 3000): cDNA_ID_2729897_gDNA_ID_2684104_Annot_ID_137125 3000 nt of promoter + ATG
cagagaaaaacaatattacagaaatgccattactatttaattccagcaaggcaataaaaccatatttatttacgaaaatgccatcgtcgtttttggtaaatttgtggctcttgttgcgacggatttgttatcgatcacagatttgttggtcaaccacagattttttacaacagacttgtcttgtaccacagactttactgtgttatgttacgccagacttttttttttcgcagattttttaaccgtgactgatttgtttcatatagtttccacagattttatttaaatttcaaaagtaagaatgttgaaaccaaatctgtcactgatttgttttccggaccacagatttttctttatggtggcaacagattttctatttgcacccaaaaatctgttgtgttataacagatttgttaacctcgaaaaatgttatataggcatgacagagttgttttgtgtaatcacagatttaattaacttgttaacaaatctggtgttttacaacagatttttgttaaaaaagaaaattactacacagtcacatagtgataacagatttgtttttagtgatgacagttttgtttttcagtgtcaaagcataacagatttactcatgtcaatgttatggccgatttgtttatgactagaataacctttttagtaataacagactttttttggcagatttatttttaaaatttcgaaattttttgttatatgagatttattagctagccctcaattaaattatttcctggtctaattgtatgttaaatccggtttgactggatttttttttttttttttgaaaacgttacgacagacttttattagctgacagatttttccgaaatattaccatatttgagtcaaggaatattctcgtaacgcctagggttttcttacggcagatttgtttatgttatttccatatttgatgtttaatgcattaaattgacaataaagtgtatatctttctaaaatcaaaatttttggtttttttccttattctacacatatcaactatttcaataagatcttttgattgcgtttccttttatcaatttatatttttaatttatatttttaatataatcttaatttatatttttcaatttatattcttaatttatattttttcatatcaataagatccagtttttttcgggatcttattcatttatatttttaatttatttgattcataattcgttttttttttgctaaaaatatggtattaaggttgattaaggttaattggtctttttacttaaaattggagtcattttagttaatcattgccaagaggagtcattctagttatttttgttaaaattagagtcaatctgagcaaatttcagtaaaaaattaaagaatcattttgagtgatcaaaatgacatatttaaaaacgttttcaaagtagaaaacagaggaaatgctctccatttgcaaaaaaaaaaaaaaaaacacttagaaacatattcacaaacatctggtgaacataaaactgtaagaactcaagaaacagagtaataacttcacagagaaaaatctagaggtgtatgtaataataccaattcgttgcctagatccacaacaacatcttggtaactactcttcttgccttacacatacttctcaaaccagctacaggaaaaagtgcacaattgaacttagatgtactgaaaattcgagatttctgctatgcataagcctatatgaccttaacaagcgaatcgctaatacaagcgaatcgctcgtacggtcaccaaatcacgaccagagagaaagacccagattgagaaatagaagaatttgcccaactgaaattcgggattttgtcaaatcgatttcgcccaacaaaaccaataaaaataaaaacttttgttttccctctttgtcaaaaaggtttttttttgacgcccctcaacttgagtgaggaagagagatagagatcgaattctgatctgaaagaggatgaagaagagagaatctcagccgttagatacaattactttgacttaaagtcaaatccttcttcttttattttgaagacacaagttgtttactttttttcagttgttgcaataaattgaagacaacaaaaaaaacgtatcattgattcatcataacataaagattatacaaaggacaagatttgagaccaacatatgttattgaatcaattgttacaagttatactagattttatggccaaatggaatttctatttttaagaaacatgttatacaaggtataccgtacaagttatacggtgagtgcatatggccaaatcgaatttctatttttttgtgagttgactacaaaaaaatcccttataattcacatgtttaatcacttatcactatttctaatggcagcaatagtgatgtaaatataatactaacctgaacaaaaacttagtatacgtataaaatacaagagtgggacaatgacctatagtgatgtacgtaatagaaatagtgatgtcaatataatactaacctgaacaaaaagttgattaaccaaacttgctcctcatttcttggcttttattcctgaaatattctgaaaataaagacataaatttagttactaactgatatacacaaatattaactaactcaatcaactttccaatattttggagatattgataatctagagatatggattaatcttttgacgccagacgttcggtagtagtatatttacattgagtttaataatgctccaccttcgagacatcaaacactcataaacaaaaaaaattattgtgttcctaaagacagatcttagaaacacaatcaatcctttatgaaaagctgaaatttaacaaggtacacaaactttccaacacattccaaggtactcatatattatatgtatattaacttcaagatgaatcgtgtgatttattgagatgtgtcatatatatttgcaaattgtttactaaaacacctatattcttatatgttcctcagcaaagtcaaattcaa

SEQ ID NO: 14315 - DNA, 3000 bp, Unknown
  misc_feature (1)..( 3000): cDNA_ID_4254781_gDNA_ID_2684104_Annot_ID_190375 3000 nt of promoter + ATG
atagtgaaagcgtgcaatgcttataaaaatggagctcttgttggatcaatggttaaaggcagagactgagtccaagaacgtgaacaaactagccagagcggctccaagaagtttaggaccgatgtagctagctttatgaagacattggttgatgaattcgttaatttagagcgaaaccaaaacgaaaaccaaaaccatctgagagcaatgctaacaaagagacccagagcaataaaacaaaccttaggagaagcagattatcgaggtgagccaaagctgccaaaccagccaaactgtcaaatattatttaaatataaattttgaatatttttttaggatgatctatggatatatgatatcaaatttatggtacaccgcaagacgatattttataactaaatatttaaaattttaagttgtatttgttttgctaatattgtttaaattgtttaatgtttaaaattgtgtaattgtattttaattgttaattttaggatttcacccgtagtataccatcccgtattaatattcactcaaacccgtcaattctaatatttcatctgttgtataaagtttaaatatttataatatttaaacttcttataaaagaatcgagatgcatctgttgtatatgttttgttaatattgtttgcgagatgcatctgttgtataagttttgttaatattgtatgttttgtttagtatttaagattgtataattatatttttgattcttaattttagaattttacccgtaatatattattctgtattattattgatccaaagatcgtcaatatatgattttatcagtagtataaagtttaaatatttataatgtttgaatttcttataaaagaatcgagtgaacttcagatcatataagaggagcttctctcataatattagatgagaggagcttcaaacaacatgtactgaaatttaaatttaatccaaaagtaacctgatatgggttaaaacggaagtcatatgagttgagataagtttgaaatcaaagagtttgaggcatcgtgggagatgatggattcagggaaagtttgtggccgaacgttttcatatgcgaagagacgatttctttctctatgttttaggtgacctggctaggtgtaggtgtggcatcctcttacataattttcattttgcttgagagacctaaaacaactacttttattagtaagagatatagattattcatgttaataaataattaattaattactattcataattttgaatttaatttttgcaattaatatttatattaaaaccaatttaattaattttatagaaaaatcgtgagaaataatttatagggaattggtagaagatagcttttctacaaaacaattgataggaaatcgatcaaaacatttctttctggttccttgcactctttcctacttctgaaattttgtaatgacatctgttttacttaggtttggtttcgaatgaattgctggttttctcgaaaacttttctccaaaccgggttagcggggaaagatatggcaaaaatcatagatttaatgacattactattcctctgcaatttatgagaaaataggacattagtgttctgtttctgacgaaacctcccatatgcaaaccaaattataaggtgaatcaatgataggtttcattggcaaattggtttcaattaaatagatatctcttgaagaagagacaaaatatctatgtacagcttacgcaacaaagctagggacttgtcatgattctggtagatctttacgacaagtaggacatgtgagatgattcttaagccaagcgtcgatacaaagcgcatgatagatatgtctgcaaacaggaaatactctgcattcttcattaacgacataaccactgagacaaatcgcgcattctcttgattctagtgacttttcttcatcctcctcatggttgccttgtccaacaagcaacttcggtagtagggtttcgatcacgctttgtttcagcccgcgcttttttccttctctctcgaaatctggtaaccgtagaccggtcgagatgattgtgtggtaggtaacgattctagcacgttgttggcctctttgtactccgatttcgagatctaggtcgagacatgttcctaagaatggtcgcagaatgcaatcgatgatgacgtagattacaagaatgagagctgaggttgcaatgagaacaacgagcaagatgcagagaccgatgaaaacagcgagaccaagaacgctgatgagactaatcgcatcatcttcttctgagctcatgttgattcttacaagaaacaagttccaagggttttgtccaaaatggtgattttcaggtgacaacctaaagatttaaacagctatatatttttagtcatgatagcttgttgtttaggataaggcagtgaggaaggatttgtgtgtattctaagtttagggtttggtttcaaattcatatctaaagttttctgatttttttctctcaaaattatcctaaatcgttagaaagagttccattccatttgatctgttatttgcacacaaaagtcctacatgttttttaaaaaaatataaattatgttgtggatttggtcaaaatttctttggtgatttgaaaatttttcattttatatttaaaaggtaatattttcttaatggtgatacatatgaccaaaataataaaaggatacatatatgttgttgttttttaacactgatacatatatgttgttattcttttcctttgtgtctgaaaatattttcactttatttttgacaaaatattatttacgcaaaaagtgttattaatccaattagattccataattaagttattcagcaaattgacctttgtaaggaattaaattggtcataaagtctaattaaaccggtccaaaccggttctgttctcgctggctcggccaccgcttttcaacagaacaatctgtctttttctctgtctcactctctcactcactcaccggagcaaagtgatg

SEQ ID NO: 14316 - DNA, 3000 bp, Unknown
  misc_feature (1)..( 3000): cDNA_ID_2729889_gDNA_ID_2684104_Annot_ID_190373 3000 nt of promoter + ATG
gtttacggaaatacttttatggaggagaaagacccaaagttctttcaaggaagagcgattctttgtcctactaatgaggatgtgaattccataaacgagcatatgatgagtatgttagatggtatgttaaactttaaccaaaaactattgtattttcgctgaaattacttaatctcaaatagcgtttaactaaaatttggtattcattatgtttgtaggtgaagaaagaatctacctaagttctgatagtatagaccctgctgacacaagttctgcgaataatgatgcttattcagctgattttttaaacagtgtcagagtttctggattgccgaaccattgcttgcgcttgaaagttggttgtccggtcatgttgttgagaaacatggatcctaataaaggtttatgcaatgggacaagattacaggtcactcaaatggcagatactgtaatacaagctagatttattacaggtaatagagttggtaagattgttctgattcctaggatgttaatcacaccatcagatacaagattacctttcaaaatgaggcgtaggcaatttcctctatctgtagcttttgccatgaccataaataagagtcaagggcagacactagagtctgttggactttatttgcctaggcctgtgttttcacatgggcaactatacgtggcaatctctagagtgacgtcaaaaactggtacgaagtttttttaagccaccattttaattactataatatgtatacgattattaatcttccatttatatcaggtttgaagattcttataacagacaagaaaggaaaaccacagaaaaaaacaatgaatgttgtttttaaagaagtgtttcaaaacctacactaagacagtcatggaaagaaagttatgggattcctattcaaccaggttaataagttaagaaatcaaaaacgtttttcagtttttttatagaattacattcaacgtaatatttggcactaatgaaattatttaacaaattctatctttcagatttagttgcatcaaatcaaggaataaagatgctcaagcactgtcaggacgtgttaaatggaataagagttagtaaaaaaaaattgttggattttcttaactatgttatagttcgaaagaaacttatggttttttaatttctttattactctgattatgtctaatattcgaatatgagattgaatatttctttactatataaatacatgacgcagtcaacatcatccattcaaaataagattttaggaatcaggtgctaacctttatacacatattaggatctgaagttgatgtcgcctgctacttcatgtttagtttgtccttcttatatagatttacactaatccaaaagcttcagctggtgcaaacctgcatttaaatttgtaacagattagagttcttcttaagagaacttacttgataatataacaagttaaaccttaagctgtcttaaacatataagtagctttttcaatctttaaatagagtaattggattctcgaacagcaatatataatatactacttacctttcatgtataatctttaaatagagctattggattttgatggtcgtaagaagccgcagtcataggaagtcatgtaatttccaaacaatttttttttgtcagcattccattcagttttaggtatagttttttatttattaaatttgtaaataattaaattagacataatagaatctagagcctatatatcttcattagaccatattaggcccacgactaaaaccaacacacaatacataaacaaattcaaagttgggccaaaaactatatgttctcaaacaaacaaatcatttttctttccaaataaaatacgtaatatagcttggatacaaaattttcacatttaatataaactaaatattatatatttaatataaatacgatattttaaaacaaagacaatctaatgcaacattaatcattatattcaaatagtaataaaagtaaaacatattatagcatcacttttacacttagataattaaaacaaagtattcaattttattcatgaaaaatattaatgcccgtgctgtatagcacgggttatgatctagtgtatgtataattggataaatataactttttatgatcattaacttaaaaatcaagtttcaaaagcgagaggagcaccaatcttagcagcagtggtctcaacacatttattccacatccgtttgctcctaggaagaatcgcagaagcaacatcttttagctcataagtggcgaacacaaaagtcatcaatccttcgtgacattctcttccaatcttcaaaaagttcacacaacaatcctccgaaacgggcttgtcgtcgatcaatccttccgtcatctcaacattgcatttcgagctcattttatccgaacaatcttggagaaatttgatgcgccgggtcgtcatgtggcttaggagttcgtggtcgtactcgtaagctgcagcgggttcgtatgccaatgattcaggagatattggactgatctcttcttcttgaccaatagtttgataaaccatcgatgtggtggctatgagaaacgttatgagaattgctttctccattttctttttcttgtaatgaagaagaaaagctttaacgaagtagccttttaatggtttattaatttgtaacgagtaacgactagctttttatgtttctggtcattaaaggattgtttgatttttttgacatgtttacatatgttacttacttgattaataattaagtcacatttcagtttatacacattttttcatgttcacgccaaatgcatagacttagaaggggcttttgtgttataatgggcctatgggcctatgggccaaaaccattgaagcccattttaagaggagactcacagcaaaccctagcaaaaacactcgaagccactctgtttcttcttcctcctctgtttctttcttctcttccatcgttcgccgttaaggaaaacaaaaatcagag

SEQ ID NO: 14317 - DNA, 3000 bp, Unknown; identical to SEQ ID NO: 14313
  misc_feature (1)..( 3000): cDNA_ID_2729909_gDNA_ID_2684104_Annot_ID_190366 3000 nt of promoter + ATG

SEQ ID NO: 14318 - DNA, 3000 bp, Unknown; identical to SEQ ID NO: 14312
  misc_feature (1)..( 3000): cDNA_ID_2729923_gDNA_ID_2684104_Annot_ID_190360 3000 nt of promoter + ATG

SEQ ID NO: 14319 - DNA, 3000 bp, Unknown; identical to SEQ ID NO: 14311
  misc_feature (1)..( 3000): cDNA_ID_2701811_gDNA_ID_2684104_Annot_ID_190359 3000 nt of promoter + ATG

SEQ ID NO: 14320 - DNA, 3000 bp, Unknown; identical to SEQ ID NO: 14310
  misc_feature (1)..( 3000): cDNA_ID_4254789_gDNA_ID_2684104_Annot_ID_190345 3000 nt of promoter + ATG

SEQ ID NO: 14321 - DNA, 3000 bp, Unknown; identical to SEQ ID NO: 14309
  misc_feature (1)..( 3000): cDNA_ID_3438233_gDNA_ID_2684104_Annot_ID_190343 3000 nt of promoter + ATG

SEQ ID NO: 14322 - DNA, 3000 bp, Unknown
  misc_feature (1)..( 3000): cDNA_ID_1989254_gDNA_ID_2684104_Annot_ID_190342 3000 nt of promoter + ATG
atgcttagaatacggataaagtttaaacttcacagtgaaattcagttgagataataaagtcaacccgttatatttactcatgttcttcaaatcgactaacctttgtaccaaaaggactttcagggtggtcgatgtcaagcagcctccttccctatacaaggagaacacaaaaaaaaagtcaaaactaagtttctgatctccgaaagcaacatcgaagtacactatactctttgtcaagacgaatcatctacagtagatatcaaacaatatcaatatcaatttctcttctcatctcatactctccgtcgacgatcggcgcattactttatttactctgtttttcttatgtttttacgttgtttagtttaagagataagtcccgagcttatcactcacctttgtgggagaattgttcaatttcgatttgacttggcacgtgtgagacactcgcacatgcgaatctaaggttcagtaactggatgaaatttactgaactctaggaattttttaaaatcataactataggaagaaacaaaaaatgtggtcttaactacaagaattatcacatttttaacgataaattatacaagcaaagaaaaatctatcttgatatttttttagaaataagtatataaagaaccaataaaatccaactgctattttgtttaagtttctaattaatattcacaagctttgttgggcaatattgaagattaaaccaaaaaaataaaacgattttgtccataatcattctcgaccgaccactgtcaccattctaaaatatcattgttttgtatgcaaattgcataaatcaaatggctctttcacgtttaaaataattgtatttcggagaaagtgcatatcaagacattgcaatctgacaaagaaaaaaaagcgtgtagacttatctatctccctaggttaacaatccaatgcatgcgtgtccacctttaaatctccctacacaagcaaaattcagtaaaaagcttgtacgttgattacatatccaacgaaccatatccactttcaatttgttaatcatataaatttgaccctaaaatctatctcattctctcatcaatcttcttcctttaaatccctaaatcttcacgttacttttctatctacattttcactttcaatggctttgattatcacctgctccgctctacccacgatccgagcatcttccggatccggatcccttaacccggatcaaaaccgtaagaaatctgctgcttggtgggctcctctcttcggtttaccctccgatccagattacctcaacatcgaaagctcatgctccaccgtgaatccggataaaaccgatatttccgggtcgggtcaaaagtttcgtcgcggttgttttacggaggagaaagctaagcagttgaggaggaaaaccgcagaagcttccacgttccatgacgtaatgtatcactccgccattgcttctcgacttgcgtctgatatcaccggccgagtcgaggattgaaacggattcgggtcagatctggagacgaatcaattaatgaataattaatcttttttttcttaattcagtgttcttgtaggatgcagaccatcttctatcggtgctcctttttcatttgaaccgttggcttgtgtttggtctttgtgtgttgtaaactctagttccctttctgtttcttctgtaatcaaccgttggatttccacttgttatttttagacatgtgttccctagttagctcttttatcttatctcaaatttaagacattgtgttctctaaatctacatcagaacttgactttggtctgaaaatgtctaaatataacattttctcaacggttatctacttcagaacttgaattcggacagcttttctacttcacaacttgaattcggtcttgttttacaaattccacatagacgaactataatattttgtgacatttctcactgaaaagccaacactaattaaaaccactccagatcttattcttaacgatgatcgtgaatttggttgtgtcgaatcttttaatatagtcgtctcgttgtttcaatgtagtggtgatacatctttcctctctattaagatctttttataatgttcaatgaagaaccacaaaatgtaaagtgtctgtgatctattattcattcttgtaagtttttctctccacaattcacattttctagaatcaaacctcaaattagatgttaaaacattaaacctccaaactggttctctgcctccggtagtcaccagtatcagatgcgctcctccggtgacggcaatgcctttccgattttcctttagtaaaagccctgggccaatttgggatttggccaattattgaatataacattataaactttaaaaaacaaaacattaaaccaccaaacgaaattttaatttatttatttaagaatcatactttgttttactttattttcaaaatcatgctgacaaaaaaaaaacgtacagtaaaatacactactgatttacgatttttttttctaaataaattatttacaaatggtattgtgaattgttttgtcaattacgaaaatatagggtcgcttattgcaacatatgaaacgtataggaactaaattaaaaaatacaaataaaggtcttctccttcccgtctagatgtagaaatccctaaaacttgctactgttttgcatacggggcttgtacaaataaaaaccacccaattcctacgctttcctctacaaattgtccccttttttttttaacttttatactttcaattcatctttggttctgtagaattcccaggaatcagcattccactgtaagctactggtttctctaattaactgtagatcgatcgaacttttatagattcgggattgtttctcccaatatttctgtagaaattactacaaaaaaaattagattttcagctactctgagtctaccttgaatcgtttgaaatcgaaaaccctttcctttaatttcaaagagtcgcttaattagggtttaggatag

SEQ ID NO: 14323 - DNA, 3000 bp, Unknown; identical to SEQ ID NO: 14316
  misc_feature (1)..( 3000): cDNA_ID_2729889_gDNA_ID_2684104_Annot_ID_137127 3000 nt of promoter + ATG

SEQ ID NO: 14324 - DNA, 3000 bp, Unknown; identical to SEQ ID NO: 14315
  misc_feature (1)..( 3000): cDNA_ID_4254781_gDNA_ID_2684104_Annot_ID_137130 3000 nt of promoter + ATG

SEQ ID NO: 14325 - DNA, 354 bp, Unknown
  misc_feature (1)..( 354): cDNA_ID_3016084_gDNA_ID_2684105_Annot_ID_190480 3000 nt of promoter + ATG
gaattccaaatcacaactggcttgaactgtgataagcttccaactgattctgaggtagaagatcaccaagaccctgcctatctatctgtttggaatcgcttatttggggagaagtgtgtagttacagtcatggatgttgttgagatgctgagaggagatgtcaatgctgagcctaggaagtgattctcaacatggaagaagttgagtctcgcattgatagtcctgcttgatggggttgtagtttgcagcaacaggaaacaacatcgggtaagtagttcatatgttgagatgcttcatgatttggaattctttatgagctacccatggggtcgagttgcttttgaatcaacaatg

SEQ ID NO: 14326 - DNA, 3000 bp, Unknown
  misc_feature (1)..( 3000): cDNA_ID_3016070_gDNA_ID_2684105_Annot_ID_190484 3000 nt of promoter + ATG
ttatgtttaattcaaatatttatatttataagtttaggatatcaaatttattcaaatatttagtatatataagaaccaaataaactgattgcccgtggtaaaccgcgagttaaatcctagttagtatgttatgcgagtgaattttttaacacaagttgtttatcaaatacatgttttagtcgcaaagaagtcgcaagtaaagggttttgctactgaatagtgacttcttatgtagtcaccagttatctcattttttgtcctaccaaaaaaataaattagttgtttttttgtagtatacggttgcgaacttgtttgtcaaggagttcgattaattaggtctcgatgtgggcatgtctccatgggaatgagcattccactctctccatatgcagtgaatcgaagcttggaaacgtaccagagcaagaacaattatgctgtttcaaaggtttgtttcaactaatggtgaatcgattcttgagaagatgtttatatatcattttaaatgttccttacttacatgtttaatttgtgagataattatattgatctgctaacaagttgattgaccctcaaaaaatctttgtaaccaatgtttttttttgtttttttggcatggattcaattttaggttaaactctttttgtaaaacctcaaacttttattttatatgccattcacattcctatataaaaaaaaaattcttaaccaataactaaaaatatttaattgttcgtataagttttcaaatattgatcatttggaaatcctcaaaaacaagtaattaactctcttttttgtgtgcaaatgagtaattaatgcttaaccatcaatttttcagaatataaaggaaataaagatagccaaacgaatttaaaaaactgcttatctaggatctccctacaaaaatagttggagacatatacaataataggacgggtatagtaattttaggttattaaaggtattttttgtaaaagtaaaatgttatatttgctttactgatgttaatatgaccgaactataaatctgatctctttaaaaatgttgaaaattagtaattaattattacttgtgtaaatcaaatttggtgaattaatatgtgaacacaatgatgagttttacgatgaaagaatacgaaaagaaaacaaatgattccgttggatatgacacttataaataatgtgcatatatacaaatgaaataatacagaaggaaaatgacggaaaaaaagaatacgtatggaaaacaaacaaacaaattaaatgtgctctctattgccaaaacgtctgaactctttttatccatcagaagattcatgagtgtatatgccggatttttgatgcatcttataatctattccgatagctcattagcattatcataactccacaaggtctttgccagtttgcttctaggttgcgttccttcatctttgtggcataaaaatatttatagaaaatctaaccagaaatgtagaattcccatcaacaaaattatattagagccaatagagacatatatgagaatatattaaacatacatggaaatggatagtgacgtggacttgtacgaagaagctctcattgtgttcttgaattagaaagaaatgctgagaaatgatctcttgatcttgaaccttgatcggatgaattttaaggaatattttcaaggactctctgaacattgcagaactcaaaataaggtagagaaacatacattatgtggaagtagagatatgtgggtcaccttaatgttccgtttctcattctcactgcagttgatctttaattgcttcacctgttacagagactttgagggttagtttatatatatataagagatgtgaatgaaactcacgttgtgcttgagttcgaatatgtagagctggtggtgaaacgtgatcattttggaaacagagacaatgaatctgagacaaagagaagtacgtaaacaggaatatcatggatcatagatatataagaaaaaaatagaaatcggattgtcgaagtgtgagagcgagatatgaatttaactccaacgtgaattggtttttagaggaagatgaagggttttaaattttttttgatctggtaccaaacttccaaagatcgtgcgatcgtggtgtggtatgcgagaaaattaagggaattttattttcaaaaatatttttacgtggtttctatcatttaccaaaactcgtttaatttatagagatatgttgagaaatgatacgttttttgaacataattaaggaactagtacggttcctattcataattagagattgcaccgggcccaccgttctgtgagatacagaagtcttgagatacaaaaaaaatgggccatattagcttttgtggaaattacggtaagggcctttctttgttttgtagaacaaatcaaaccctctagccgagttctggtttttgtctacggaagtcagagtcaaagttgataattcgcagaaaggtatgggctaaatgaaatcgttaatgggccttaagacaaatattcacatttattatcgttgtttgcaatctaaattgacttcttcgtcgtcaaaatcaacgccggagttggagctgagagaaactatggcatttatgagcgtatctaatcaacgaaattagttaacaggttggtgaataaaatcatataatactcagattctctttaggttttctcgagattagctaatttttttggagggaatttttagattttttttccatggttaagtgttttatagcaaacaaataagaggatgattgtcagtttgggtattgtatctttattgctaaggaccttcaactcagataatttactatggaaggtgaaattcagaacaagaaatttttaaatttagttcttactaatgttttaaagttttcttccgtagagactgactataatggaatttcatttgcagtggatgattttgttgttgttcaagccggtcgatggattttgtatagcacaggtgaatgggagttcaagatg

SEQ ID NO: 14327 - DNA, 3000 bp, Unknown
  misc_feature (1)..( 3000): cDNA_ID_3016052_gDNA_ID_2684105_Annot_ID_190489 3000 nt of promoter + ATG
aaagctatgtccttcgaatctcaagctcaaaccggcgtcgacggcgatgctccctagggtttttgtgaaggaggcaagaaggaggaagagggaaaaaaaaaaaaaaaaagttgaggattcgaacccaggtatgttgtggtacaaatatcgacttgttaccagtagactaaagtaataaaagtgtaatatatatttattcaaatacgcaaagataaattaacgccatccaacaattttgtaacgtccgttacggctgttaagttgttgattcgaatctaccaacaatttatagatgatatatttttaaaccaacaatatataagtgaggtattctaatccaaacaaaaaagtcttaggtataaaacttcaaaatcaaaaatagtttgggttttttggtgtttttttccaatttaatgtaagtaaagaatttactaaaatgtaagattcacaaaggtggtgtaattctatttatgattaagtggttttgataggttatacatttttttggcacaaaacaaagaccataacatctatgttatttataatatatgtctttaaagcggagataaataaagcaaataaattatttcattgttgatctttgttttgtgacaatgtctaaagagacaaaaaaaaaaaaaaaacagaaagttacatgaacgacaattccaatcctctaaacaaagatcggatgaaatcatgaatccgataatggctaatcttcttctccttctcatggcaattctctggggaaaaggtaaatcgctgaagaatctaagagattctaaaatctgttcaattttcaattgaagtgtttattttttctctcttcacgggaaatggaagagggaaggtattgaagctcatggactcaaatcgattgatagaatatgataataggtttttagtcaattatgctaaaacaccaatcatttcgttgtagtattttaggttgttaatccatatgggtgtgatgctagcaatcaagatgcaataagagttcaaagagtcaagccaagaaataacaggttttggggtttctaagaccatcattattgattttgaaaattttgttgttaagagtttagttaagagattgaaattttagtaatatgcaatggtgggatcttagcttgaagttcttaagaagaaaaaaatttatttaaaaataaaaacattttaattttaaaaaacttaataattattataacttatatacatacatgacattacaaaacacaaaaattttaatagtttaacatagatgatataacaaattgaaaggcttatcattcataaagactaaccaaaatcttgttttcaatgccttatgggcatataactttttaaaaaagaaatggttgataggttaacatagatgatataaaaaataagaacaaaatggtttagttatttgacatttctaattcatttgatgagattgaaatttgaattgattttttgctcctttaatatttattatttagccaatcaacaatagacagttgtctagctcttaacccttagttttgctcttatataagagctattcttagcaaataaatcaatttaatcattaatttttacatccaattgacctaagaactacactaagaacccaccaataatgatgctctaacactcctaagtgaacatgtaggaaacagaaattcaagaagaaacagtaatacactcgaccaacacagctcgttgcctagcattgggtgtggtcgagtgacaggtcgagtaacagacagaaaatgtaacagggatactgtgagagtcgaaattcacacaatagaaattgtactaagggtttcttcaaagaacggacttttgtgagattctcaaagaacaacagagttgttggttaccgcggacagtgttcttgattatattattgagataatgatgatttgatcgtacaagtgtttagagatatgaaatataagtgttttgccttcaaaatcagagcgtttttgatagcctgaagttgagagcgttttagtgcgtatcctctttttgtttgtccttagaggtgctttatatagggctttggcagatcgcttctcacgatattctcggaagatttctgtttatcttagagtcggcgaaggagattgtctttatcttccgaagattgtgggagcttctatattcgataatatcctcggagattctctaatatctttttcgagcttttcggaaatggtatgtcgatcttgtattgattaagtcctttcttcgggtgaaggttttctgacccgatccgaagtttcttccgagccgggttgagctgaccctcagatcatggttgagcggctcggatcgcaatagccgaatgatgcgttcccgaggtatcttgaaaccccccccgggatgattttccgggttggcatccgaggtatttcgagactgggtcgaggaaaccttctgcggtgatgctccgaggcgttttcaaggtcaccttgggatggttcctcgacgtgatctccgagatgttttgaggccagctcgggatggttcttcgacgtgatctctgaggcattgatcatggtcggctcggttacctgggtgaaatccgaccccaacagatactagactgcacagtctcttaccagacaactgggtggtcgagtatcaggtcgagtaataggcaaaaattgcaaaaactaagcaacaggtaacaagatgcagtaaacaatagcagagtaaataagaaatcaattaaatgagaaattcccgaggatgggataattgagtagtttcgtttccttagtttacaggtgattgacatgctcaataaattatccatagacaacaaggttttcgaagaaaagaaacaaggtttgcttcttctctctgatcttgatatttctattgttctctctttttccggtgagctccgccgtttctttgttatttttgatttttccggtttagaaattccttgttttctggtcgtttctcatctcgtcgagcatctccgagccgagtatg

SEQ ID NO: 14328 - DNA, 3000 bp, Unknown
  misc_feature (1)..( 3000): cDNA_ID_3016045_gDNA_ID_2684105_Annot_ID_190491 3000 nt of promoter + ATG
cagaaaaaatgtgctgactactattttaaatttaaatatcatcaaaaagttatagttaaagttattaagtgtatagcaaaatgaaaattgtaagattaaaattcaatttaaaaaaatttactaaattatatatttaagaaatagagattatcatttactatttagaatttaaatatcattgataaaatttataattgtttttttaaacccgcatatctaggcgggcctaacatagtatatatatataccacaactaaaacatattattaaagtttgttttgtgttgttaaaaaaaagagtattaaactttttctttttcgtaaagagtttaataaaattctttacaaaattgtattgcttgaagaagtagctagtgtttgttatttttataacgaggtagcaaatggacaaagcgtgaaatcgacaaatgacaaggttaggatgaagagagaaaatacgatgaagaagacaaattctgtacaacataaaacagcggaattatttgaggtgaaaagttagttggagggttaaagtatgcatctttactgatggagccgatgaatatttttcttgtttcagacagaaagcaaccaagttataggagatgaattggaaactaagcagaaagagttgaaagaacttaagaagcgttaaagacaatgtaggtaaaataagagaaagaggactatttgagtatggtttagtattattatttctggtattgtaaaccggtacggtataaataattcaagtatgcaatccagattcattaatgagaataacgatcttcgtaacaaacttttcttcttcgttctctccttccatggagattctagttctctaacatggtattagagcgatgaatccttaaaattcatccgattctagacctaaatctctattttatttctctttcgatcaatttctacggttgtttccaccgtaaaattgttgtatcaatcaaaatctttctcagtttctttatcctcaacgtattttcgtttttccgatggtggttactcacagaattaatcgtcgcatgatgataagtgtgtattttacatgttttgagcatccatttgtcatcattttagcatcatatcatcactgttttataccatttctcatcatttgtcatcactttatagatttgcatgcatgttgcatatttgcgttgatttcaggtgatttagagctgttgacgagctatctggaagaagcgggccggatcatgtcaaaccactcgaccccgaggtcgagtagaagcttcaagatctcaacagatcactcgaccccctggtcgaatagaggacatcactacttcaccacatcactcgaccccgaggccgagtgtcttcaccttcattgctagaacactactcgacctcttcactctacctggaagtcgagtatcaccatcaccaccactcgactgcatactcgatgacaaacttcagagccttcttcattccgcactcaaccagacactcgagcacaaggaagaaaagaagactccagctattcactcgaccacccactcgaccacatgggtcgagtacagttcttaatccgtcctaatactgcgtcgttttaagtattagggtttcggaacatttggctataagtatcatgtacttcacattttcgcagacaagtttttatctagttttattccgcagaccttgtgttctagaccttttgtaatctggatttctctttatctattcagtattcagtattcatcttttgttcttgatttcgtttactgttgttcattctgttatcatcctgctgttacactgttgttatcatgttttcaacttgttcaacgtttacgcttactgttatgatgtctgagtagtgaataggtttctgaggatgggttaaagtagtgtagaattctcagtatgctaggtgattgagtattggttgatagatcccttctgaattagttgttcttaatgcctattgctttctgatcaactggaatttgagtgcagacatttccgcgcccaaaaggtgtgcgatgaaatgtctgaaccactaattccagagattcgtgatcctgtaccaaggtattggttgcagggagcgttttggctttaacttgttgattcgtaatgcctgttaggttagctctcgtcaatggtgattgagtctgggactaggttaacttgagagtctcttttgcggtggcacttagatttggttaatgaacttgttgtctagggttaatttattgagcatgtcaatcacctgtaaactgaggaaacgaaactactcaattaccccatccttgggaattctttatctgattgaattctttgtttactctactgttgtttactgcatcctgttatctgtcgcttaatttctgcaattctttctatttactcaacctcgtactcgaccacccagttgtctcgcaacagactgtgcagtcgagtatctgtgttttattttctgtctgttactcgacttgtcactcgacctcacccagtgctctgcaaagagctgtgttggtcgagtgtttcactgtttctgtttgattttctgttttctacatgttcacttaggactgctagaacagaccaaaacctgttattgcttggcttgacttagtgacttctgatcacatcttgattgttagcatcacacccatttggattgacaacctaaaatactacaacgatatgattggtgttttaggataattgactaaaaacctattatcaatttggcgccgttgccaattgggtgtttgtttgttacatttgagattttagacttgcttagatcaagttctttttcaattttcttttcggttactaacagtgtgtttttcttgttgtcttcttgatccaggtacacctctgctgtatgcgaactcgatcaacagacaattagaacctccttttcaacgacaacatcgaccgcatagctcgcgaactcagagaaaggagaaacacagtcaaccctgtacctcaacaaccactcgat

SEQ ID NO: 14329 - DNA, 3000 bp, Unknown
  misc_feature (1)..( 3000): cDNA_ID_3015992_gDNA_ID_2684105_Annot_ID_190506 3000 nt of promoter + ATG
atcatcttcgttgccttcctccacttcatcctcttctgttgtatcgtcttcaacatcggcttgtttctctacatcctcattattttcatcaacatttgtagcactatcaaacacacggtcactttcaaaaacttcaccatgagacctagagacagtattcccgaacgccttcacggtagtattgaaagagacgaacaagttgagagaaagatacccaccacgaaccaaaaaaaacgtatcaagacccatctgactgtcaatgtatacaggagggcgtttagtatctatcagcactgacatttctcccggcatccagtagctaattatgggattgatctcggtggacttcaaactgaaagcgtctcggagtgtacggacaaagtccgtgtacgtcatggtttcctgaacgcgtacacaacgaccaaacatgccttcctcaggttcaaatttccattctccttctttgcatttccactcaccgaccataacccacctgcatcataaattcaggagacacacattaaatgcaactgaaaaatactatacatataaaaaacaaatggaatgtcgatactacacatttataaacctaaataccaattatcatttgactattttaaacaaacaaatatagatttttcaaattttctgataaaaacatggagttcgaacacaatcaagatcctaatatgacataacaaaaaacttcttaaaagaacttcgttacttacacgagcaatgcttgttttggctccaaacttggtacaaaaacaagatcaacacttcttcagcaacaatatacgttctcaataattctttattcctgggttcatcttctttatctcaacaattattatcaataatttttttaatattatttgatgtaatgatgattttgcattaattgtgacaatagtcacatctaaactttttggagcattaaatgttgatgtcacttcggaataatggaaataatctcacttgtaacggaaccgaatcgtgtcaacgtgaaacaaaaaatcttcaactgaaccagaacagtgtacgtaactaaacctgttaaactaaaccgtacatttcaacagttactaagagagaagcgcaagggcagaagcgtcattttgcaggcgaaaagacaaatggtgaaaaccacatttgactttgacaatccatggaaataaaacatggtaaacgggagggaaaggtctttaaacaaaccttacaaggtcttaaatatctctagaaagacacatatctcacctttattcttttatttcttttttattcttatttttattaattttatagttaaataccatttatttttaggaataagttagaaaatagtacgtttcccaaacttaattggaaaactagtacatgtactatttataattagtagaatagtcatagtacgttttgtttttgtttggtgaaagagagaggtataagggagagagatagcgtgtgagagagagtgggtcaagtgtgtcaggattttatgtatagatatatgtatagatattatttgtacagtgttcagtaatataaaaacaaaaaattattaaacaaaataaatatcaaatgatagagaaaaaaacatagatttttatatctaaacattggtcttcttttgtacagtggtctcaatgtaagaaaattttaaaaacgtacttggtttcaaacaaatatccttctttacagatgcatttcatcatttgatagcgcattccagatagcggtgtacagttagcgatgtaaagatagcgttgtgcagattacctaaaattctttcaaagtggcaagtattactgatgaatgcataactctttttatgtattatccaagtattatttgttatgtattttaatttaatttgttttctctctaaaaaaattgtttttctttgagataacgctgtacagatagcactatacagatacaaccgcacagattgcgccgtgctgattgcgctgtacagattatgctatacagattgtatttatatctctagtttcacaattatagtaatttaaaaattattaaacaaaatgcatatcaaatgataaagaaaataacatagatttttatttatataatcaattttagaaaaataaaaatttacaaacgagtattttagttcttaaaattatagggaaaatgaaatgtaataaagaaaaaacaaaaccatgactcactctttctctctctctcacatgttttctctctctcccttaattacacctctctctcacgaaagaaaaacgtattattactatattacatattataaatagtatttgtactactttctaattaagttttgaaaacgtactagtttgcaaagacactcttatttttatgaccaatgggatggtcttagaacaaacaacatatattaccacattaacctccattttgggcaaagcttgagtatgaagtaattttctctaaatccagaagtccaatgtagagtctcatcatcccaaaatgttttatgataatattcatgttagatatgacttgaattggattgggcccttaactttaggcataatcagtttagggttaattagggtttcttttgtataagtactcttcttaacctaaccttcatgtattctgtactctgttttctcaagcaataaaatctgtctctttgcccgtggacgtagccaacaacaagtgttggtgaaccacgttaaatatgtgtcgtgttctttacgtttttgttatcttgctcacatttgttataacaaactggtatcagagcacaaggttctttgttctgtgttcgtcgtgcgaatttcgtgcagtttcagatccgtgcaaaattcgtgtcagagcacaaggtttccttttatgcgtttcgtgcgatttttgggttaaagaaagttcgtgcagatctgtgtagaagaaggtttcgtgcaaaatccgtgcagaaaaagttttgtgtagaatcaggttctaggatttctgcgtttgtaatctggtgagaag

SEQ ID NO: 14330 - DNA, 3000 bp, Unknown
  misc_feature (1)..( 3000): cDNA_ID_3016015_gDNA_ID_2684105_Annot_ID_190500 3000 nt of promoter + ATG
cgttacatatttaaaagaaatcggtttgtggggattcatattcccacaaataaccaagtaaagatattgagtatcatgcattatcaaggaagtgcacacgtgctgaaacagattagccatttcttactggaaatggagtgtcttgaagttgtgaaagttgtcatctccaatggatgacccccaaaaggtgcaactcacaaaggatctattggaacttgccaccgcttcacccaagctcaagatattgaagaatctgttgaagcttgccaccgcttcacccaagctcaagatattgaagaacctgttgaagcttgccaccacctcacccaaggtcaagatattgatacgagatacggtatcacatacacccgtagaggtttccaaaacccgagtccagtcttaaagagtttctagttaggtttttggtgcttttcccttttggattaggttgtttttggttcttcttctttttacattaggatgtgtttgatcgttgagccgaataatttgctttgaatctctgagatcttaggaacagctaatggatcgtagtatgatgatattaagacatctttcttatggttatgaaagaatgcaaaataaatacatgcatctttgtactagtgtatgtatgtaaattacccactaatggtggatgtacgagagaaaaaaatacaagatcaaccattactaggacaattcaagtagccatacatattacttacaacattgtagaaaacctaacaaagttttgtaacagcaaataaataattttcttaactaagacataaaatataactttgaagtttgaacaataatcacaaactatagattcataaaaacactttaaccttcgaaatctgttttaacccactgaacatgtttcacattcatcttctcgtccaactccattttctttaaatccgaactagtcccatcttcagcggtcgagactcttcggttacattttcttctaaaagaatcttcactctcaacatctaacccttcgaactctctaacccaataacaatgtaacaaacaagccagcactagaaccattatctgtaacggaatcatcgccacgaaaacaccacattctactctaaccaaagctttagcctctctagggtctcgagtcgatatcagcaaagaaagactctgtttctctctactaaacaacattaaaactgcaataaactgacccgtcagtgaggaaacatgaagcgttatccgcgcgatgaaacatgatcgagattggtgcgaagaggcactaccgaaagaggagatcagagagacgagtgagactgcgaggaaggctaaaccgagtgaagttggagggtttctaagaagaatgattggtacgaaagaacagagggagaggaggaggagagtgaaattcagacacgatacgagaatgttttggaacaaacataactttctgtgaaaagaagccattgatgttttgtgaaattatgttttttttgtttgtttcaagttttatataggtaaagtaagaaactaagcgcccgttggggagaagatgtaacggctatgatgaggtttaacggttatattgacataatgggcttcacaaaagtattgtaatagatttttgacctttagcctcacgaaaatgacggtcgtatatatttgaattagtaatactattttatcattattgtttacataaatgcctgaaactaaattgcttttttttttcttttcttctcaaagacctaaaactaaattgctactcgaatagaaatttgaaaaggattattatttttgatatatttcatgttgtccataaaatactcttttatgtcaattgtattttttaagcatctaaaatatttaaatttttcttctttctcaattgcaatattttaatattttatttacatatacatagactataccaaaaatcccaaaaaagattataaaaatattgaggtacaatatgagcttataagattactgtttaactgcaaaagaaattgtgtcttgactccatccaaacccacgtgtcaacaactgcgtgcaaaacaacatgtgttcgatgagtaatcgtacgatttccaagatcaaccttggtcgttgggtatatatttcggtaaaaaaatcatcgtcgaaacacaatcgatcattaattcttttatttgtcactgtagttaagccaattgaaactctaataaaaaattaagagcttaaaaacaatagaatatgcatctaaagatttttctttccttcaaaccaagacacaatctttaataatataattaaaacaaaaaaggtaaacataaaacaaagatgtttgaagacaccaaaaataggacggtgaaatttgacacaagtaataaaaaataaggtttgtattaatcaacggaaaaccatagattagaccattagagcattctcattgcataattatttttttagtgtctcaaaaccaatatatttaatattttaatattaaaagcaaactaaccattaaaaaaaaatttacagaagtggacgaaaaaagatttgctctcaccgtttgtcaaagtgagaactggtttttacggtttgtcttttcattcaatttcggaccaaattaccttgggaaaacttaataatggcacaaaccaaaccgtgcagcagttcgtatcggttcagttgatggcataaaccaaaccctacagcagttggtttcggtttagttgatgcggttcagttttgaaaaagacaaaacaaaaaaactgaaacgaagaaaccgaagaaaaagaaaaagagaagagagtaacggagagatttgagagagaattagaaagcgaaacgaaattcagtatccattgtttcaaaattcgacataacttcgaattgttgggtagttgaattgagtcactgaactcccacatccggggaagagaaagttactgtttttcccggcgaagccaagaaaaagttactgtttattccgacgaaatttgaacctccggcgagatagcaactttagct

SEQ ID NO: 14331 - DNA, 3000 bp, Unknown
  misc_feature (1)..( 3000): cDNA_ID_3016183_gDNA_ID_2684106_Annot_ID_190511 3000 nt of promoter + ATG
ctcgtgcggaaatcattccgggggaagagctttagccattaaaataaaacgccaaggatttttctggccgacaatgatcaaagactgcgaaaatttttcaaaacgatgcaaaaaatgtcaaaggcatgcgccaacaatccatcagccggccgagctctagtcatcaatcgcctcgccgtatccattcatgcgatggtcaatggatataattggaccaatgcatccctcgaagcagaaaaactagttctcgtcctgaccaactatttctctaagtggatagaggccgaatcttacgccagcataaaggacgctcaagtcaagaactttgtgtggaaacatatcctatgtcgccacgggataccttatgagatcgttacggataacggctcgcagtttatatcgacccgcttccaaggcttctgtgataaatggggaattcgacttagcaaggcaacaccacgatatccccaaggaaacggccaagccgaggccgccaacaaaacaatcctcgacggattgaaaaaacggctcgatgctaaaaagggctcgtggtccgacgaactcgaaggtgttctatgatcgcaccggacaactcctcgccgagccataggagaaacccctttcgccttagtctacggaacggaatgcgtaattccagccgaaatgatagtactgagcctacggcgaagtctatctcccgagaacgatcctgataatactcagaggctcctcgacgaactcgatctaatcgatgaacgaagagattcagccttggttcgcatacaaaattatcagaatgaaacggctcgtcattataactcaaacgttcgacagcggagattacacgaaggagatcgggttctccgaaaagtttttcggaacaccgccgaaccgaacgctggaaagctcgggacaaattgggaagggccatatctgatctctaaggtcatccgacccggagtatatgagctcgccgacctaaacggcaaagccgttccaagatcctggaacgcaatgcacctaaggaagtactattactaaatccaaggtgacaaaacttgaactacgaggtggcttgatccctgaaaagggtacgtaggcagctcgtctttagacgagttcagctaccccccattaaaaagggggggagtgggtccgtatatccatactcccatttatcatcttgtaagtttttaactttggtgataaataaaaatcaattcacaatttctgaacgtattgaacaatatgatgagcgactgctcggagtatcttttatgcctgctcggcaacagtgcgctatacaaataacgagataaaatctatcagataacctctgatcagaaatttcatcttcagatacccggttatactataaacgccggtattctagctcatttctaaacgctgaaaatgaatcggatcgggtcgcaaccgaaatgtttaattccaaaatccaactgtacttatcagaaaaaggttcggatttaaataaagatcgaaaacttcggaattgattaatggataaagccatccaggcatgaattcataggttctaaacaagggataaagccatccaggcacaaaagtaaaaagaaaatcatcaaagtttattcttgaggctcggaaggaaggacatcagcagccataagctcggacaaaggggaaatcatgcgacctaagctaggatcgtaaagaaatcagctgggccagctcgcccaaagctcaagctaagctggaaggagtgacggttactcaggtcgagttacagtccagctcgggcagctggacgagtgacggttgagctcgaggtagctggacgagtgacggttgagctcgaggtagctggacgagtgacggactagctgggcggttatgggcgaagagatacaactcctcagaaaggtgcaactcttcggaagggcgcaactcttcggaaaggtgcaacttttcggaaaggtgcaaggaacggatgtgttgattcgggaagcatccattcgccccctatataacgaagggcgcccaggaccattccactcaccacaacacaccgaaaacacaagaaactcatcattaaaactctctccctcttgggagaataaatagtcttaggattcggtagccgggctgtggccggcaataaagaaggagggtcggatcgaccaaaggaaggtgagggctcctagactttgagtctaagggttctaggatgtgagttagtagtcggatccttgaaaggattgactagtgggctgggtagtatccgagtcatgtgcatcctacacaagactcggtccgggtagggatcggctgaggcggggacgcgactcggcggaggaccggcgggtcttaactgacctgccgagaatcggccggactgatgcgcgatcttcccctctctgaatcctctccacggatccgagtagtgtatggcatatagagcattgcatggacttgcatatgactaagtaaatgagattacttatggctcaatgactttcaggaacgaatggtgatcgtgggaaggacttggcttaggcgcgagagactcaagaccgggatgatgggtggtgatagttcggatagtttagggatcgattatatgacttgtaatagcttatatgcaaactcataggttgtatcgaatcctttgcttaatcaataaagtatccagttgtttgtttactctattcgtctcatatattgaatcacggaatcatatggaacggattagactaggaaagaacctcataaacggttagggctgagtcacttagtggcttgggtcgagagaactcgtccggacttaggcagtcctgatcggggcctttcaagttggtatcagagcatgcttggttctaggactaggtgttgggttaaggggtatcaccactcgtcggcttgagaatctcgcggtagttgttctttactcttttgcgattttactaggagttatgtggattaactttggaggtttcgcagatgggtaagagcagcaaa

SEQ ID NO: 14332 - DNA, 3000 bp, Unknown
  misc_feature (1)..( 3000): cDNA_ID_3016111_gDNA_ID_2684106_Annot_ID_190532 3000 nt of promoter + ATG
gttacacgagatgggaaattaccggtttcaaaattccgcttgtctcctgaagcaaagaaggcgttgttcgagttggttgttgctgaagtgaagttttcagatggctatgtgtcaaacttttcaagatgcgtagagcaaggaagaaagttttctggtatgaaaagtcatgattgtcatgtattcatgcaacgattactgccatttgtgttattcgagttgctaccggcaaatattcatgaaacaattgcaggtaatatatatatatatatactatatatattcttttactcaattattacttgacgactattaacttacattaaataaatacatgataggcaacagagtatttttcaggaacctatgttcaagaacattgacaacagataccatagaacaattagacaagaatattccagtgttgctctataacttggaaaaaatatttccccctgccttttttgacgtgatggaacatttgccaattcatcttacacatgaagctgctcttggtggaccagtgcaattttgatggatgtatccttttgagcgattcatgaaatctcttaaaggaaaggcaaaaaatcttcctagagttgaggggtcgatagtcgcaggaagtttaaccgaggaaacgtctcacttcacgtcgtattactttagtccaagcgttagaaccaaaaagactcgtccacgacgatatgacgatggaggtttgcacctacatataacgttcctgatgttccagatacctttgcccaaataggtagacttgcagggaagttgaaagaagtttggtgggacgaccatgcgctttctcgagcagctcacaattacatactccgaaatgttgattacattcaaaaatttgaaaggtataaagccatacagttttattcttaatttttttatattttatagtgactgtgatactaattaaggaagctaaagtgatttccgattaatttgtaggttatttgattcacaaatctgtgaagcatgtcctggattagaagaaaaagaatatgaaacttacaaagatcgtgattttgttggatggttaaaacactatacacgtataagaatgtttggaaaattcgtttacttaacaacttataaaaaatgataattaaacttaatattttctttgtatacgttacaaacggatgtggaaacgaaccattaccactttggttgcatgagctcgttcaagaacaaagatctaagatcacaacttctccgatgtacttcactcatggctatactttccatacgtatccatatggaagtcgaagggcaactgcgaattatggaatccatgttgaaggtgaaactgagttttatggaattctacaacaaattctagaagtcgaatattcgggacttttgaatttgaaatgcgtccttttcaagtgtgattggtatgatcctgtgatcggtcgaggggtacgggtaaataacttaggggtggtcgatgtcaatgcaaacaagacttattcaaaatttgaaccatttatcctagcatcacaagcagggcaagtaagctttctatctcacccgcgtgagaggcctaggcgtgaagtgtggttatcggttattaaagttaatcccagagaccgtatagtcggtctagttgatgatgttgtgatgcaacaagaaagtatcagagaagtttccataccaaacataacaacagaagatgttatccacattgacctacaaaacagagaattagaagacatcactcatgacgattccgaagaagaagaacaatcagacgaattcggcgaatctgatgaagacgttgagtctgaaagtgattgtaataattcagaaaatgaatcagaatgaatattattattgtttaattatcaactttttacaaaatataacaaatatacgaaaaaattctgaaaatcttttttatatacttccaattttttaattttaaagtttttataaattcagaacttagtgatttcttatttaaaatttttgaaatttgttggtgttcttattatattttttaaacttaattttaataaatttgcgagggagttgctgggagtgcacgcagattcctcgcaaaattgccgaaaaccctaaacaactttgtgagggatttgcgagtcttcctagcaactccctcgcaaaattagcggcttttgattagttatttggtcggctcctcgcaaaactgtagcaaagtttgcgagggatttgcgggtcgttttaagtttatatatacaacgcgacccagaccaaaaaccctaatttccttcttcttctttcttcgtctccgtctccgtctccaaacaacgcaccggttccattcttgttcgtctccgtctccgtctccgatcttcttctccagttccttctttttccatcttcgtctccatctccatctccgtctccgaccttcttctccgtctccaatcttcttcgccgcctctctagtcccatcgatctcaaaatgcaaggtaaagaatcttctttcgtttagggtttcatgcaagtcgatttccgtagatatgattagggtttttcttgtacttaatcatttttgtctaagtttctaataagggtctcgaatttcatgcaaggtgaagattgaatgttctgaatcgccgcctcattccttcttctccggcaataacccgatctactaagccgtctctccctcttctccggcgataacccgatctactaagctgtctcaccctcttctccggcgataacccaatcttcttcgccgcctcttgagtcccatcgatttgcaaggtaaagaatcatcaaacgtttagactttcatgcaagtcaattttatctgtgtttctaattagggtctcgaattttgagttgggtttcattagatctagttagggtttcgcttgtttctgtacatctaatgactttgatctgttggatttcattagatcatattagggttttatattttgtgttggatttcactaatgttttcttttcatttgcaag

SEQ ID NO: 14333 - DNA, 3000 bp, Unknown
  misc_feature (1)..( 3000): cDNA_ID_3016263_gDNA_ID_2684108_Annot_ID_190542 3000 nt of promoter + ATG
aaaaaaaaaaaatccatgatgagtgtgtattgccacgcggccacataaagcggagcggcaatttacaattgcaaaaaagaaaccaggaaagcttcttaagcactgaaacaaacccaaaaaaaaaaaaaaaactcttcaaagcgaaaccaaatttcacaaaacacgtaagcgtagatcggagcaaaacaactatgaagaaaatcacgattccggtagaatctcttgacgaagaagacgatttcctactacaactcgccgcaattgaagctgaagcagcagcgaaacgccctagggtttcttctataccggaaggaccatacatggcggctctaaaaggaagcaaaagtgatcaatggcagcaaagtccattaaatcccgcctctaaatctcgcagcgtcgctgttaccaccggcggttttcaaagatcagacggaggaggaggcgtcgccggtgaacaagattttccggaaaagagttgtccctgtggagttggtatctgtttgattcttacttcaaatacaccgaagaatccaggtcgcaaattctacaagtgtcccaatagagaggttcttaatatgtttatttttgcattctaagtgttcgataaaatgcctatgagaatataatgattttaagctacgtgttctattaggaaaacggtggttgtggatttttccagtggtgtgatgcggttcagtcttctggaactagtactactactagtaatagctatggaaacggtaatgatactaagttcccggatcatcagtgtccgtgtggtgcgggtttgtgccgtgtgttgactgcgaaaacaggcgaaaacgttggccgtcagttttatcgatgtcctgtttttgaggtgtgtgtatatcaatttgtttatatggttggttgtgttggtatctataatcaacatagcaatggcattgcaatctcttgttcattttgtggtttgtgcttctggattctggtttagtgagccctttggctgtgtttcggatagaactatggttatcgttctatatggttaagtgctgagtcttgtctttcattgtatgctatctctgattgttgtaaccaagtatactcagcttagattaggagatttttcatggtttaaatgacggaaatagagtgataactgtggcatacacagtttgtagactttgtgcatcactggaataagtgaaaaattgaattccgagtcaatattgtgcacgatggttaagtggttaatgtagtattgcttacctttgagtgtatgtgtgataacatggctttttattaatttcagggctcttgtggtttcttcaaatggtgcaatgacaatgtagtcagctctcctacgtcgtatagtgttaccaaaaacagcaactttggtgactcagataccagaggatatcaaaatgcgaaaacgggcacgccctgttataaatgtgggaaagaagggcactgggcaagagattgcactgttcagtctgatacgggaccagtaaagtctacatctgcagctggagattgttttaaatgcggaaagccagggcactggtcgagagattgcactgctcaatctggtaatcccaagtatgaaccagggcaaatgaagtcgtcatcttcaagtggagaatgttacaaatgcgggaagcaaggacattggtcgagagactgcaccggtcaatctagtaatcaacaatttcaatcagggcaagcaaaatccacatcctcaactggagattgctacaaatgcggaaaagcaggacattggtcaagagattgcacttcccctgctcaaactacaaacactccaggcaaaagacagaggcagtactaggtcaggctttctagttttgatctgtcttatacaaaatcttagggtctctcttaatatagttaaccacttcattgccatggccaatgggtgtgcctaacttcgaaacctagctttatcttccatcttatgaatctttcttttgttaccttttttttagaaagcttgtgaatcaaagaagactgatctgtttaaagttactgcatgaaattaccttacatttgatttgttttctgacgttttgatataacatatcataatgggttgttctattattttgttgggttgaaatgtgtccattattccaattgtgacaaacgttttgttaatagattttaccgtgctttgactaagaaaaccctgtcaacattgtatatacatagcaaaacaaatcttaaaaatatcaataaaaataagccttgaaattctctaacatttctctccgataacttctgcaataatatatgaaatttattttcacatttaccctacgccatatttcttttcgatcattcctaaagaattcacaagtttttctttatctttaatttttactagtgcaaatgtcaaagcggatattttggtgcgtaaaattcgtgtccaaccgcatcatatcacttatgtaaaacaacattccttagaaatgactcttttgagctctaatttatttcggatgacaaaaaaaaacacaatattcctcataaatggttcttttgagttccaattaatttcggataaagtaaaataaaataaaaaggaattacatatggtccatatggcgaaaataatatatatcatcacctgaagaaattgcaggtaaaaagttaaagaggcacaaagaaaaaaaatggttagaaacgaatttggaagctagtgcttttttagtttgttgaagaaccaaaaaaaatatgacaactttcctctgcaacaacaacgtaagaaaagggacagagaagatttaagttgttagaaaaaatcggtagactccatatttagcttatgtaacgctttactcatatctatattcgcttttatcttatcatcttctgatttctcccatttatggctaaccaacaaaacaaaacccatttttttttctctttagaatcaaaagtaaagattggttgatttaacattgtgtaatgcccactctgcttcaaacagctccaatg

SEQ ID NO: 14334 - DNA, 3000 bp, Unknown
  misc_feature (1)..( 3000): cDNA_ID_3016248_gDNA_ID_2684108_Annot_ID_190546 3000 nt of promoter + ATG
tcagaatatgagtattacttatcaacaataactcatatattttatttagcctttgaaaaacactcgatttaagttcataatagttcttaaatttctttcaaatattgtgtctacaggacaacgatacttgcgtaaaagtttaatcgtctgttttaccaccttcgcatcagagatattctcttaacaatgtgagttatattcaaaaagagacttcaagtcttgaagttttagtaataactaattataatttattttatctaataacaaattcatataagaattgctttatacaacttttagatctttagtagtcaaagattgaacataatcttctggatatgtcacttattatccattcattacttctccttctcgagatgatgaaacttcaagttcatccatctcgtattgaattccactctagaatcataatgtatttatatctcatcatattaactttgagatttggagaactataccgcatcgatgattttaattttgtattcccatagaaaacaatgtatatgctcttctagagtcttttaataagattttatactacttgatatactagattatttcatcgttagaattttttttttttttttttttttttttttttttttctcaacttctggtgataatttaagttcttaaaaaaaactttgaccatcaaaaatatgatatcttcttaagatacattaaactagtcattcatgaaaatttgtataagtgattatacctttaaattaagttatttatcaatcaatttatttcataaaataatccagtattatatactaatacaattttaatgcaatattgtaaaaccaatcagaataaaactattttgtgcaaaatctggattttacatatatcttgacaaaacttttatttagggtaatatgaattcgtgcaagatttgggaaaaatcatttcgtgcaaaattagggcaaaaccatgaacaactttttttttttctttttttttttattttttttttatttagataccacaaagatttagagaaaaaaatcttataaaaagaaaaattatcttgcaacgtttttagtaaaaataataataacacaatcaaatatatggaaatcttataaaaagatttagataataataacacaaagatttagatatatgaaatcttataaaaagaaaaattatcttgcaacatttttagtaaaaataataataacacaatcaaatatatggaaatcaaatatttaatatggaaaagtcaatatctaaaagtgataagatatgtataacgttttaatcaaaggagttaaataagggatatcatatcaatcataaatggattttagacaatatagtatttataaaatgatattgaatatagatgcaactattcaaaactggaatgctaaaacattaatacatgcttgcatcacccaccaccgggttatgaatagttacaaaattagttatataattataaaattggtaatttatatattcaatattgtaatagtaaatcacaaaaattaacaattaacaagcttgattctcttctttaacgattttctttgtagaatcattgaatcatgcgatagtaattatagaaacaaatgataagcatgattctcttctttattgaatcattgaaaacatgcttttaccgatctatactataatcatcgattggctcatattgttttgtttcaataatagaaaataagtattatgaaccatgagtcgataagtaaacatggttcttaaaaaaaaatgtaagaatctctatatctaccttttagagcgtgctgataacgtgttataaacagagaaagagatagaagaaatgagtgtgttattccattgagataaagggttctttatataggagtacaaggaaagggtaaaaccctagaaacatctagatgatgggcttagatgatgggccttataatgggcatccatctttattcataacactccccctgatgaccattatagtatcataactcgtaaagtatttgaaatgctgcctcattaaaaaccttaccaggaaaacccaatgggaaaaaccatggttaagggaaaaagagtgcaacatacaataaatatccgaaaaatagtgcaagaatagttgaatattcattttgtgttatataagatggatttttacgcaaaagaaccatgaaaactaattgtatgtgtccaacatcggttgctaataagcgactattttgggacaggatattttacgacccttttttagcgatcgttttatatcgtcgttaagtagtagtgacaaccttgtttgcgattattttgggactaatatgagggtcgcaaagggcaggttgtcttatatatgaatcaataatgaaaatacataattgagcttaatagagtttttttttgcacaataactatcaaatgccaaaacactatttaagtattttgagttgattaatgacgtttcactttttaatcatatatttaagtaggtctgttaacgacgggaagttaggacataaatcttatttcccaaatttgttttcatgaatctaacctcaccacaatgtatttgggacgaattctaatgtgattcataacactgcaatcgaagcgaatctctaaactttatctttacgatatatcaacgccattcctgcaggtccggtcatatagttccattgattctatccactttaccgcatgtaatttggatcatttatggaagtaatatacagtttttcttgtatgagtcaataacgaatagttttatttatactaacaggattgacgatacatacatgcagtaccacatttacaattaaaaaaaaaatctttatcatttacgcatatatatgtataaccacggcgaacaacattaaaaatctgtaaatttagttttaagggaaaataattttttttaaaatacttattatttttatcacccacacgaagccaatgaagttttgatttctgttttaggaaaccttcttccaactctacaac

SEQ ID NO: 14335 - DNA, 3000 bp, Unknown
  misc_feature (1)..( 3000): cDNA_ID_3016209_gDNA_ID_2684108_Annot_ID_190558 3000 nt of promoter + ATG
atttaatgtttatctctaaccgccatgcaagcatatacacaggattgagtaaggttagacacaaccatccatctcacgttgcttcatatagtatacatatatcgatttacttaatctgccaataagctggttctattttgattggataatgaatgatttccctaatattgttgcaggtctatacgcaagccaaccttgctgcttgcacggttcacctttggcgcaatatcagacatctatataagccaaaaagcctctgccgcctaatgtctcaagctgcacaagctttccatgtcacggatttcaatcggatattcctgaagatacaaaaattgaaccccggatgtgctgcatatttagttgatttgggtaagtgtttttctcagcttacatatattgttattaacgtggctgagatgaagtttactccataacctctgtactttgtaattcgtatagggttttcagagtggagaagagtgcattccaaaggccggcgtttcaatatcatggatagtaacatatgtgagtcttggaacaacgttatcagagaggcccgcgagtacccgctaaactgcatgctggagtacataagaacgacgttgatggattggtttgcaactagaagggctcaagccgaagactgccctacaacattagcttcgagagtgcaggaaagagttgaggaaaactatcaatcagctatgtcaatgtctgttaagcctatctgcaactttgaattccaagtacaagaacggacaggggaatgttttattgtcaaattggacgagtccacttgttcctgtttggaatttcaggggttagggatcccttgtgctcacgcaatagccgctgctgcaaggtttggcgttccaacagactcgttagcagcaaatggatattttaatgagttagtgaagcttagttatgaggagaaaatctatcctattcactttgttggtggagaggtcgcaccagaaattgctgcaggaactacaggagagctgcaaccaccattggttcgctggccaccagggagacaaaggaagatcagaatcttgtctcgtggtgaattcaaggcaagtacctattagtaaacattacaatgtacttcttatctattaacaagctaatagcctatctacttttaatatgcagcggaacaggacaaggtcccagaggaggtgttcacgttgttgtggtgttggacacaacaaggcctcgtgtcgtaatgctatataagtcgtcaactactgctatggggtgctaataggtgttatgaagaaactttgtggagtgggcttaaataatggttgttcccacatatcttgcggaagcgggtttgtttacttctactaatgcaggattaagtacatttattgaaatagtttggtatacccaactttgatgtataccttattattttgatttttatgtactacctgttcatcgttatatttgtattggtatctctaatcccgatgtaattaagtaatgccctgtaacaccgcttttgaaatgtatatatatgaaaccccgctgtttgtgtaatcacccttctctgcttctttcaagtgcaaaatcatccatatcttacttacatactatacagtataacgaattacgaaaactaaaccttaataatgaagtgggaacccaagcaatgatgcatcagtaattgtatacacagatttttcctgtaacataatcaatggggtaaaccataacaaaccaaaaccatcactctgcctttggagcccaagcaatgagtttgtttacacgtttgatgaaactgttggccgaataacatatgttttacttagtttcattatgctgtatgttggagatgcaatttcagtcaatcgcgagcttctacctgcaagcatcacgtttataaatgttatgattatatagccaaacgggcatcgtggatggcagcttcggcataaatagttttgcatggtatcctattctatttactacttactgtactattccgaaccatatgcaagattcaaataaaaaaagctcgtgtcgatatccaaagtattcaactaaaattgttttcttttgatgtcatgttttcagtatatatgttgatattactcgttaagttataaggatatgcaagaacttgacatttcatttattagttgaatactttggagttataggagtttgtagttgtaggagttcagcatatctgttattgcatcactgtaatataacccaacacactaggctaatagactgaaacatttcacttcaaacataaatattcaaacatcacagttattagttgaatttcaatacaattggtctctgattacaaaagaaactccatgtttgttcaacataaattacacatctacaaatcaaacaccacgttctgttggagacaatgcattgaaagtttcgatagcgtactgtttagctgcatctcgcatcttcccatcatctaatttcccacaatactctagagcgtgtgctcacgcacgggttaagtttgtcaatattacataaagttcaatacatattggttgaagtgttagttttgcaattataattcttttgttggtcatatttgcaaatttcccatatttttagtctaatttcagtttttagtttatttcggttcggtttcatagatttcaaacggtttataaatacatttcggttcgattacagttcaaataattctatttttccggttcaggttattcttttttccggaatgcgaaaaaaagaatatcattgtttgctctctcaatctcaacaacaacacttctctcactcaatcgctttctctttgagacgtttgtttagtttcaacaaacaaatcaaaacacacaaagtttgtgtcttcccttaagattcactcaaatctcgcaacacacacattcaacaaatcctgattcataacatctcaccaaatctctcaaaagatctccaaatctaaaatgttcttcttcttcttcttcatctgaatccaaaacaaca

SEQ ID NO: 14336 - DNA, 3000 bp, Unknown
  misc_feature (1)..( 3000): cDNA_ID_3016205_gDNA_ID_2684108_Annot_ID_190559 3000 nt of promoter + ATG
agattatgacgttaattgttcataatgcaagagaactctcatcagttaaaatttatcacctttttttacgtcttgccgattctcgttcttgattgaaattggtactccaagaagaacaacgtattccacaatttcaacacaagtttccatacattttgtcttgttagatatcatctaactaaagtatattcaacaaaagttttttaaaagaaccatgtaataacttacgtcactaaccatagctgcatccacttacaatttcacgtaaacaattttcactgtattaacctaaacatatttcccaagacaacttccttccatggtcttgcatgtatgttcctcaactcctatcatcacctatacttccttagatttataagccctcgacacttcctcaatataagcatttgatgttgcattcgtcaaaattactgaataaccattcaaaataaattgttttacaataccacacaacttgtcccaaccaacctcttgcaacctataaaaccggaatctttgcctcttttctcgtaatttggaggtttaaagtgttagtaaaattagtttggaggtttatagtactagtaaaaatgtaaatttatgatgtggatgctctgaattagttgtgtaaaatcctataagttagggtttaatagtacataattataattacttagcttccttttttataagtttaaatttaatatttgttatttttctttttaaaaacaaaagaaagtaattactattttcaaaaatgttaatcaactagatttcaacccgcggtacaacgcgggactattttgttcttataagaataaaaatttaatttgtttagtcgattaaaaaaaaaatataatttaattttttatattttctgaatgtacaactcttatatctgtatattatttagtatacaattattatgtttgatttttactgttttaaaatatatgaacaataacgttcattaagttttaaagtatagttcattaagttaaaatctagattataaataaataatttaaatttaacttatatttatttgattaataatatttttttgtttagtatttaagataatataattgtattttgattgttatgtctaggatttcacccgtagtataccgtcttgtatttttatcaacccaaacccgtcataccatctaatctcgttgagtgaaactaaacatatgtaatggatttcacccgtggtataccgtctcgtattactgtcgacccaaacccgtcctaccatctaaccccgttcagtgaaattaaacattttgtttttgtttttttaataatactttaatttaacagatatataattcaattttttttttttcaaatggttatttaattgttataaaatccatacattatactattctaaacttgtccccccatctaatccagttttgtaaaattaaacattattttatgtttttgttctaataatttttttattaaaagattaataattcaaatcaatttaaaagatttcttttgaaatggttatttaattttatagattttatatattatatatattctaaacgttttttcgttaaatattctaaacattttctaaactttaaataactataatatttatttttaataaagtataatattaataaagttttaaaatttctccttttcaaaagtaattagaatggatggagatatattagataaggaaataataataattaggcatattaattaattgataataattaatgtcaatggcattccttgtaaataagttccaacttgaggatttatttgctaaaatgactacaaaaatgtatatgtagattagatgctaaatatgttaattatggatgttgcagctctcgattcgttgttttaaatcccacgtggacgcttttagaaacaaataacttcaacttttatataatatagatttgagtatcagcaatacaaaagaaatatattatattttaactgcttcaccacaccaactaactatggttgtcgttcaacttttgttgtgttttttcgctcgggttattccgcttataccacccaattttcactaattacaattgctgtgcttgatctgccaaatttatttttttacgcatagtctgatctactaccattctatcactattcaaacctagtattaaataaaacaaattttgtaattcttacaatttaaaaattatttacatatatccacggattgatccgaattttaccacctaactaatcttgtaggttattccaattatatcacccaattttactcactacagtttgtgttatcgtcccaccaaattcattttttacgcactgttttgacctactatcattctatcactattcaaacctagtatttgataaaccaaattttgtaatttttacgatggtattgatacgaatttttaccacttaattaacagttccgggtgagtatagccgtcaaatagtctagtcaccaaatttttaatgatctaatgcataatataatttttcttgaaccaaatggaaatggccaaatatatacaatcttaagattttacagataaataaataaaaaataacttcaaataatctatggattatatgtaagaaaaagatacttggtaagaaaaaaattaactattgaaagaatgatatattatagcatggttatatttttgaaagaaatatgaatcgtcacatatattgatcttaagagactaaagaacaaaatcatgttcggtataaatcacacacgtcaacaatattgcagcaataaaaaacaagaaaaatttattctataattaaaattctacttctttctattttcgtaaaaaaaaaactaaccataaaataaacttgtattaacgtgaagatgatgaatgaactaacaagtgaaagaaattaaagtagttgatggaaaggtaaagagcatgtctaacaagaagacacattaaaggttttataacaacaagatcgtcaagagacagtaaacctaaaatg

SEQ ID NO: 14337 - DNA, 3000 bp, Unknown
  misc_feature (1)..( 3000): cDNA_ID_1010431_gDNA_ID_2684110_Annot_ID_137137 3000 nt of promoter + ATG
taatatcattatagaaaagttataaaaagaattccacctcgattctcaattgtcttttttttacaattttaccttatacaatttttctttcttttcgatcacaagtttcacaaaaatcaaaagattataagaatgtttatcaaaaaaaaaaaaaaagtttattagaagcgacggcatagcgtttgactaaagaatttcggagagtttttgggcctatcggcccaattatcccacctgatgggaagcgttgccctcaaagtaattgtttgcaggtaattaattgttcaaacaaagtgacaatttccttccgttgtcatataggaaaaaagttgcatcaaaatgatttattttctggcaaacttgtgtcattgttaatttatatgggatttagaataattaatgacgaatgaaaagagtatatgaaccaagtaacagatcgtgacaaagcgccattatgaagtttctactgattttaagataaaagtctaagatcccaaagttaacaaggatttcaaaacatcaaaaagcatcttctaactcaaaacacaacatagataaatttaccctttcgaaaaactcattcttcgaagcttctgttttctgcattgatcaaggtcttcctcttgggactggagaacgactgttcaatcaaaaacattacataagaacatcaatgggacttgagtgaacagtaagaagccaaagccatttttttttttttttaccttctgtatcggtcataaccagggctcctttgtctaccataatcagaactccttcgtccataatctggactcctccgtctttcataagctgctggacctttgtatctgtcgtattctgggcttcgagcacgaccataatctggacttggacgcctaccctgaccagggcttggacgcctgccataatctggacttggacgcctacgatacacaggactaagagaccttctcgggctacgaccaccatttcgatcatctctttcatcgtcatctttcaacgcatactccacggaaacaaccctatccaatattttgctgaggaaacaaaaaggggatgtttttagagaggcaaatgtactaaaagtttgacggaaaaagtaactagaagaagtgttgttttaccttctttgagtagcttcaagggcttttgtagcatcctcttgtgtttcaaactgaacaaatgagaagttgcgtctgatacgcacgttggtgaccttaccatagggctcaaagtgtttttcaatgtcgtgctcttttgttctaatggggtcaaagttaatgacaaacagtgtctttgtaggcttcagatttgaaggggctttcgcgtcaccacgaggcctgccacgttcaccctgaaaaccgaaagaaactttaaaaggtttcttaaatatgcggcatagtgcaagcttcaataaaaaccagaaaaaaatttatacctttgcccattcaactgataacctgcgtttctcatatccaaaaggaaaattgtcgagtttgcgaatagcgtcttcagcatcacgttcatcctcaaagtacacaaaagcatatcctgcaacaaaagaaagcacaaggattacaaaacgcaacacaaagagtgacaatcctcctgtccattaacctgctgcatatctcgtttaccctagaaaataactaaatagatatacaacaccttcatataagtgaaggctggtgaatatgagagatgtagaggcattccatgatgtagtagaaaaacaagatttgtagcataacacaggaattcaggatttttatttttaaaaacaccaattttatattaaaaaatctgagtgatttgccaggcatgcttaaacattctgagtggaggagttcagatatggaaggcaaggcatggcaatgatggattcaatagacttccatctgaagcatcgatgattggtaatagacagacaaattccaaagtttctctagagtcagtgaagattggtaggcacaagatgataaaggcaggtatgaaaatgtagaaatgattttgcaggaagaagaagaagatggcaaatcttgttcctttgaagaaaagttcctgcgaacaaataaacactcaatacaaccatcctctctactgcataaaccccctaccacacttaacacattcgggaaaaataaaaccaatcttttctatgtaacggtactatatataaaccttcaaatcatgtatgaaactggaactagttctaagtatccagaatcctaggtcaagcagaaactaaacctaagcaaagatgatttatcaaccagaagacgaattcgaattcgagacggacaaacaacaaaatttcaccggcgtataacttagaagacactttaccagatttcatgtccactcggtcgactctcccatacttgtcgaacaaccgttccagatccgactggcgagtttcatactcgaaattgccgacgaacactggcctcatctttatcttaattcgcaattcctaacgatccaataactcgaaattagtaacatgtaagggataaaataaggtatatggacatgagcaagtataattatcggagaaaagttacctctgaacaatcggagaagaaacgaaaaacaaaccctagacgacgacgacgactactacgctcatcgaagaaaagcagagcctggttgacttaaaaaagcccgtcataccatcatgggtacattcggaaattcaaaaatcataatgggccttctttataaataggcccacaataagttagccccataccgaagaactcgttggagtcttttcttatagaattaaatttatacatgtttatatacagacccattttccgtcggtgaagaagaaaagaattaaagtttatgtaagtgtccagttttctgacacgtggagattcaacggagttctcttatctgttttggttcgatcatttttgcggtttaggatgtctctattgtttcttcttcactctttttgccacaatctctgttccaagaatcgcgagt

SEQ ID NO: 14338 - DNA, 3000 bp, Unknown
  misc_feature (1)..( 3000): cDNA_ID_2701843_gDNA_ID_2684110_Annot_ID_137139 3000 nt of promoter + ATG
tcctcattggattggcatcttatcatggaccctacttgtcttgaataagttggatcatattcatttcatcaaaaaaatttcttttcatttcatcgtttttcagatgtatttatttatacatggtatttatggtaagcttaatgatcacttatttattttcacaaaatcgaggttttagtatcattttcgaatgacagtttgtgctattttagccagtagatcatcataattaacagcctaaacattacctgtatgtattttcatatacattaactgaaatttaagctttacgaagaatgtgcatatttataaatctgtgaatatttcaaaagctttacacgcggcaaggccaagaggttggaagaatatgcaaaatacaaacatgaaatgacaaggcgccttaaaaataataattaaacaaatatgactttaaaaggctctatagtcttatgtatatgttctgttaaatttatccaaattaaatgagccaaaactacgtttagtaagtattagaaatcatagccaagatgtaaatctaattaaagaggacgaaatttgatttcttaagttttatttctcaaaaccatattactagtttaatctttatcattaaacagaaccagatttctcttagacaaatgaaagaaaaaatagaagtaaagaatcatcttctcttacgcatcttatcaagaactgctacatttaagctaacctcgacacgtgataacatttgtcggacgcaattttcatacacagccacaaagcaatcaccacgtcatcttctcatcaacttggctttcttaatggtgccaaatggcaatgagtcagtggttgatcttgacaactttgattgctacttgtctgaaatgtctacagatctgattcattacattgtataccaaaactttcgtccatttccttgttgaaataagtcgatgtaagtcattctattcaaatattttttttcatgaagtaattttctggttttaaagcaaagtaatagattatttataatttttttaattttaatggcttaaggctaaagtgacgttggatcgatgaagccgccatagttcacaaatggccgaatttaatttgttgtttgtatttaataagtcaaaagagatttccgagaagcaaggtgaacgtaaccttaaactaatcattagaacattaattatataagttgcgtttatcattaatattgttgcttaaaattacaaactttcaaaatcccatggttaagataattagtgtttcagagcctaagacggaacggaacttgtgtaattttgtaagaataaacatattaacttcgtgtctaaaaaaaaacatactacactgacttcgttttctaataagtaattgttgtagaattttaatttatttctgtttatgtaaactgttattttgtatgtttaatgcatatattttagacaagatacttctatccataatagttagcttattaatagaggtataataatctttttagatttcatattatatttagtactattggttttagaaaaatggaaaaaggtcaaataaataataggaacaccactggtttatatttcttttctggattgtgtatactttttagaagaaaactaaaacggcatgttgaaaaggaaaccaagaggatagtaattaggtcagattacttgtttagttacaagaaagtcaagaaatctcataattgagtttaaaactttaaacatttgcatggaagtcaataaatctataatccttactcgtgatcatcttattgtttccgtgtaacgaaattaaacgcgtaaaacatcgcgtaaactatagtacggtatgtgatatgcaaatatatcttaatttattttttattttttatttttcttgggcaatgaattgaagagttgcaaaattatttgccagcttaccacatgcggccacaattttaaccatgattaatcttcttttggaatttagcgagataaatcaagagtaggtttattttagaacatagtatataatacactaatgaaaagtctcgttaaaacgtgtttcacgtaaccgacctctaaagtatggcgtgcgagtaacgacaaatgaaatctcaaatgaaaatggagattattttaatcttaattataacacactaattaacacccgtcaaacatcctgatatgtgaacgtggaatctcgttacacaatcgaataaaattattgcttaatacgatccgtctttctctctctttcgtaatgattatctatcaatattatcttgactaataaaagtatcgcaaggccttggcagtcacatgttaaatgatgatatacgttgttgcatgttaaaacatagtacaacgatcatctaggctgctgctaaattctattttcaaaaatgccttttatatgcaagaaaagcaaaataatcgagtttttttttttgtttcattataaactgcttcatttttcttaggaacggccaaactgttaaaaagtaaaatatgtatggtgattaattgatgtaaccaaagccagttcgcccgtttgattgtcaacccacgttatcattcacttgatcacttccatgaaacatataaaagctgataatacttatattataaaggaaaaaaagtatgaaaatattatcagtagttagatgattagttcacatctaaatgaaatacgacttaaactgaaagagacatgagccaattcgtgtcgagccacaaattttggacgtatatttttagcccgtggttccacaatatttgcaggtctttttattcaatgagtttattttgtcttggttgaataatgaaatttccaaatataaaaaataatagaaatccgaggccctacacaagcacacatagtaactcccacattatatataagcggccaatatcagcaactcagagattccagaaagaaagaaaaaaaagaaacaaataattccaaaaccttctctcttaatcaaaatcaagaaacttacaagatctggtgaaaaccatg

SEQ ID NO: 14339 - DNA, 3000 bp, Unknown
  misc_feature (1)..( 3000): cDNA_ID_2729996_gDNA_ID_2684110_Annot_ID_137146 3000 nt of promoter + ATG
cattttattcaataataataataatgacaaaattgaaggatggatggtgcgataatggcgacaacattttccaactgtcatttgccccccagggtctaggaccctttctctatccctagccaaccctttcgtctatttattaaattttattagataacttaaagtaattcatttaaaagcaatatgggtcttgaaaagtttcatgtagattataaaatcttacctttggtatctaattccgaattgcttttattctgatagcgaaggctttaatttatacgttttcgagcattgatttttgttgtccacattattctcaggattgctttgtatactggttcttttctcggctttagtttaatttgattattgcatctcagtgatggccatcaagaatattgcgtctctaagaacaaatcgactaatgtgttgtcgtcttgatcttttataacggaatcttatatatatattgaaaagaatctagttagacagactcaaactgatatttagtttttaaaaaacaattctttttaagatgaacaagtgcaactacttggaaatgaaagagccttatcatataacaatttaagacatgtaaattgatagttttagcattgacttgacttcatctcttaaccttaagggttcacacacacacatacaatgatcacatatgcattgatttattttgaaaagtacatttggtggtagggtgttattaattgatcaccttagaataaacataagaaaaaatatatagatgggattagaaaaatatagatgcaaaatgtatgaaggtggggcaagtttcgtatggggagggggatgcagaggaatcattatcaagcccaagttagctgcagaaagggaagattcaattgtatgaaaaattggatatgtcttaactattaaattcaatatcatgttattttcttatgtttatatcaaaaaatattcttcccattataacacgtgtaagaaccttcacattgactgttctatattatcaatatactctgcgaatttggcaatacatatacactccttcattatacgaattatggcctctgcaatagctgcaaaagtcagctgctcatgatcccaacctctagatatataaacacattcattcattgactacacttccactgtatacattatgtataatgtgtatatatgcacatgtgcatataacataaggcatatcaacagttggaattataataaaatgtggatgtctatgtgataagttctaacttctataaaaaaaaaaaaattagtttaagctttctgcgtcaatatgtctttgtatgataaaaaaaaaaaaggagagtttatgataactactcgcttgacatacaattaactactagataatttcaattgatcataatgtgattttttggatataactataagttttgacctgaaattaattaagttacatatgaaagatgtaatgaagaagaaggtgaattaggtggtccaaccaaataaagacgatagataaagatcaaagagtctccattgtccattcacaaatctcatatatctttgttttttaggtttagtcgctttcccttcttccaccaacaacaatgccaagattttgtaaatcttattttatataccctatggcttattcactcacccttattattatttctcttaagcctcattttagatcttacatacggagtttcagtttctcttacattcaacttttcaaaaattgagattgttgggccaaataatgggtcaatataaagcccatctgtggcctgaaagtttttataaattatgggcctttttgactaattcttccttttggtggctctcttcttcggcggggtaatattgttctattcttacagaattgggcctaaacaggctctaatgggctttacttgtagttgagttacgtggcactttcacgtgataatgtttagtttcatgataattagagctggtcccattgacattgatttgtgccaggtcaaaggtgatgtggcattaacaaacgattagtttaattaatcaactttttcagattatcaccgcaccaaaaatcatctagaaatattcagtagcgataactatttcatttaaataattttacagcatatatccttaacattataatatttggatacgtcacccaaaatcatgaataaatcttgttattattagttacatctacgtttttaaattgacattaaagcaacgttatatgtaagaaacaggtcgactatatcaaagcttcaagttcaaacaatcaatggtcatggtaaaacatagatatcgactataaaaattatattctaacgtgtatttttttttatatcttttttaagggtgtgattttctaccttaaaaaaaaaaaaaaatcttaataccgtattattataaagtacataaattcaattgttatttttccaacattattatattaaagacttcattaatgggaaaatgtttatcttcgactttaagagctatagttgaactttaaactaacagttcatagaaataaatgaaaaatagctaatgttttgctaaatttgatgattgtaaaattttgatataacaaaattaattgaagtaggaattttaaaaggtaataaagagagatatttcctgcgtattttccttgtggaaattggattcaaaacgtcaatttcagaaggtttcttctggactactacaagtaagaaactctttgctcataagctataaccaaatctcaatctccacacacaaaaaaacctttattaaaaaaaaaaaaaagtcgatagctttactgtataacatatataaaactcaaatcgtctcctttcgttaacaaaaacagttcgttgttcctttaatccgtaaaaaaaaacaaaaaaagttttgatttttctctgtgagtttgagtagtagtaattaatagaaacaatggaggttgattcaagcaaggatccgaaagtctaacgggtcaaaaccaaaaaattccggatg

SEQ ID NO: 14340 - DNA, 3000 bp, Unknown
  misc_feature (1)..( 3000): cDNA_ID_2729986_gDNA_ID_2684110_Annot_ID_137149 3000 nt of promoter + ATG
caaatttaaaaatttaatacttagaaaatttaatacgtttttagtcctcatgaattatcaatcaatccaatggactgcaaatgatcaactgacttgcgtttcgtctaccattttgcaagcatcatatatgtatgtgcaaagtattaagctgttacgttctaaagttgattaaagttactatgttccaaagccctatgttcattttttttataataataatctatcttgaacttccctattttaaaaatcataaacgtactacagaaattaaaatgttgaaatcatataaaattatcctaaatgtgttatcttacaatatgaatttcttaacaatatgtatcttgactgcatatgttctacaaaccatatgaattttgatatcgtaatctcttgtattaaacataccatttggtcgagatttgtaatctaattgatcaatacttttaatgtctcaaaatcattaattgaaattggataagaaatagaaggtttttttttcccaaaatacaaaggttattttatcaatcaatatagttcacgctctatctgtgagagattttaataccaagaggtttatatgcaatttattctaaactcaataacttagcaaattattttgacccgtttcaacatcaatttgacccgacccggttggttggagcatacgaagatagattttcgagttatcgtctccttttcccggtcagttttagtggggaagcagaagatgtcgaccggtttagctctgaatcgctgttcagtttcggtatgtagaacggccgttactttacttaaccggccaactgtctccgttgccaggagtttgaaattcagtcgccggctaatcggaaactgctcgatagcgccggcggatccttatgttgtggcggacgacgataagtacggtaacaaacaagttatcagtctcactcctcgcctttacgactatgtcctctccaacgtccgcgagcctaaggtgtgtaactcttcctctactttgatttatagagattttacttgtggttcggtgtcttacttgattttgttttagattttgaggcaacttcgggaagagacttccaaaatgcgaggtagccaaatgcaggtaacagtttcactggattcatcttgttgatgagctctgggttatgctaattgtttggaatttgaggtgaaaatgaagaatgcacaatacatttgattttggctgtaggtgtcgcctgatcaagcgcagttgcttgcaatgcttgtacagatgcttgcagcagaaagatgtattgaagttggagtttacacggtgtttaatcttcttcctatgagtttcttgagcattgttatcttagctcaatatcgtcactttcgacaataatgatgagcttgtgtttttgacagggatattcttcattggctgtggcgttagttctaccagaatcagggtgtttagttgcctgtgaaagagattctaactctcttgaagttgctaagaggtactacgagcttgctggagtctctcacaaggtgagaccgaaaaacatcacattcaattgttgcgaaaatcaatgcttttcttaggcacgaaagagttctgttttatactttttcatttgctgtttcgagactgcttgaatcttatttttaaagactgatactatacttgtataatggttcctcaacatatatatggcctcttggaaacccttataacattttgttttgctctcttgtcgattcaattctaagagattcatcatgaacaactgtatgattctttgatttgtttactctagtcaggttaatgtgaaacaaggtcttgcagctgaatcattgaaatccatgattcagaacggtgaaggagccaggtaaatacactacgcttcttttattttagtgttcagagtggctctatttgaaatgattgcctaaaatttcagctttttattacatgcagctatgattttgcatttgtcgatgctgataagaggatgtatcaggactacttcgaattgcttcttcaacttgtaagatgaataatgctagtctctttccatagttggccaagttagctttagcggttatctctgttgacgcaggtcagagttggtggagtcattgtgatggataatgttctttggcatggacgagtttcggatcctatggtatgcaacttacacaaacacagccatgctcttaaagcttctcgaatgagaggaaagaccataatctcatatcgataaattcaacaggtgaatgatgcgaagaccatcagcattaggaatttcaacaaaaagttaatggatgataaacgtgtaagcattagtatggtaagtttattttctcgattctatcactttgttctcctaagtccacaacacaacaagctcttccaaactctcgcttgagtttatcacattttttggcgcgtcaggtaccgatcggcgatggcatgacgatatgccgcaagagatagtcatcaggaaaaaccaattgggtcacagtgaacctgatccaagagagaagtcttttaaacatgaaaggatctccatgaagccaagatatacatgtttcaggatagggaatcatttcttttgttctgaatccattctcacaaacacttcgaagactcatctacttgggatggtaaccactaacgcatgtacttttgtcaaattgtttaactctttctgattagtggaaatagagttttgattaagcttttgtgatcatcttaatttctgaaaagggtcccaaagtcctaacaaagctcacagcttaatttctcattgttgtttctactatagtatttttttaattacttttaagataaaatttgtgtagaataagacgttgcaacttttcaaaagccaccgcctattatttaaatcatattctctgagcatagagccgaagtcctcaccaatcaccactcacatgttatcaataattgcttataagaatttgtattcccactctaatcatcaactctattgattccacgcgatg

SEQ ID NO: 14341 - DNA, 3000 bp, Unknown
  misc_feature (1)..( 3000): cDNA_ID_2729982_gDNA_ID_2684110_Annot_ID_137150 3000 nt of promoter + ATG
taatgtttttgttagtttgatcttcttagattcaatttattcaacacgtttaaaagcttcaatataagccaaccataagagataagaaatttgtttacttgtcttggtaataaagttaacttttacgttgtaactaaaataatataaataaagtaaactttttaaaaaacattaattaataataataaattagcctcctctgaagaaggaataataagagaggaaacaaattttcgattggtcagataaatgagttgtgggtcttgcatcgcacataaacgtgaaaggcatgtctttttcttttgatttttttttttagtagttattaaagattttgtctgctcatttctaatttttcaaagatatttatttttctatacagttcaagtaacaatagtttcaagaaaacacttgatatttttacttttatgatagaaataaaacatcatgtaatttgagaattctgaatccttgttatctctaatcgaactttgaacattttttttatattagtctagtcagctgacgattctgaccatataaaattgagaaagattttgcatttaaatgttttttaaacaccttgaaacgaaataagtatattcgaatacagttttaagtattgtcactcatgatcatattactgttttatttaaccaacgtatgttttctcttgtgcacctcttttatccattgtcgataaattttatgtgattttaaagatcacaaaatagtttatgaaaagaaaaaataagataaatgtaaacgatgggatattctttttggatgcgacaagggcattcatccaccatacatttggtgattttaccatattcacatgcatacaaatgaaacaagtattcgaacgtgacaaaaacatagctatccatgacttgagtttgtggaaacaaaattaccactaacattttataaatcaaatccatatatagtaatttatcattacaaaaaaaaatacatttctttcaatgtctatctaacaacagaaacaaacttcttttttttgtgcaaaacaacagaaacaaacttcaagagttcaagtaatactgattagtgtcccttcgtagatggaagacgactaaccaatacaagaccattgacgtcaaggaaatgctagacaatcgcgtggtccattcaaaacgtattgataatggagtaaatatatatatacagatgtcatgacatgtaagtaatactttatagatttagtgaatgcatataattcgtaattaatatacatgctcaaatatagttgatcacctacgctaaatccattgatattgactatataaagttgcaggtcacatagatgtctaaaaaaatgacaggtcacaaatattctttaatctagtcttaatcttattagtcaccgtatgagaaactaaaaattattggtaaacgagtaaacgactcatttaacgcgtcgtgaattaaacatgctcagattcttcgcttggttcttctatttttttaatatgggttcccactttttatatgacatttttacaatttacaaatactataaacaaagacacacgcattaaacgcggtcgaaggttagaaaatggttttcttattctttggtcatcgtttatcaaaaaaaaagttaacaacaaccatagttgtcaaatgacaacccaagaaaaaaacacaattattattaaaccaatgtgtgtttgtaacttcctttattattattttgcagagtttttctatataaaaaaaaaaacacaattattattattataccaatgtgtgtttgaaagaattataataatgagaatgtaattaaaaattaattactttagattaaaaatagttataaactagatgtaatcgctttctacccaaatgtcgttgaataaacattattattcgtagtcgtatcatttaatcagattaaagggaacatgtcaacaacttaagtgtatgacatataccatgtttaaataattgtaacctgtcaagtcacatcaaactgattgatgtttcattttcaaatgcgattctcgtggacttcaatatgtggttcacaagctttttgtagttgtcttctttttattcttcttttatatgtgtagtcattaacaaatgtttttttaaaaatttagctttaatgtcaatctagtcacgttagatcattaccaaacctgtaatcaaatgagcgatcgagtattcagtttacttaaatctttgtattataaacttgttaaattatagatttatttatattgtatgcaataagtttacaacaaatttaaaaatttaatacttagaaaatttaatacgtttttagtcctcatgaattatcaatcaatccaatggactgcaaatgatcaactgacttgcgtttcgtctaccattttgcaagcatcatatatgtatgtgcaaagtattaagctgttacgttctaaagttgattaaagttactatgttccaaagccctatgttcattttttttataataataatctatcttgaacttccctattttaaaaatcataaacgtactacagaaattaaaatgttgaaatcatataaaattatcctaaatgtgttatcttacaatatgaatttcttaacaatatgtatcttgactgcatatgttctacaaaccatatgaattttgatatcgtaatctcttgtattaaacataccatttggtcgagatttgtaatctaattgatcaatacttttaatgtctcaaaatcattaattgaaattggataagaaatagaaggtttttttttcccaaaatacaaaggttattttatcaatcaatatagttcacgctctatctgtgagagattttaataccaagaggtttatatgcaatttattctaaactcaataacttagcaaattattttgacccgtttcaacatcaatttgacccgacccggttggttggagcatacgaagatagattttcgagttatcgtctccttttcccggtcagttttagtggggaagcagaagatg

SEQ ID NO: 14342 - DNA, 3000 bp, Unknown
  misc_feature (1)..( 3000): cDNA_ID_2729978_gDNA_ID_2684110_Annot_ID_137151 3000 nt of promoter + ATG
atttaacaagtttataatacaaagatttaagtaaactgaatactcgatcgctcatttgattacaggtttggtaatgatctaacgtgactagattgacattaaagctaaatttttaaaaaaacatttgttaatgactacacatataaaagaagaataaaaagaagacaactacaaaaagcttgtgaaccacatattgaagtccacgagaatcgcatttgaaaatgaaacatcaatcagtttgatgtgacttgacaggttacaattatttaaacatggtatatgtcatacacttaagttgttgacatgttccctttaatctgattaaatgatacgactacgaataataatgtttattcaacgacatttgggtagaaagcgattacatctagtttataactatttttaatctaaagtaattaatttttaattacattctcattattataattctttcaaacacacattggtataataataataattgtgtttttttttttatatagaaaaactctgcaaaataataataaaggaagttacaaacacacattggtttaataataattgtgtttttttcttgggttgtcatttgacaactatggttgttgttaactttttttttgataaacgatgaccaaagaataagaaaaccattttctaaccttcgaccgcgtttaatgcgtgtgtctttgtttatagtatttgtaaattgtaaaaatgtcatataaaaagtgggaacccatattaaaaaaatagaagaaccaagcgaagaatctgagcatgtttaattcacgacgcgttaaatgagtcgtttactcgtttaccaataatttttagtttctcatacggtgactaataagattaagactagattaaagaatatttgtgacctgtcatttttttagacatctatgtgacctgcaactttatatagtcaatatcaatggatttagcgtaggtgatcaactatatttgagcatgtatattaattacgaattatatgcattcactaaatctataaagtattacttacatgtcatgacatctgtatatatatatttactccattatcaatacgttttgaatggaccacgcgattgtctagcatttccttgacgtcaatggtcttgtattggttagtcgtcttccatctacgaagggacactaatcagtattacttgaactcttgaagtttgtttctgttgttttgcacaaaaaaaagaagtttgtttctgttgttagatagacattgaaagaaatgtatttttttttgtaatgataaattactatatatggatttgatttataaaatgttagtggtaattttgtttccacaaactcaagtcatggatagctatgtttttgtcacgttcgaatacttgtttcatttgtatgcatgtgaatatggtaaaatcaccaaatgtatggtggatgaatgcccttgtcgcatccaaaaagaatatcccatcgtttacatttatcttattttttcttttcataaactattttgtgatctttaaaatcacataaaatttatcgacaatggataaaagaggtgcacaagagaaaacatacgttggttaaataaaacagtaatatgatcatgagtgacaatacttaaaactgtattcgaatatacttatttcgtttcaaggtgtttaaaaaacatttaaatgcaaaatctttctcaattttatatggtcagaatcgtcagctgactagactaatataaaaaaaatgttcaaagttcgattagagataacaaggattcagaattctcaaattacatgatgttttatttctatcataaaagtaaaaatatcaagtgttttcttgaaactattgttacttgaactgtatagaaaaataaatatctttgaaaaattagaaatgagcagacaaaatctttaataactactaaaaaaaaaaatcaaaagaaaaagacatgcctttcacgtttatgtgcgatgcaagacccacaactcatttatctgaccaatcgaaaatttgtttcctctcttattattccttcttcagaggaggctaatttattattattaattaatgttttttaaaaagtttactttatttatattattttagttacaacgtaaaagttaactttattaccaagacaagtaaacaaatttcttatctcttatggttggcttatattgaagcttttaaacgtgttgaataaattgaatctaagaagatcaaactaacaaaaacattataagttgaaagatgaaatcacaatatagatatataaagtaattatgatcctaaaagatggtaaaagttttttccgacatcttgagattagtaaatattttggttagaatccccaatcacaataaaaaaaaaagtttatattagaacaccaaacaaaattatataaacctcaattttattttgatttctatctccgtaaaccaaaaaagccacacaaacccctctaaccttctagataactttctcgttatgctatttttttaaataacctatccaaaaaattgttgttcgtgtttattttattaattctgttttgtttttcaactatttaatccgatcttatgtgcataaatatccgtcggagttaatttagagttaaagaaatagattagcgtgtgagctcatctctcttaaatctctccgctctaaataagtttgttggaattatcctccgcgtttttgttaaatcgattcgttccgcgaccttatccattttcttcatctctttctctctaacttcgattttcctttttctcgcgcgagaaaatttctggattttgtctgcgaatcacgaatattccagcgtttcttcgtcccgcattggcgtaggatttttgtcgtgtttccgggattcgaagaacagtttaaagagtgaagaagagtcgagaggtgtttcggagtcttggaagaacaagcgagatcgtgttttttttgcatagaatctgcgaggtttcgaagtttctctgtggagtttttgttggatgagag

SEQ ID NO: 14343 - DNA, 3000 bp, Unknown
  misc_feature (1)..( 3000): cDNA_ID_2685955_gDNA_ID_2684110_Annot_ID_190603 3000 nt of promoter + ATG
aaaaaacagaacaaagatggcaaagacaatgcatcggtcaatagtgattatcaagcatctaacgggagctctccgcaggcatagattctacaacctttcttgggaacatcgaaagcgcgagtctcttgagactcaagagtcctaacaagcttcataccttcaattacttgtccaaacacgacatgcttgttatctaaccatgaagtctgcacaaaaaaacaaatttgtgaaataaatattaatcaaaatgggaaggcaaacatatgaaagatcgataactctatagatgatgtgaagaattgagaatctttaccttgacggtacaaatgaaaaactggcttccattagtattaggaccagcgtttgccatgctcaagattccaggtccagtatgcttcactgcaaatgcggaaaacaaaaccattaatacctcaaagaagtaatgccatatttgcagaaaaccagagtttttctttgtttgtgagtacttacgggtgaagttttcatcttcgaacttggcaccgtaaatactaatacctccagtaccctgtgagaccatatcgaaaaagacgatttagaaagaaatatcaaaataacaaacaaacagtctgaaatgtaacttgttggaaagaacttacatttccctcggtgaaatcacctccttggatcatgaaatccttaataatacgatggaaagaggaacccttgtacccgtatttcttctcacctgaagaaatcaatttcctttagacaatggttttgattgtgtctataaagttccaaactttaaacatcattttgataaggagcttaccagtacacaaggcacggaagttttcaacggttttaggcacaacttctccaaagagacccatcacaattctgccagcaacttcacctccaatttccacatcaaagtaaaccttgtttgtcactttagcttgaggttcgattacttcttcttcctcctacaaaccaagttcaaaaatcaacacgaatccataaggcaacagaacatgaatgatttatgaaaaaagtaacttacagcagccatggatttaacacaagcggttctctgatgcttggtggtcgcataaaccccagaaaattgcttaatgggtgatgcatagtgcaatctcgaagataatgcaattccagaggaacgagctccaaagcaaactgattgagttgttcgatttgcagaaactaattgcgacttaacaccgaacccaatctacacagaaaaccaaacaaaagagatttaagaccaaaaaaaacccacaagaacaggaatagtatccgattgaaatttcgttttaactcacagagacacactacttaaagtgaagaagaaaaaaggatagaattcaaagcataaatcttcgacgaaaattgaaaaaaccgcaaatgtaggattaagtttagaacctgggcaatggagcgggaagtgtgaaccatctgcatagaagacgaagaagccattgaatgattaaagatgaagactttttgttggttcgctttagacaacagtctttagttttgcagataagagaaccgcctcgagccttgttttttaagttagcaactctatggattggtggtatccttagcatctcatgctaacttacgcctaatgataatgacagctagaggcctatttttaatttcttttaggcccagcccaagtcatttatccaaatgctttctctcttaagttacaacaaaaaattgggttagggttaaacctgtggttgcggatgactatcaagtacaattgccgtagaaagcctttttttattatttgctgtagaaagcctttttttttctttctaaagcacacaatttttaattttccaaaattttgatatcattctctgaaaatttaactgcttacagattttggcatttaatattcctagaacaaaatcatgtttttatgaacaacatcataagaccagcaagattagttttgtctattatttcacactcaatagatcaaaaccacaaactccaagaaccaacaaaattgttcatgttttcatacacaaagctactacagtctttggacattatttaaacacacataatttgctgtaccatgcatcagcaactttcgtctctcttggagtttgtaacagcttctgttgagcaccgactgcgtaagggagaagaagtaaacggaacatcagctaagagttttcgccaaagccattcaaagcttacataaggaaattgtattgctgatgggggtgggttccttgagtgccaagagtactttgatatttctcatccgctaagagattgtttggtagctgagagggttttagttagatttatctgtggttgtggatgagtgaaatttactggtttgctttcactggttgtcgtgtgctaatttcgactctaccccttgccaaggcacattcacaaccatgtaactgtagggtaattgagtaactttctttgtcaatccaggaaaaacatcacttgggccgcaccatggcccaaacaaggcacggatctgctttaacctaacacctcgatttaatttaccctatcgatgattaccacaagtgggcctatttgtttatctaccaggcccagcccatcatgataagaaaatgcttgtcactcaagtttttaattaactttccaactccttaccaagaatttgaaactgaaactttttattattgatctatagatctctgatctggaatatatttcggttaaaccaagaattctagctaacgaaaaccaaaacttaaaagttagattaaatatgtacatgtgtaagaaaacgacatcacatctttcctccaactcccaagctttgctttgcgtttaagttagttaagctatgcataatttctcctcaaacagattcaaatatttataacgatccaaatcgaaacaaaaacatatcacacagtttcaaattagagcttcaaatctagttacttgttcttctacagtacatcatcaaaagtcaaaaccatg

SEQ ID NO: 14344 - DNA, 3000 bp, Unknown; identical to SEQ ID NO: 14342
  misc_feature (1)..( 3000): cDNA_ID_3016329_gDNA_ID_2684110_Annot_ID_190602 3000 nt of promoter + ATG

SEQ ID NO: 14345 - DNA, 3000 bp, Unknown; identical to SEQ ID NO: 14341
  misc_feature (1)..( 3000): cDNA_ID_2729982_gDNA_ID_2684110_Annot_ID_190601 3000 nt of promoter + ATG

SEQ ID NO: 14346 - DNA, 3000 bp, Unknown; identical to SEQ ID NO: 14340
  misc_feature (1)..( 3000): cDNA_ID_2729986_gDNA_ID_2684110_Annot_ID_190600 3000 nt of promoter + ATG

SEQ ID NO: 14347 - DNA, 3000 bp, Unknown; identical to SEQ ID NO: 14339
  misc_feature (1)..( 3000): cDNA_ID_3016333_gDNA_ID_2684110_Annot_ID_190597 3000 nt of promoter + ATG

SEQ ID NO: 14348 - DNA, 3000 bp, Unknown; identical to SEQ ID NO: 14338
  misc_feature (1)..( 3000): cDNA_ID_2701843_gDNA_ID_2684110_Annot_ID_190588 3000 nt of promoter + ATG

SEQ ID NO: 14349 - DNA, 3000 bp, Unknown; identical to SEQ ID NO: 14337
  misc_feature (1)..( 3000): cDNA_ID_1010431_gDNA_ID_2684110_Annot_ID_190586 3000 nt of promoter + ATG

SEQ ID NO: 14350 - DNA, 3000 bp, Unknown; identical to SEQ ID NO: 9580
  misc_feature (1)..( 3000): cDNA_ID_3016285_gDNA_ID_2684110_Annot_ID_190581 3000 nt of promoter + ATG

SEQ ID NO: 14351 - DNA, 3000 bp, Unknown; identical to SEQ ID NO: 9581
  misc_feature (1)..( 3000): cDNA_ID_2184029_gDNA_ID_2684110_Annot_ID_190576 3000 nt of promoter + ATG

SEQ ID NO: 14352 - DNA, 3000 bp, Unknown; identical to SEQ ID NO: 9582
  misc_feature (1)..( 3000): cDNA_ID_3016291_gDNA_ID_2684110_Annot_ID_190575 3000 nt of promoter + ATG

SEQ ID NO: 14353 - DNA, 3000 bp, Unknown; identical to SEQ ID NO: 9583
  misc_feature (1)..( 3000): cDNA_ID_2183994_gDNA_ID_2684110_Annot_ID_190573 3000 nt of promoter + ATG

SEQ ID NO: 14354 - DNA, 3000 bp, Unknown; identical to SEQ ID NO: 9578
  misc_feature (1)..( 3000): cDNA_ID_2183987_gDNA_ID_2684110_Annot_ID_190572 3000 nt of promoter + ATG

SEQ ID NO: 14355 - DNA, 3000 bp, Unknown; identical to SEQ ID NO: 9579
  misc_feature (1)..( 3000): cDNA_ID_2183981_gDNA_ID_2684110_Annot_ID_190570 3000 nt of promoter + ATG

SEQ ID NO: 14356 - DNA, 3000 bp, Unknown; identical to SEQ ID NO: 9577
  misc_feature (1)..( 3000): cDNA_ID_3016298_gDNA_ID_2684110_Annot_ID_190567 3000 nt of promoter + ATG

SEQ ID NO: 14357 - DNA, 3000 bp, Unknown; identical to SEQ ID NO: 9584
  misc_feature (1)..( 3000): cDNA_ID_2183969_gDNA_ID_2684110_Annot_ID_190566 3000 nt of promoter + ATG

SEQ ID NO: 14358 - DNA, 3000 bp, Unknown; identical to SEQ ID NO: 14343
  misc_feature (1)..( 3000): cDNA_ID_2685955_gDNA_ID_2684110_Annot_ID_137152 3000 nt of promoter + ATG

SEQ ID NO: 14359 - DNA, 3000 bp, Unknown
  misc_feature (1)..( 3000): cDNA_ID_3016399_gDNA_ID_2684111_Annot_ID_190625 3000 nt of
tgtgtttagcttgtttttgtttgttttttcacaaattcgtttttgcgtactaataaatgctataataattggattaattgcaggttacaattactattcaaattgattaaatgacattttctatttgctatgtttattactacaattgcataatgtaaatgctatttcaaaacaattaattgcatagttttgacgctatgttattataaattaatagcactctacaaatgctattatataagtaacaatttcaagaagtaaatgttgttattagataattaatggcaaacaatacacgctataaaaacatataacaattgcatcatattgatcgctatactatatcgacaaacaatagcaccactccaaaccactatcataagccgtcgacctattatcatgggcgcagacataacactttctacttcactattgtctcgttagatagaggattttggacactaagaatactcaattttcctgtagagagaggttgtgttgttctctccacgttgggtgatggtattttagtgagtttggcttggacgctaatctaacatttatctttgcttattttatgttttggaatcaaattcatgttcatcaatctactcatagacttgatattaacacgtcctatgtgttcatgctaagtattgaaagactctgaaacataagcaactggtttatcattcttcttcgaggtggaagcctcggttacaacattgttgcagatcaccgcttcaatagaaattttgaattgaacatcacaaacaaaactatatcccaaaagcaccccatttttggagattacaagcttatctgcatcgatctcgatagcgaagccatgcttgctcaggcgagaacccgagataagaatgttggtaatgtcctgacatcagttgaattttactttagttaaagttgtaatgtcgaggttggacatttgtataatattaggtggttataatgttttgctagagaccgcttataatatatgagtcagaactaattgctaatattatacaaacctacatgatcacacacctaagcaaattggattaatgttggattaataataatataatatataatatatttgtatttgtgcatatataataaaatgtttattatactatatatgttatatatgatacataattagttagggttaaacgtttagctatatatatgatatattagcaacgttagtgagatatacttttgatcacaagaaccctaaaatacaagagacaaaagtttgtctaaagttttgagataagatctcaaaggaattagcattacagatctgattcacattttgtgcgtgtggataccggtaaagacacaacacttggagtgctaaaacaacctcgaattaatatggttcatcttttcgctgcagaatatccaggaatatttaaaccctaagatctagatttaattatttatttacacggtttctggctatagaattcgttattagtttttataaatcgttataaaccggtacaaatttcttcaattgtagcagagcctacttgtttaatactgaatatgaatctaatttaatctatattatgatatagataaataatttttatggtttatcatgttgaaatttgtgaaatttaattcgttaaacatggtaaaataaaattatataattcacttagaggaaattcgtttatgtttattggatatacggtttgttaagggtcatattttgattatggtattgagtaaatttttacaatgacacggcaacatgttttggtatatactaggttattaacctccgctacgcgaaggtttatttttattaattgttttaatatagtttaggatttagataaccattttgattaaacaactgcaaatacctagtttcctcacagctcgctaaaactaaatgttttttttaaagatctagactacaaccattgatatgcttttcttaacattataaaaaaatcattgttgtaggtttcacatgttagttcaagtcaatatatgttatccattctctgagaagaaaaattatctttatctttcgttatgtattattattagaaattttgtcttattgtaggataataagatcaaattaatagtattttaaatcttaatagatctcttatatcccttaaacatcccatacaccgatattattttattatatttcttccatttatttttgtattttcgtttctcaatgtataaattatatacattataaattatatatatatatatttgttgtcacttcttaaaatattataaataataagctaaactctagttagattgttagaacgaatcatttttaacatgaaactaaaatgtgcactcctaatattgtgactaagatgacatattaataaatttattgagacttgatgatattatattcatatattttataagtatgtgtaacgatagactttattttaaaggtgatattaaagtctatgctcggacgatccaaaaattaagaaaccatgcataataaaatcatatttagccctctctcttcggcgcttttatttatcccgttaatacccctacaaaaccgaaaaaacgataacagttagtagtctatctgcctcaccatttaatgctcaagatatcgaggttatattggaagatactatgtgccggcattggaaacatcaaagaaatgggaaattattactgatatttacgggcttgcggaaatatcacttacacatgctatgctatttattagggtgatattttcactctgttagcaaccgaaaaactatcatactaaattctttagcttccgacatcttaaatgcaagaaggagctaaacacagagaattgaaatctgaaaggtaaaagttaaagatctgagtattttgtactttaaagttatcatttggaaagttctttactttagggtttgtcagactattgttataattatgagaacgctaacaaaattgttatttacggaaaacctgcagataacaatg

SEQ ID NO: 14360 - DNA, 3000 bp, Unknown
  misc_feature (1)..( 3000): cDNA_ID_3016395_gDNA_ID_2684111_Annot_ID_190626 3000 nt of promoter + ATG
gatttattttttccctaaccttatagctttttaatctcttaaccactgtcatcacctacaatctccaagattcgatcttcaatctccagagaaaaattcttgaactcatctccagttattgaatctccaatctcccttctaaggttatcaaatctccagtctcccatatccataacaatctttgtctcctctaattcaagccgaggagatcaaaatcctattgtagaggacatcacaatcctcttgtagccgaggacatcataatccactgttctttttggaatagagcttgcattacaaggtttgtcaattcttaacaaaatttgtcgattcgaatatgaacccttagttgccgtttttttgataggaataatgactgaatttgtagtctaaatcagataaactggtattttgatagcatactgattgtgtttgaaaaaattgatagtatacccggctgtgtattgaaattttgtgtttattattcactataaattttgatttattcaatcatggagatggaaaattgtgttcaaatggacaagtcttgggtctggtttccaaggcttagcaatgattatgaggagggtgcaagatattttttaattgaatcagcaaagactttaggaaatccttcggcaatgttttgtccttgcagtgattgtcgcaatttgtgccaccaacaagttgatgtagttttggagcatctagtgattagaggaatggatgaaaagtacaagagaaatagtttttggattaatgatggggataaaaggaatgttaatcgtagtgatgatgatccaacttgtccaggtgaagcttatgagctgctcataactgcattttttgaaagtgaagacgacaaacattattcggacaataatggtgaggcagcttctaatgaagataataaagaagaatctgattttaggaaaaaaaaatatgcaggatgctgaaactcctctatacaatggatgtttgaaatataataaaatctctgcaattatgggactttatcgcatcaaagtgaagagtgggatgttggagaactattttgatcaacttataaagctagttcatgatatgctccctggagataatgttcttccaacattaataagcgaggtaaaaaaattcctgaagatttttggatttggctatgatgtcattcacgcttgcaagaacgactgtatcctttaccagaaagagtatgaggacatggtaagctatccaagatgtaaaacttcaagatgggaaaaggataagtatagtaacgatgttaaacaagggattccagctaaggtacttaggtattttcccataaaggacaaattaaagaggatgtttagatcaaaaaagactgctgagaatttacgttgacacttcagtaatcgtagtgatgatggtacgattcgacatcccgttgacccactcaccttggctcaagtgaatgaaaattggccagaatttgctcttgaaccaagaaaccttaggctaggtctttcaatagatggcatgaacccattctctattcaaaacatcagttacagtatttggcctgttttgctagttaactataacatgtcacctactatgtgtatgaaagagaaaaacatcatgttgtctttattaatcccagggcctactgcaccgagtaataacattgacgtttatttagctccattgatagacgatttaaaggatttgtggagtgacggtattgagatttatgactcatttatgaaggagaatttcacattgcgggcgatgttgttatagactattagtgactatccagccttagggacattggctggatgtaaagttaaaggaaaaaaaacatgtaatgtatgtggaaaagatacaccacataggtggttaaagttcagtcgtaagtatgtgtatttaggtaataggaagcgactcagacttgggcatcctttgaagaaggaactgcaaatagaattcacacaggagaagaaattcttgatagtcttaaggactttaaaaatgatttcaggaaaccactggctaaaaataagaaaagaaatcgaaaagagttgtttgaagatgaggttagtttacatgatgaatatgaggaaggcactgatcaatggagatggaagaagcgttctattttattcgagttagcttattggatggttcgctcttaacataataaatagtctaataaattcgtgcattttttaacaatatttattttctaaatgtatagactatgcatgtccgtcacaatattgatgtaatgcatgttgaaaagaatgcgtctgatgccattttgtccattttgctgcatactgcgaaatcaaaggataggataaaagcacggaaagacttggaagatatggggatccgaaccaaatagcacactcaaaatacgtggtaaaaaaacttatttgcctccagcatcgttttggttgtctaaggaagaaaaaaatatattttgcactagattatctaagtttaatggacctgatgactattgttcgaatataaataactgtgttttggttaactcgactgttattagtggcttaaagtcccatgaccatcacgtgcttcttcagaatctattacctgttgctttaagaggtatgctgcaaaaaggacctacgtttgcaataagtagattatgtagttacttcaaccgattgtgtcagcatgttattgaagctgagaagctgataaccttagagtcttagcttgtggagacattatgtcgattggagaggtactttcctccatcgctttttgacatcatgttctatcttccaatacatctatgtagggaggttcgtttacgtggaccagttcacttgaggtggatgtatccatttaaaggtactatcttaaatttttaataacaaatttttttttatattaaaatatttgataaatgttatattttatttacatataggtacatgaaaacactaaatgcatgtattaaaacaatttgcaagaccagaagcttgcatg

SEQ ID NO: 14361 - DNA, 3000 bp, Unknown
  misc_feature (1)..( 3000): cDNA_ID_3016387_gDNA_ID_2684111_Annot_ID_190628 3000 nt of promoter + ATG
cttcctaatctcaactctcgttgattaaacatagcagatcaaggtttaagaaacaatctaccaaagccaatagccagacaagccaatctctgggtcgagtctacaaatctctaaaatttgtaggttagacatccatttgaacgtcttttggacgctggacgtctataatcgaatctccacattagccaacgaaaaccgcataggggccaagcgaatccagaagggtattaacctaaacactaaccacctaactaacatagagattaccctaatctaatccatcctcaagaaccctaatcactactcaagcaacattctcaagaacacaaaaccagaaattactgaaatcataccaaaatgtagatctaaacaagctaaacaactttacttaaacaatcaaatgcaaaaccgaaatagactaacggtaattaaggttttaagattcataaacaaaaagaaaaactgaaagataaagcatagatcctttggacaaaccccaaagtgatctatttatagtaaaatgttgaaacccaagattcactagaagacaagagacttgaggcggtttgggcgaatactcgatcttggggatcgagtaaagagggtgatgcaaagtttgtgcctttgtgtctatgctccgagtgatcaattggtcgagtagatgcttcttcctcttctatctttatgctcagatgtctggttgagtggggaatgaagaggatccgaagacgctttgatagcccaacaagtcttgtagagttggtcacccttggtcgagtaaatgggtcgagtagaggatcgagtaggaggggcgagtagatcaatcttctgcttcatctgagattgccttgatcgagtaagagggttgagtaaactgcagcctcctctgtagcatcctggatcgagtaaagaggtcgagtgaattgatgcctcttctgtagctgcctggatcgagtgaatggatcgagtagagccctttttagctccttctgcacctgaaaacacaccaaaacatgcaatgcgaatgcaagatgatcctatatgcctaagtatgcaaaataagctaaaatggtgcaaaatgacatgatacaatgagcaaaggcaaagctaaatgatgataaacatatacctaaaatgagtaaaatacagtgttatcatttaacaacttgatctctcgctaagcttttagtgaaaggatccgctaagttatcggctgacttgatgtattctaacaaaattacacttgtcgagatcaatcgtctaatggtcttgtgtcgccttctactatggcgagatttaccattgtttaatttattttgtgccctagctatagccgattgactatcacaatgtatacgcaatgctagcaatggtttttcccacatcgggatatcttccgaaaaattccgaagccattctgcttctttggaggctttatctaaagctatgaactcatggttgatctagcttggatagttttcttggaagatttccaagatactgttgcaccacctaatgtgaagacatatccacaagtcgactttgagttctttgagtcagaaatccaattggcatcactatagccttctaggactgacagttctctattatagtgcaacccataacttttggtacatcgaatataattcaatattcttgttagtgccttccagtgagtatgacctggattacttgtgtagcgacttagtacatttactcagtgcgcaagagcgggtctagtacaatttgttaagtacataagacttccgatcactctttcatattccacttgtgacaccggttcaccttaatttttcgtcaagtgaatatgagagtcagctggagtttttgtagttctgcttgaatagttcttaaaccgatcaagaatcttttatgtgtaatgttcttgtgataagattagaccatcgatgtgcctaataatttttattcctgaaattacgttggctagtctcataaatttcatatcaaacttacggcttagcatattctttgtttgagtgatcacatctttattgctaccaataatgagcatgtcatcaacatataaacatagcaaaatttatctatgaggggtacttttgacatattgcatttatcacattcatttatgatgaagccatttgacatcattacattgtcaaatttttcatgccattatttagaagcttgtttaagtccgtacaatgatttcactacacgacaaaatttttgttcttgtcttggaactataaacccttcaggttgtttcatgaaaatttcttcttctaaatcaccatttagaagaactgtttttacatccatttgatggatctctaaatctcttaatgctgatatattcctactagcactctaattgaagttattctcgtaacaaagaatatgtgtcaaagaaaccagcccttctttctcccggaaaccttgcaccacaagtctagccttgtacttatcgattgacccatcagttttcaacttttgtttgaaaatccatttattcccaagaaccttaaacccttgcggtaggtcgattatctaataagtattattttaaagaattgaatctatctcactattcacggcttccttcaaaaaaggagcgtctggtatagacattgcttccctaaagtttttaggttcattttttgcaagaaaggctactatgaactctgaaccgaaagttttttcttttcgagatgttttaatccgtctaagttcatattcttctttgtcattgatagtcgtgcccaagctacttgcctcatttccggagatgcaagtgttgtctcgttgatcacgagttcgcttattactatttctatttcatctccaaaaacttgtcttctagctgcctcgtttttcgaactgtagtttcctcttcctctctaaactctcaaacctagctagctcaccttctctcgcatctggctcacgactctttccgtcgactctcacgaaaatcagtcgacgtcgccgctctcaatg

SEQ ID NO: 14362 - DNA, 3000 bp, Unknown
  misc_feature (1)..( 3000): cDNA_ID_3016361_gDNA_ID_2684111_Annot_ID_190636 3000 nt of promoter + ATG
agctggcatgggttgttgttaacagatggtgaagcgaggatgccttccacatatctcatcctaatgctcattgattcgaacttgttgttaagttcgacgccttgtcggtcgaatttgttttttacttcagacagcttcttagtgatttccattgctcttgtggcttgtccttgaatgagctgctggagcacagtcattatgtctgaattctgaggcgcaggtgcttgttgttgatgtggtgtgaaaccaggtggtggttgctgttgttgatatcttccttgaaactgctactttggaacgaacccttggctttggttgtaaggaacaaacggtttggtttggttctgttgctgctgctgctgagggtagacttggtcctgagggttggcgacattggtgcttcggtatgacagatttgggttgggtctgtagttattgtaccccttgttgtagccaccttgattatgaacatatctgatttcagcacactgatcggtgtccccctcttgtacttggaatggttcatcttcagagatgaagtgaacatgtttctgtttgcatttggatgattttgtctagtttgtcattgagagctttcatctctctgtggtgcttctcatcagagtcagaactggtgaagatgcttctgtcatagtcttcattgtaattgccatccgattgaccaaagttttcaactagctcccatccttcttcaacatccttcttcagaaaattctcatttgaagcggtgtcaaggagcatacgtatcttaggcaagacgcctctgtaaagtgtgttgagaagagaagcttgggtaaatccgtgatgagggcatttggtttgataacccttaaagcgctctcaagcttcacagaagctttcattttgcttctgagtgaatccggatatctcattccggagtcttgtagtcctggagttagagaagaattttgccaagaaggcctttttgcagtcatcccaggtcgtgattgaattctggagtagcgtcttttcccacagatgggctttatctccaagtgagaatggaaacaagcgaagcttgaaaccatcttcactaactccattgattttagtaaggccacagagcctttcaaactcgtcaagatgatctagcggatcctccattggtaggccatgaaacttgttcctctgaaccatagcaatcagaccgcttttgatctcaaagttgttgttctgtactggaggtggaacaattccatgacgctggttgtggttgtgagggaagtcaccagcaccaatgttggtaggttgctcttgctcatctacaacgtcagccattgtgtcggtttctgtttgttctcttagttggcaagcaatacggtcgatgttatcgttgaataggagattctgatttctttgtgaccgtgtatgcatgcaacagatagcaggcaagctataacagacgaatcagagatgcatctgcaaagcgggttgcaaggtacctgaaacacaaagacagaaaaggcacaatgttagtaactattgtaacaaaaacgaacttggtcttaacgtttctaatgatctcaaatatagcaaacaaccaaattggcaacgacgccaaattgatagtaggattttactcaattaatccctaaaacactatcttgtcgttgtagtattttaggatgttaatccaatccggtgtgatgcaaacatatgagatatgattagaaagctctaagtcaagccaagcagaaagttggttggttctaacagtcctagtatgcaataacagaaatgaaatgaaactaaaagaaggaatggcaatagcaggcaagtgaatgacaaagcagaaatgataacagacaatcaaatggataaacgattcctaaggatggggtaatcgaatagtgtggtctctttaatctattcaggcggttgacaaaacttcacagaagctatccctagacaacaagttcaacaacagattaattcactcccgtgatagaaatcctcaagcaaagctagacactgacctaaatccctttagcgatctctaactaagcaggcattatcgaatcaacatgtgaaagtcaataccctctctacagccaatcccttggggttgagtcagatatctctggaattaataggatccaacgcccattaaacgccttctgagcgttggacgtctggactcatactccacattagccagtgaaacaagcaataagcgcaactaatccagaagggattctagaattctaaactcaaccacctaaaacgaccaagtaaaccacaattattctatcccatcctcagaaatacagttcactactcatgataacaaaaatgatgaaagacttaaacgaaaactgaatatcaaatacttgaaagtgaaaatacaaagtcgcaggagaaacactgtggctatcaaagttgcgaaaatgtaaaagcgagataaataacggatcaccacctcatcgagtggatgtcatgaggtggtgatcgagtggtttcttcggcttctcttctcttctttgttctcagcttgtctggttgagtgcagaatgagcagataggcttcctcgtgatcgagtggttctgatggggtgattcctccggtttcgcgattgagtgaatctgagctgcttgcttctccggggttgcgatagagtgatttgccctggcagggatccgaggctgcgatagagtacttttgctgaaggcgtcattgggcattctgacttcatgttctgttttttctctgtttgaactccaaaagcatccaaagtacctgaaaacaaccaaatatgcaatgcacatgcaatcctaatgcaaaatcgtcctaagtatgtaaaacacactaaaacgactcctaatgagatgaaatgtcgatgaaacaatgataaaatggtgaagaatgaatgcctaaatcatgcaaattatagacatatcaagataaaggccatctgtggcgaaaagcacctcctcaagactttatcacgacttgggatg

SEQ ID NO: 14363 - DNA, 3000 bp, Unknown
  misc_feature (1)..( 3000): cDNA_ID_3016345_gDNA_ID_2684111_Annot_ID_190640 3000 nt of promoter + ATG
ggttgagtggtggaggattattcctgcctccttgccttccaaggcggtgagtaaactgatctggtcgaggcagctgaaggtgtcgatcgacacttagtggtgtgtcgatcaacactcttctcgtcacctgcaagaacaaaaggagaaacaagctttcgaagaactctaggtttgttatcttgtgaagcagacttcaaagaatctaaagaattaatcgaaggtaaattagaagagaacttatcacataggtactcaagtggtgtgggctgaaaagattgtgcagaatcctctgtttgagaatcccgagggtgtcgatcgacaggagtggtggtgtcgatcgacactgttgctctacaactatcattgtgtgctgatgggagcgttgtgtgcggctctattatgggattctgagcaccagctgtagctaggaacgctcttccaaggataagaggatccttgggttccttctcatagtcgaggaccacaaaatcagcaaggataaaagagttaccaaccttaataggaacatcttcaaggattccttcagggattcgatttgaacgatccgcgaagaggagagtgatgcgagtcggcccgtagttagtcatgcctagtctctcagcaacagacttaggcatgaggttgataattgatcccagatcacacaaagagcggcttaacctgcctgtggagatagagcaatcaagaatgaagctacttggatctggaagcttcttagtggtctgagcaggagtgatggtgcagatgtactcagcaatgtccactctctgtgccttctctttcctgaccttaggcagcattattgcacttatgtcccgtatcagcaataaggcttcatctgagctaataccaatgtcaacaagttgcttgacatacttgttgagtggggcagaagatgtctcagatgcatccttaggaagagaatggaggatcttcaccattatggctgtgcacttagcagcatgaatctcctgcttagaacgacgcttcctcggataatggacatgacgagtgtaaatagactcgggctgcatttgggattcgcacctcacaaggtgtagtccggatacagtgtcgatcaacacgagagggatatcgatcgacaccttcgtaaggaattgtcttagagaagagcgttccatagggtgtcgattgacacaagaaggtgtcggtcgaaaccatctctacgactgcgagctccaactcgtcctcagtgtctaattcttcccacacatcatctccttctctgatcaagattgcattacagttcttccttaggttagcatcaggattaccaggaagaaagccctcttgtctcttgatggattgtgcagtttgagctacctgtacattgaccttcttcaagtgagagctcaacttcttcagacttagtctcaggctcaatagtctcatcctcagctgcaaaatggacatgcttcttccttgtaagcaagttatgaaccgaatccaacttagcattcacctctgccatctgattgcctgaaacagctccagcaatctttttcctctcaaaatcagcattcttggtgcctttactacaagcaaggttctctattagagctgtaacatcagctggatatctcgtgttgaaattaccattgctcgctgcatctagatctatctagtatctccaatcgactcctctgaaaaaggtgccaagaatttgtacctcactgaagccatgatacgggcagtcccgttgatattccttgaagcaaacccaattagccttgaaagcttcagctggaccttgggtgaaggtagaaaacttgattctcaactcctcagacttagcatcatcgtagaaactgtttaagaaagctatcttgatgcttctccaattcttgagggaaccggctttaagttgttttagccaagaagcggcttccccaacaagtgaataaggaagagcttgcacaataggtagtcctctgagactccattagcgttgatgctcagaacaaggtcctcaaagcgctcgatatggtcaataagctgctcatgagataagccttggaaaggatgctggccaactaaagcaaagtagccaggatttagctcataatcgttcctcaggaagggtgggggtacgatcgctgatcgattagcatagaataggtcaggtctgttgaaatccccaagggtacgacgtggttccgcagtagagtggtaaacacctctgttgcaggaggaataactgctggaatcttaggttggtgtcgatcgacacctctgttgtgtcgttcgacaccaatcgtgtcttcattctaatcccgaaggtgtcgatctacacctctgatgtgtcggtcgacaccaagcccttctgcgtctctggcagctaattgttcattgaggcgcacctaattctcattggcatccttaggtaggatgagcccatgatcatccaatctctgaccagcttcattgtaggcttgcccatcctcatctctcaaaactccttctgcatcacctctgatgactctgtcacccattgcttatatctgggtttttcggttggtgcgctcaagttttcccaagtccagaacagacaagttgatcagatagaaagcataaacacagcaatagagaaaaaggaaagaaaggatctgttcatcgtattgaaaactgaatgaatatctgaagaacaagggatgaatagcttatgtctctcaaaattaggttttacaaaaagcttgataaaagaaaacttaggtctaaacaatgtataaaaaccctataaaatgttcagagactaataatgcaaatagggaagtcctatgaggcaaatttcctctttagtaaacttgaaagcgtgataacacgatattttactcattctagacatgtattaatcatcatttcgcttagttatcactcattgtttcatatcatttgcatcacatttagcttattttgcacatttaggcatttaagatcatcttgcatacatattgcatg

SEQ ID NO: 14364 - DNA, 3000 bp, Unknown
  misc_feature (1)..( 3000): cDNA_ID_3016541_gDNA_ID_2684112_Annot_ID_190646 3000 nt of promoter + ATG
aaactcctatggtgtacttgaacagtatagcaaaaggttgtgtagcaaatattgctgccaaactcgagatcatggagccatgttgcagtgtcaaggataggtctgtagcttaagtcttttgtggcttgtttgtatgtttttagttgagtcccttcaagtcctaacttttatgtttcacggattcaggattgggtacagtatggttactgatgctgagcaaaaaggatttatatcacctggaaaggtatcgattatagattgatcagtcttttgtaaagtttaatggatgagaccagcttttacacacataaagttgtacaatctatagtctgttatttctggtggttaatcatgtccttactgcattgatctagagtgttcttgtggaacctacaagtggaaacacgggtattggcctagcattcatcgctgcttcaaggggctatagacttatcttgacaatgccagcatccatgagtatggaaagaagggttcttttaaaggcatttggagctgagcttgtattaacagatcctgctaaaggcatgactggagcggttcagaaggctgaagagatcttgaaaaacactcctgatgcatacatgctccaacagtttgacaaccctgcaaatccaaaggtttgtggtttatatttttccttatttgtgtcatgatttggtttttgctctagtcatgtaccataagaagagaaatgaaatgttaagttagagttaaccagaaactcatctgtatttagagaatgcccacaagtgtgtaactgaagtggttttcacttaaactgtacaagcaaattgggaagtggctgatcctttgaaatcggcatgatcttctgtgaggttctcttgtcacgtttgtaaactcaagtttgaatatacgcagattcattacgagactactggtcctgagatctgggatgatacaaagggcaaggtggatatctttgttgcaggaattggaactggtggaactatcactggtgttggtcgatttattaaagagaaaaatcccaaaacgcaggtagatgcaaaagttcaatggtttcattcttagctggagtacattttcaggtgttatttagacagtattgtatgttcattcaagcaatataattcgtagttaactattcgatgtttacatgtaccaggttattggtgtagaacccaccgaaagcgatatactttctggtggcaaaccgggtaaggcttgccaatagatatcaatcagtaattttgtttccatgatttcgaaatatgatcttatattcacgtattttgctttctcttgcatttatacaggacctcacaagattcaaggaattggagctggatttatacctaagaatttggatcagaaaattatggatgaagtcatagcggtatgatttattttgttggattctgtatggttatacaatttatctggtttccacaaaacatccacaattcttgtgtcaatttattgcttaaattttccaattcctgagactcaaacttcatcaattactatcttctttttgcgtttaccagatttcaagtgaggaagctatagaaaccgcaaagcaactagctcttaaggaaggcttgatggttagttctttgcagtatttatgatttctgagtgggaaccacacggatgttgtggtgtcatgttgcatgtgaaaggtggaaattacacaagattcttacgtgaatgtaataatcttgtcaggttggtatatcatctggagctgcagctgctgctgcaatcaaggtggctaagagacctgagaatgctggaaaactcatagctgtaagtcttttcggtttcagttatgtgttatgtcttgaaaacaaaaaggtggtgcaaggggtctttgtgcaacatatagatggattgctttagatttcatcttaagatagatttgaggattattaaagtctcccgagtctgtgatccaatactaaaccaaagaatcaacaatatagtcacttggctagttagattgttaaatcttctaagtaggtaactgttaatgaatctatgaatgcggtttttcaggttgttttcccgagcttcggggagagatatctatcgaccccgctgttccagtctatccgggaagaggtggagaaaatgcagcctgaggtatgaacattagcaacttggtctacttctgcaaagctctttctcccataattacagtctgagtgctaagcaatttatttttatcaataaggcattagtgaatgtggtttgagttctattttggatatccaacactagtctatgttttactcaacattttctgttggaaatcccaatgcttaattatattgaattgaacaagatgattgatcccttgtttgtttttcttgttaacctaaaaaatattaactttcatgagtattttcatatataatgatcaacgatgataggttagtgatataactttactttttcatgtagaccaatagaaaaaaataaaatcagaatctaactctaaaacatgtcaaaaacttatttttaatacaaattttgtggtcaaaactttggatgtgaaacttactttgttcgattattgcttttaaagtactttttgatgttttccagttttcacacagttttaagatcatagaaaaatcccgtctttttgaaattttgatccatatattttctaatgctcagagagtcagcggttaatattaggattaggacacgctctaccaatcccacgataattgctttgaatccaatgaagattggaagattattatcttaattgctttacgacttggtttaggccccatgtgtgtgtaaatacataaatttttaatatgaacaacgcggaaatccatgtgaacgttcgtttccattttgttcgaccctacttttgcagtttggaattcttttatactcttacttaactctcaatgagatgataaaaatatctcatatgatcaatttcttcccataagcaaaaacaaaaaaaatcctaacatg

SEQ ID NO: 14365 - DNA, 3000 bp, Unknown
  misc_feature (1)..( 3000): cDNA_ID_1021998_gDNA_ID_2684112_Annot_ID_190672 3000 nt of promoter + ATG
gaaaatcgatttgaagatggcgagcgaaagtcctgatgttgctgttgtagctccggtggtggagaatggcggcgctgagtcctctaatggtaaagaggaacaattggaatctgagctttcgaagaagcttgagattgcagaagatggtcaagaggagaacgatggagaagaaggaagcaaaggtgaattaattgattagctctttttttggtgttctgattgatcacttggttttgtctttgcgtctttaatttatgtacccattgagaaattatttgatctttttgtgttactgattagtagatgatgaaaaatttggagtttaggaatgttatagtggtgatttcaaagttctcgatttgattctttgttctgagaatggttgattaataaagacatatgtttttgatatatgaagctgagacttcaacgaagaagaagaagaagaaaaataaaagcaagtaagagatgcttttgtttcttttgtttcttctgacttcaaacttttggtgtttgctttagtgattgttttgtgattatgttgtaggaagaagaaggaactccctcaacagactgatccaccttcaattcctgtcgttgagctcttcccatcaggagagtttcctgaaggtgaaatccaagagtataaggatgagtaagtttcatagcattctatttaccattgtggacagcttttagggaaatctttcatatgttgtagttgactttgtggaagagtccataccacttttatcttctcaactcatgaatctattggattctcggtcctttttttttgtgtcaagtctcttcgttgttacctttatcacactttttgtgccgacatgtttagatcttggtgcttgtctgcttgatctctgtttttttagtaatctttggagaacaacatctgaagagaagagagagctggagcgttttgaaaagccaatatataactctgttcgccgagctgcagaagttcatcgccaggtttgcttcttgattagagtttttttatggctcttttctgcagccgcttgaaagaacgttttgcccaatccttttcaggttcgtaaatatgtcagaagcatagtgaagcctggaatgttgatgactgatatatgtgagaccctagagaatactgttcgtaagttgatatcagagaatggtcttcaagctggtattgcattccctacaggatgctctttgaattggttggttatgagatctgcctttaactatttctttcgatcaacaattgtttgttcttcttctttagtcatgtttctctaatgactttttaacattcagggtcgctgctcattggacaccaaactctggagataagactgtacttcagtacgacgatgttatgaaattggactttggaacacatattgatggtatggcagtatctgttttctgtttttgtttttcattgaggcaaattgtcagataaaattaacatgtcttctttttgcagggcatattattgactgtgcatttacagttgccttcaaccctatgttcgatcctctcttagcagcctctcgtgaagctacgtataccggtatcaaggtctggacctatttgctaatatgcagtcctttatgaatgtacaactaccagtagggtggagcaatgttgtagtgttttgttctattcgtctctatggaattttataattccaaactcttcagtgtgaaattgatttcatttaggctttgatttgttaggaactatttggttattacttttgacctccttggtggttttttttggctggttcaggaagctgggatcgatgtccgtctctgtgatatcggtgctgctattcaggaggtcatggagtcttatgaggttgaaatcaacggaaaggtcttccaaggtatccaatgtcacatctagattacggctcttacatcaatgtcacattttgacgttaatataataataaaccttaacatgttatgtccttttggcagttaaaagtatccgaaacttgaatggtcacagcattggaccctatcagatacatgctgggaaatctgttcctatcgtaaaaggaggcgagcagacaaagatggaagagggcgagttttatgccatcgaaacatttggatcaaccggtaaaagaaacttggacatagaactattaaaagaaaaggccgctgcatctttggaattcaccaatgtttgatcctctgtatctgttgtattgcagggaaaggatatgtgagagaagacctagaatgtagccattacatgaagaactttgacgctggccacgtccccttgaggttgcctagagcaaaacaactccttgcaaccattaacaagaatttctcgactctcgccttctgcagacgttatttggaccgcattggtgaaaccaaatacttaatggctctaaagaatctttgtgactctggcattgttcaggtaatttcttgcacaatctagatgatgattcatttatctcggatctatcctgagatctaaatacacttaaatcttgctctctgttttatttcagccgtatcctcctctgtgtgatgtgaaaggaagctatgtatcacagtttgaacacaccattttactgcgacctacttgcaaagaagttctctccaagggagacgactactgattcagatcctctgttttgctctgtttacctttattatctcatactgttgtcgagattgtacacttgcttgtttcttttgtcgtcgttaacacaagctttgaatccttttataaaaagcttcagtgcctctgttaaaaaaaaactatgtatttgccatgaacatgaatttgctcatcaatcttactagaagttgattgataaagctccttgctttggagaattggtaaagctactaatttgacaagatcatataaaaagatatataaatacagatatggtaaagaagagagaacactgggatcacacagagatcttagccaatagacttttgagctactcgaggcatttccatg

SEQ ID NO: 14366 - DNA, 3000 bp, Unknown
  misc_feature (1)..( 3000): cDNA_ID_2990209_gDNA_ID_2684112_Annot_ID_190671 3000 nt of promoter + ATG
agatctttcccaattaatccggtctattgccatgtcttcctcgaagaaggttacgttcgattcacaatcttcatttcttctctttatgaaattatttctcgtatgatcttagtttttctctgatttcagggttccgatcggaatcaaatcaggaagtcgttgaggaagttaaaaaagcagattggggaattggagaaacttgaatctccggatcggttgaataatgtgaagcctatcttcatcaagcgcagtatccttttctgttgtcacaagatgctatttttttttgtcatacaaaactgtggaatattatttgttttcacatgacgagcttggttttaagatatatacttgaagaagaaactcaagaagaaagttaaggatcatggcatattctgttcttgctccttggatcctggttcttcaactctttgtggcagcgattgcaattgtgggtatgttccatatctgatcacaagtacttgtctgactaaatattcgtggcggcattggttctgattgttgatgtattgttggttttttccttgatgtataggattctactctcaagctgttcgtctagttgcaaatgcagtagtgaatgcaccaacaagccgttccaacaacgacatatcaagaagatgaagttagttcaggttggtttattacaatttgttgtcttatataaagaatgcattttcaacgttagttgaataagttgttgcttgcagacagagaaatgtggatatgggattgtagcagatgaagatatcaactcaggagagtttatcattgaatatgtgggagaaggtgatgttattacctttggtttctcatatatagttagagtactgttgtgattactctgcttactcttatcaatcttcttatatccatttcttattgtagttattgacgacaagatttgtgaagaaaggctttggaagctgaatcataaggtcgagacaaatttctatttgtgtcagataaactggaacatggtgattgatgctactcacaagggtaataaatcaagatacatcaatcacagctgcagtcctaacacagagatgcagaaatggttcgtttgtaacttattatccatcttctcacttttcttctgttcaaaacaattgagcaaagttatagatcatgaacctttttgttcccatttaggataattgatggcgagacaagaatcggcatttttgctacccgtttcataaacaaaggcgagcagttgacttacgattaccagtaagaacatttccttgcatcacaacaataaagtatttgaatgtaaatgtttagttgtgtgatactaataaatatagcaggtttgttcagtttggtgcagatcaagattgctactgtggtgcagtgtgttgcagaaaaaagctaggtgcaaaaccttgcaaaactaagaacacaaccttagaagaagctgtgaagccagtggcatgtaaagtgacctggaaaacgcccaaggtaaatttgagctttgccttacttttttttagtcatcctgtgattgctaaacagtaacttgtcctttcaaacatatggttagggaaaaactcgagggagacgcattgctggttagtattaattatttggctcgattatcgacaagcttctcaattcagaggtaagagaaaccaatttggatgcgtcaggacaagcttggaacaatcatagccagaggaaaatatgttgccgggactgcattggtgcggtgatctggttagcacgtcccatgaaccaaaagtataactatctttctttttttctcaaaaaccaatttcttccacaccaaagaacagtattacacggctcagatgaaggttttgactctagtagttgacatttttcaggtgttttggaatcattacacaatatgatgagttttaaataagcacttggtatctattcatttgacttattgccaacactgttgttcacattctatctcagtttacgaaatctaaagaatgaacattgactttgtccaggtcatgtatgaggatggtgttaccgagatcatcgacatgtgcagagaagtttggaaggttgtaactgcttgatattgtgactgttccaagtctgatttcattcccttacataggattacacttgaattgtcaagaaattttgtaaccaaccaaaccgtgtcggttggcaaataggtttagactttgttgttgtatgtatccaacttgaatcagtagttcagtagtacattacactgtatgtggaatctttggaccaaataaagaaaagtgtttttggattttaaaccggggttttggttatttaagagacaaaaaatctcatacccggtttgctctgtctataactcgagtttgttaagcacgtgattctccttggcaatgctgctatatcactagcctactgtccgttgtagcggatgatacccacgcgccggtgaccgacagtggatttgccgttaccggtggtaggtaatgtggggtcgtagctcacctacctaactaaattttctttttcttatgtttagttggaaaataagaaaaatataaaaactagttttttgtaaaggaaaaggataaaattactattatggaaaagataaattccaaaagtgaggaaatatgtatttagcacaataaaaagtgatagcaatgtgagaaaaaaaacgtgataacagaaatgctgtgctaaatttggatttctttgttgaaaatatatttacattgataaatattatgtaattagaaaaaggaaaattcaaaatagatgtgtagaaaaacaacaatgttgataatataattttttatctaaagtttttaccggttaccagttaccaccaaagttgttggatctctatcttcatttttagagattagtataaatgagtgagtaaacaaaccagagagaccaaacttgcctctccaccaccacttcctctacctatctaattccgaatctggatttggatttggatctcatttcgattcaacg

SEQ ID NO: 14367 - DNA, 3000 bp, Unknown
  misc_feature (1)..( 3000): cDNA_ID_3016469_gDNA_ID_2684112_Annot_ID_190669 3000 nt of promoter + ATG
gaaagatagttatacttttggttcatgggacgtgctaaccagatcaccgcaccaatgcagtcccggcaacatattttcctctggctatgattgttccaagcttgtcctgacgcatccaaattggtttctcttacctctgaattgagaagcttgtcgataatcgagccaaataattaatactaaccagcaatgcgtctccctcgagtttttccctaaccatatgtttgaaaggacaagttactgtttagcaatcacaggatgactaaaaaaaagtaaggcaaagctcaaatttaccttgggcgttttccaggtcactttacatgccactggcttcacagcttcttctaaggttgtgttcttagttttgcaaggttttgcacctagcttttttctgcaacacactgcaccacagtagcaatcttgatctgcaccaaactgaacaaacctgctatatttattagtatcacacaactaaacatttacattcaaatactttattgttgtgatgcaaggaaatgttcttactggtaatcgtaagtcaactgctcgcctttgtttatgaaacgggtagcaaaaatgccgattcttgtctcgccatcaattatcctaaatgggaacaaaaaggttcatgatctataactttgctcaattgttttgaacagaagaaaagtgagaagatggataataagttacaaacgaaccatttctgcatctctgtgttaggactgcagctgtgattgatgtatcttgatttattacccttgtgagtagcatcaatcaccatgttccagtttatctgacacaaatagaaatttgtctcgaccttatgattcagcttccaaagcctttcttcacaaatcttgtcgtcaataactacaataagaaatggatataagaagattgataagagtaagcagagtaatcacaacagtactctaactatatatgagaaaccaaaggtaataacatcaccttctcccacatattcaatgataaactctcctgagttgatatcttcatctgctacaatcccatatccacatttctctgtctgcaagcaacaacttattcaactaacgttgaaaatgcattctttatataagacaacaaattgtaataaaccaacctgaactaacttcatcttcttgatatgtcgttgttggaacggcttgttggtgcattcactactgcatttgcaactagacgaacagcttgagagtagaatcctatacatcaaggaaaaaaccaacaatacatcaacaatcagaaccaatgccgccacgaatatttagtcagacaagtacttgtgatcagatatggaacatacccacaattgcaatcgctgccacaaagagttgaagaaccaggatccaaggagcaagaacagaatatgccatgatccttaactttcttcttgagtttcttcttcaagtatatatcttaaaaccaagctcgtcatgtgaaaacaaataatattccacagttttgtatgacaaaaaaaaatagcatcttgtgacaacagaaaaggatactgcgcttgatgaagataggcttcacattattcaaccgatccggagattcaagtttctccaattccccaatctgcttttttaacttcctcaacgacttcctgatttgattccgatcggaaccctgaaatcagagaaaaactaagatcatacgagaaataatttcataaagagaagaaatgaagattgtgaatcgaacgtaaccttcttcgaggaagacatggcaatagaccggattaattgggaaagatctaaatttgatgttgaaacttttcaaagcctaatatttgaagagaagaagaagacgaggatgatgatgaatttgtagtggcggatccgatttgcagagagtgaaaagacgtaacggagaaagagcggcagttgctgtttttccttttgaggattttgaaatccttctgcgcaaaaggcaataaatcggcttaaaagggtaaaagagtaatatcgatttatttccattcatccgtttaaagacataaatgggcttcagatttttggactggcccaatacaatcaaacccattttgtttttggtaacaaaataattaatttattactagtcatttgcatttattccagacagttatatcattcacaattggtaactaaataattactcctttttaccgtaaaattgatattctgtatatcaagatattcaacgcacaaggaatttttttgaacaatatattcgatttgctttacttggtttaagtcgccggtaaaatttatttggtttaagtcgccggtttaatttagtttaacactgatacatttgacaaatacgaactagtgacaaaattatactgccaatggaaaaacatattcgaagctaatataaaatgtaatgatccatattcgaagcttaaaagatataattacgtaaaatagagaagagagagagagagaacacgaaacttttatttcgtaaggttacacgaaatcgatcttccgcaattcaaacttcgtctccgttaattcgcactctcgttctcgtcttcgtcgccggaggtcgtatcaagtcagcctcaacgatccgatttgttttttcaggtgatctatctttatattctgctagaaattccaaaagttgtgaaaatttcgttcctcggatcggattatgaaactctctgcgtttgtttagtgattaatcgagctcttactcttgttccttttgattcttatgctttctggtgtatatatacgagattttagttgccaattttatagttgactgattgatcatttgagattactgtagagatccgccctggagaaattgcgtcggagttcttttacttattgcatgattgtgtctcgaatttctattgctgctgtggatttcttcattttcgagattgtgcatatcggattcgagtacctttatcttactcgttgtgttcattagatcatctttgattcctaaattcgatttttggggcatattgaaatg

SEQ ID NO: 14368 - DNA, 3000 bp, Unknown
  misc_feature (1)..( 3000): cDNA_ID_3016479_gDNA_ID_2684112_Annot_ID_190666 3000 nt of promoter + ATG
cggaattgttttgtctatgacatttagtaacatcagcgcccacaaatactagcagtgtcatttgattatcctgacaaccaattacatacagatataaccaaacactataaccagtaaggaaaaatttgtgcagctacaaatatacctaaggttcccgtgagtgaagcaaaataaaaagaaacagggaaaaatagaaacagccaaccagtctaagcaccccaaatctgctttagaattatacttaaagagaaattaaaagattgcatgattacctttgagccataacagttactgtatcagaaagactcattgtccggctctggcaagcagagacacaagaagcgagaaacgaagtcctaagagtagctctagtaaagtcatgagcaccatgacatatgatcttcttaatcaatccggtgatcccctgaaactcaggctttgtactcaagaaccaaactgaatctagaccaacacacaacaaatcatttaaagtctgaggatcagccaactgaatcaatctctcagcaagttcccaatccagtgaggtaacagcgccttggaagagccgtcccaactcaattctttcttgcctattaagctttttctgctgctcaatattttccttctcaacgagatcatcatcccctttaaaatttagtttcttagcactacaaccacagcattctcccgaattagttccagctgaatcctttcctattaaaggtgcctctctcgaaaaaaccactttactcccctcgcctccttcaaatttctgagatgaagcaatggtttcagttttcatctcggaacagaaaggctcatcagggtacatctgatcacttaaattaatggtatcacacacaccttctttctccatccttgtcaagtctgtgactttccaaatcaaactaaaaaaagaagcacacaaagcttattcatccaaaagctatccgcacaacagaccacacactaaacaaagtatatagcaaatccaatccttgcatcatcgaaatctacaaaaccaaaggccaaaactcaaaacccggaactgatccctatcaaaatccaccaacacagttcattctaatcagcgtaaatcctcgatgccttctcttaaacgcactatctcttgaccatgggcataggaaatcaacaacaaaccctaaaaatgaaacaataaatcatcatcatcagcaaacggaaatctatcaattcgattaacagtgaacacgaaatcggacacccgatcagaaaaaaacgaatcgagcatcagaaaagagcgaagaacaacgaaattagcgttatacaaaagaagcagcacatgaaccatagaagagaaaaagagagagagaaaatggtgaaacctggacaagagttccattgagacagagagagagaaagagaaagagaggctgagaaaaaccctgtgcatcgggttctgtttttttatttttatttgacaaaagtactgctttttaatacaaaaatattctcttgatttattaacatttgtcgaatctttagttgattaaattctaattatagattctctcttctttctgtcgctgttaatctcccattgtaattcagaatctatgggaggggaactcaaactaatgactacaaatcatatggaggagacaaaaagacttggaattatttttaggaatcattcaacttataagtgttctcatttttttgttgtccctttagaaattagattttaaataagttgcgtcaactatacaaaaacatttcttatttttattctatctatattgcatcactaacatttttttcctttctatttctgtagtttaaaagactcgggtctttttacttctttgtttagtggttattattacattaagaaggaaaaagtaaaacaaatcatcatataaataagaggacgataaggatcggtcttcagctataaacaagtaaagaaagttgagattcgaagactctttataagtcattggatttgtagtaaataacaaattaacaacacaacaaattaacaacacatatactacaaattcgagttaaaaaccccaatataatatatgcatcgactactaaacgcgtttcaatgactggtaaacatatgtaactatctctgttacatattgaatgaatgatgatgtaatagtagatgctaacataagctcacaattatttgaataattaaagtcataaataaaaatcatctataatgcgtgtaagcttgcataaaaatacagtatataacttttatttaaaactattaagtatcaacatcaatcggaaaatgatttgcttttgaagttattacaactagtttattaaaaaaattgttatcatcatctcgattttaataatgctatatatacttagtcttttatttattgttattgtaatatgcgaaaatgacttgcaactgagttgcttacgggcaaacctgaccaagatgtgggaagttcgaaactgcaaatatgtataattcttaataaaaaaaaaatatatcctacatttcttcattttttttttaaaatactaatatttgcatactttgttgattgagtttctgaaaaatcataattgagtttttaaattagttggtttgtatgcatttgacaacttccaatttcttttaaatatatcacttttcatatattcttgtagagctataattttacaacaataattgaaatgtcgacccaaaaatatacatttaaaggcatttcgctgataaaaatccagtttagatgtatttgtattataggggaaaacaattatattattggttaatatttattagtcgatattgggtacatatgtatgttcttttacgattatgccatcaaaaaatttattagccattcgagaaacaaggcatctctatttttttgcttcttctaatagacttcttcgtcactgatctcccacgacgatctcccaaactcatttctctacgttcatcgatctctctctttctcgtttgctctacgaaaatcagcc

SEQ ID NO: 14369 - DNA, 3000 bp, Unknown
  misc_feature (1)..( 3000): cDNA_ID_2991077_gDNA_ID_2684112_Annot_ID_190665 3000 nt of promoter + ATG
ggcctccataggagtagctggcaccttttgaacctgcaggaaaattttcatcaacaatttaagagttatcagcaaaatgatattttaaaatgtcagcaacaaatacatcaaatgagaagtttgtacctttcctttgacgaaaacatagcttccatcaacagctttgaaggacaaatactttgtaacatctgtatgaataagggtacgaacaagcttgccatttcccatcataaactggtcaatggcattgagagacaagagttagtaagtgacattgataagattagcataaaaacaaaacaaatggcagctagctataataccttaggcatcatgtcaacattgtaatcccggctagcgcctaaatgctcaggagccttctcttctcccctgaacttcttccaaagctgattgagattaagggaagttgattctccaccatagtagtcattcctgtccatgtgaagcacctactcgtcacatccacaaaaccaataatcagatcgcgggaacactaagaggtcaatgtacatatgtaaaagccccaaaacattttcaatcatctccatgctcaaactagacaatcaaatctcatcatcattatcaagatcgaaaacctgagctcagatcatacaatcggggagatctaatctaatctcaccgagatccgtttttttgaatccggatcaaagcaattatgcgaaattcaatcatgaattcaaaggttcaattgaaaataagagagaagaaaaacgaaaaacgaatcggggaaagagaggaaggagaccttgacaccatcgacggaaaggagaccgctgaggatacactccttgagaccggtgccgagaacaataacctcgtactcttcatccatggctgattttcgtagagcaaacgagaaagagagagatcgatgaacgtagagaaatgagtttgggagatcgtcgtgggagatcagtgacgaagaagtctattagaagaagcaaaaaaatagagatgccttgtttctcgaatggctaataaattttttgatggcataatcgtaaaagaacatacatatgtacccaatatcgactaataaatattaaccaataatataattgttttcccctataatacaaatacatctaaactggatttttatcagcgaaatgcctttaaatgtatatttttgggtcgacatttcaattattgttgtaaaattatagctctacaagaatatatgaaaagtgatatatttaaaagaaattggaagttgtcaaatgcatacaaaccaactaatttaaaaactcaattatgatttttcagaaactcaatcaacaaagtatgcaaatattagtattttaaaaaaaaaatgaagaaatgtaggatatattttttttttattaagaattatacatatttgcagtttcgaacttcccacatcttggtcaggtttgcccgtaagcaactcagttgcaagtcattttcgcatattacaataacaataaataaaagactaagtatatatagcattattaaaatcgagatgatgataacaatttttttaataaactagttgtaataacttcaaaagcaaatcattttccgattgatgttgatacttaatagttttaaataaaagttatatactgtatttttatgcaagcttacacgcattatagatgatttttatttatgactttaattattcaaataattgtgagcttatgttagcatctactattacatcatcattcattcaatatgtaacagagatagttacatatgtttaccagtcattgaaacgcgtttagtagtcgatgcatatattatattggggtttttaactcgaatttgtagtatatgtgttgttaatttgttgtgttgttaatttgttatttactacaaatccaatgacttataaagagtcttcgaatctcaactttctttacttgtttatagctgaagaccgatccttatcgtcctcttatttatatgatgatttgttttactttttccttcttaatgtaataataaccactaaacaaagaagtaaaaagacccgagtcttttaaactacagaaatagaaaggaaaaaaatgttagtgatgcaatatagatagaataaaaataagaaatgtttttgtatagttgacgcaacttatttaaaatctaatttctaaagggacaacaaaaaaatgagaacacttataagttgaatgattcctaaaaataattccaagtctttttgtctcctccatatgatttgtagtcattagtttgagttcccctcccatagattctgaattacaatgggagattaacagcgacagaaagaagagagaatctataattagaatttaatcaactaaagattcgacaaatgttaataaatcaagagaatatttttgtattaaaaagcagtacttttgtcaaataaaaataaaaaaacagaacccgatgcacagggtttttctcagcctctctttctctttctctctctctgtctcaatggaactcttgtccaggtttcaccattttctctctctctttttctcttctatggttcatgtgctgcttcttttgtataacgctaatttcgttgttcttcgctcttttctgatgctcgattcgtttttttctgatcgggtgtccgatttcgtgttcactgttaatcgaattgatagatttccgtttgctgatgatgatgatttattgtttcatttttagggtttgttgttgatttcctatgcccatggtcaagagatagtgcgtttaagagaaggcatcgaggatttacgctgattagaatgaactgtgttggtggattttgatagggatcagttccgggttttgagttttggcctttggttttgtagatttcgatgatgcaaggattggatttgctatatactttgtttagtgtgtggtctgttgtgcggatagcttttggatgaataagctttgtgtgcttctttttttagtttgatttggaaagtcacagacttgacaaggatg

SEQ ID NO: 14370 - DNA, 3000 bp, Unknown
  misc_feature (1)..( 3000): cDNA_ID_3016519_gDNA_ID_2684112_Annot_ID_190653 3000 nt of promoter + ATG
tcgaggcgctaaagctccggtatgatatttaaaataaagatgattggtctctatgttttgcttcatcttcaacatttgtttgtcgttgatttttagaaaactagaaagactccaatgacggtagggaatccaaaagaagttcctgagtatgagcttaatccactcgagctgcaagtccgaaaagttgatggcatttcaaaggtttgttgattttcctaattgacaagagccaggtgagattttttgtccgaagtctctcttattctgatgtgtttgtgtttgcttaatttgcagggaacttatcaagttgctaaatggaatggcacgcgagtctcagtaaaaatattcgataaagatagctattcagatcctgaacgagtgtatgcattattcttgaacttctctgtatgattttgtccgtagcatgaagtaatctaacattgtgtttgtctatttccggttcttttttacgagcagaaatgctttcacaaacgaattgactttgctagcaaaagctcggcatccaaatattgttcaatttgttggagccgtcactcaaaatctaccgatgatgattgtagttgagtgtaatccaaaagtaagtacgcattgtttcatacttcatttcagctcattgaatcacaaatgtggcaagcaatcttgtttcattaatcatctcaatttcagggtgatctaagtgtctatcttcaaaagaaaggtcgtctttctccttcaaaagctctgagatttgctcttgatattgctagaggaatgaactacctccatgaatgtaaaccagatccgatcatccactgcgagttaatgccaaagtaagacaaagccgagaacaaattatttaatggcgaaaaaacagtttggataatattttgaaagttttttgtaaggtgccagaaatattttgctagatagaggagggcaattgaagatctctggttttggtttgataaagttgtcaaagattggagaagacagtgcaaaagtagtgaaccacgaagctcaaatcgataagtcaagtaagaaaaaggctgcattttaagttagaaacagattcatatatatatatacaagttagaagcattgttcttgaaagatcctatgcttaccttttgaactgcagattactatatagcacccgaaatttacaaagatgaagtcttcgataaaagggctgatgtgcattcgtttggtgtcattttgtacgaggtagtaacacaaagctttagccttttctttgtaattaaatgtctcggtttcaaactctgcaatgttgttttttggtttcatatgtgaagttgaccgagggagtatctttattccatcctaaaccacctgaagaggttgcagaatcgatttgtatagaaggtaaaagaccaacaatcagaacaaagtcaaagagttaccctccggaattgaaagagtaagcatttcaagatcatcagctattattacatatatgattgttttacaaacattaacatctcaagaatcatatgactatgtaggttgattgaggaatgctggcatccagaaatcagtgtgaggccaatattctctgagattattattcggctcgacaagatagttacaaactgttccaagcagggttggtggaaagacacatttaagttcccttggtaaaaacaaagtttcatcttctttaatctgaatatcaatcctcagttaagtcaaagatttatgttcatcatgttttgtattttcacaggaaatgaaatggaaatattgaatcaatccaatcaaatcttaaacttaaaccccaaagatgaagaaaaaacaagatgagagtgagattttgcagaagactcaagaagattcacaaactcatttgctttgtagaaacagaagatcacttttttgttttcatgtttgtttgtttaatatcataagtttttgagttatttgtaaagttatattttatgataaacatcacttgttcatactgaaattggaagcacattttaatttctagataagagtcttatcataagaggtgccggagggaatggatacaaaaagaaatagtagttgtcggaagtattatctcaagttgaaggcaattatcaaatccaaactaacacttctaataaaataaagttcattttgattcaattggtaaaaaaataaaactttaagattctgatgtaaatttgtgtgtgaagtgaacaatattatttttgataaatgatctaataaaaatcatactggatataaataatacttggtaaaagacattttttttgtttgatgaagaagtaaaagctttaaaaaaaaaaactaatttaattatgaatacaaccaaaaataattatagaaaaataaaatataaaacgatcctttcgtcttggcccttggggttcaagtataatatctgatcgtggattagcccacgtggttacaatcgaaaagatctgggacctagatctgatccaacggtttagaatcactcactcatacaggtgtgagcaaaacaaatatctttatttattctgtcctaaaaagtgatacaaaaaaataagtaaagaaaaatctaaaaccctttctcacgatttatttgccgcatccctaaaacctctcaaatttctccggcgtgattcactttctccggtaaacagcgttcgtcattttcagattcctccgtctactgtaagttatacttcgttattttcttcaatatcttcttcgaattcctcatatttcttaaaatcaaggctttgcatttcgattgcttgcgtcgcttcatttttcaactctattcgagatttcgagaattgtcgtcatttgagagttttctagggtaaatattgtgatttttctcataccgatttcgatttatcgtctgagttttgtttcggttcgtagattttgatagcgatttttcctctttcaaatctatcaggagtgttctcttctgggagatgttcaggtgattcatctttgcacaacaagggatttgacaaaatg

SEQ ID NO: 14371 - DNA, 3000 bp, Unknown
  misc_feature (1)..( 3000): cDNA_ID_3016523_gDNA_ID_2684112_Annot_ID_190652 3000 nt of promoter + ATG
gatcgttgagtgaatacgctaagcgatacataaggcagcttcctacgcttcctcgccaatctttcactgagaaattcccgaacgtgcctcccttagcaatagacttggtggagaagatgctaacatttgatcctaaacagagaatctcaggtcagtttctgtctccatatagcctcttctgcagttttatttggattcttatcatcagttttgccactttgcagttaaagaagcacttgctcatccataccttagctcgtttcacgacattaccgatgaaccagagtgctcagagcccttcaatttcgatttagatgaacatccattctctgaggagcagtttagagagttaatctactgtgaagccctagctttcaaccctgaaaccagcaatgattgaaaaggaccatatctttgatccttgttctgtttttttcttttccttctctgcttttctttgaataatttcccttttcatttcctttaattttttcatctctcagaaattttgttgtgctaagattttctgctagattcccttttgatgttgtcaaatttcatttttaagcaaataaactgaaaaaccatgattctgtgggcatcattgcgactttcaatccaacaaatattaatacatgagctattgtcaaaaatataacattgcaacaaggaagaaagcaatcatatcctactttgagtattttgattgaagacaatcttactctttgtaatagttcatttgcagttttgcttttgtcaattcttcaaattgccaaagaatctagagagtggtacagggccatcggtttcgtgtttacttttgctagagtgtttgtctctgctggacttgtgcttcttctccttctttgatcttttcgaacttgatcttgatcttctagattcatcttcatcactgctagatgacgactctgaggacgaataatgctgcaaattcataacacaaccgatcatggttcatgttagcataagctagaaaacctcacactatctgatataagctaaacttttagaaggcacctttctctttttgcttttcttcttctttgaatctctgtctttcttatctgcgaggtcattgaaccattggcgaccagttaataacgtcctcagaaagaaggtttagatgtcatgttaagttaagtggattatgtttaccttttcgtgacttatcactagaatagttccttcctttggagagtttcaacgacctttctgcatccagctgagctctatactcacgcatcagtttatcggtatctgcttcaagttctccctttttcaattcttcttcctacacatgttacacgaaagaaagatataatgttaaacatttcctaatgttccatactcacaatacagagagactgctgcaagtagtagtaaaaaactgatattgcagataataaaaatgtttaaaaaatgagcatgactagagttacttgaaaaccgcgagatagggatagatgtaatgtagaaggaagacacactcatttttatataaacacacaaagactgcgtatctgtggctgaagatgataaacagcagaggaaaagaaaatgatatgttggaataaagcttctaaattgacgacaataatagcaatcttatgaacactaaatcatcaatggtcaattgattatcttctatggcattataacaaggaacaccgttccatacaacatacagaagaacttaagtattaaaaaggcaaaaagattaccttttgcttctgcttatactcttcccaggtaatagtatgtgtagtcttgaggctagccaaacgagccgcatgccactctggtgtatgaaatgaaccatccacctgagacaatcctcatcagaaatgttccggtaccaatgcaaaatatcaaagtttgactaatccaaatgcttctttgtgttcacagcttacaacaacaataaaaagactcttgaatcactgtaacacaaactctgatgctacacttttacgaaatcacatttaaacatggacttgatatcgtctacaagacctagcaggtattagatacaagttcttcccccaaaattgggactcataaaggatctcttgtaggcttaattctaaatgcagctcgataacccaacaacacaaaagatcaacaaaaccataagtaaatcaaccaaattggaattttgtttggagaagtaaaaaaaaacagaatcaatttgcaatgaagaagatgagagtatgaaaaggtacaaaccattccgtcttcaacctcatccggctgggcggagctggaaccaaccctagatctctgcatagccttgtaagcttgattcttccccatagctaatagaagatttaccccacaagaaacagtccgcaaattccttgcaggagaaagagaatttagagagattgagaggaattgtttgtaaaatctagggtttgggggattaacggtccaaagggagaggatttagggatctgtagagaaagcaaacgagagagagacgagaacagaagaaactgtgaggtcgaaccgaaacgcactggagatttaatttcaccctccaaagtaaaataataaaatctataaggactaatgttcaattattattagttttaatatgaaaactcgatcgaatcgaaataacaataatcatatagtatatagttttggaaataaataataaaagcccttaggaccgattcgttatttcttcgctctctctttctctctgtgtctcgtactcgagtaggtctcaggtaaggagttcttctttcagttcctttaatccttgttaaagtttcgatttctctttacattttcaatcgaattcgcttctattgggttgaaggtttaggtttttaggtttcggagtctttttgtgattcgagagattgactctgaatggtttttaccttttgagtttttgtagttcgaagagcgaccaaactgatttcagatctcaattgtttctgcagttacgtaaaggatcgagcttaaaag

SEQ ID NO: 14372 - DNA, 3000 bp, Unknown
  misc_feature (1)..( 3000): cDNA_ID_3016525_gDNA_ID_2684112_Annot_ID_190651 3000 nt of promoter + ATG
ggtatgcagagcagtttattggatatttatttgatactctgtttgcttttgatataaacagtcggtgtgtagagagcgcgaagaattcctgagattggtcaagaaagaggtacgctgtccaccaatgcttgatcagcactttgtgtcgtagattgaaagactttgtttttctgtttctccaggtggagttctataacacaatggtcgagagagaagatgtagatggtgaaaaagctgcaatgaaggcatacaaagcagctagagtagatattgaccaagctgatgaagttgctgaagcagacgaggtttcctctgcactaatggagaaggtaagaagattttaaatcggtttttaagactattaaagtcccatgagatttgtttaagaggcttactcttcggtcatactttttaaggttgatggtctgatacaaaacctagagaaggaaattgatgatgtggatatcaaaattggcaaaggctggcagcttcttgacaggtatatagactccatttttctgtttgagtgttctgtttccgagacttagaatctaaagtgatcacatctgaatgaacacagagatcgagatggaaaagtcacacctgatgaagttgcggctgctgcaatgtacctgaaagacacactcgctaacgacggccttcaacaactaatcagtagtctctccaaagataaaggtaaagaacagagcgatcctctccttcttgagctcttatctccctgaagttgatcttttttataaatctgttattcaacagagggaagaattatggtggaagacattgtaaggttggggagattgggaagcaagccagaagaaaatgcaacggaagaagaatcaagctgaaggaaataatactatgattttaagacacacatagactttttaatactagtgaagagagttttattgagagaagctctacttcatgttttgctgcttagacataagcaggctacttacatatacaagcggctaagaatacgagaccttttgctagtaatgtgaaaagaggttgaagattaaaaataacattacgccaagaatgatatcttgagcgttttatttcaatggaaactcctgattcaaatgtgtcgatggctatgaatatgataatctgatgattgactggttatactagtttgacatgtgtgtttccagtgatccctaaatgacataattcgattactaaactttaatgatcttcctcgtttcgatctgttggtcacccaaactcaattttgtttgcttgtatgattgtatcaagccataaattaataatttttcttctttatctggggtcacatggaagagtatcatattactaagaaaaaagtgatgtctgtatcccaaaaatctactgaagaacataggatgacaatcttggtacatgtctactactcttttaatatgaggtagaagaagacaacaaaaatggcagccataacatgaccactgttgttgttgttgatgatcatgatgggcctaggctccgtctgctacagtcatgtttactgtactgatgtaaagaactgcatccaaagaaaccacacttaaaaagaaagatatacaaagaagaagattgagagaaggatgagtgtgagagattttagttaccgttgtttccacggataaaggcgtcaccatatttgttcttgagctgcccgtttacatactcctccgtctgctccattgctatgttcatatatccatcaagacaagtaagagtgcctgtgaaaagagtaataaaaacttgatcaagaactcaacattaagcttgaacagaacatagacaaaactgactcgggcacgaaaggaaagaagtcaacaagaatgatataagtagccttgataatgagagaaactgacttaaatattcaaatatctcagtcaactattgtaaccttattgcaggcagaaaggaacatgttcttaagaaaaccattgaacaatgttcacaaggaaaccttagaaaatgtaagaaaagcttcacatattgactttaaaagaatcatttaaaagctgaagacataacatgataattaagttacttaagtgggcttaatacaagcaactctttaattcccttaacatagacaaaagaactagtcctaagtcaaagcttctaacctaaagtgcagcagagatagagaacttgcaaaacacataagaacatctaacgagagagagaggcacctcgataatcaacaccagaattgagcttgacaacaacgggtctcccacggatggatttgaggaaatctgcaggtgtctttgtcgttccagaaactttctcttcaactccactcatcttttaagctcgatcctttacgtaactgcagaaacaattgagatctgaaatcagtttggtcgctcttcgaactacaaaaactcaaaaggtaaaaaccattcagagtcaatctctcgaatcacaaaaagactccgaaacctaaaaacctaaaccttcaacccaatagaagcgaattcgattgaaaatgtaaagagaaatcgaaactttaacaaggattaaaggaactgaaagaagaactccttacctgagacctactcgagtacgagacacagagagaaagagagagcgaagaaataacgaatcggtcctaagggcttttattatttatttccaaaactatatactatatgattattgttatttcgattcgatcgagttttcatattaaaactaataataattgaacattagtccttatagattttattattttactttggagggtgaaattaaatctccagtgcgtttcggttcgacctcacagtttcttctgttctcgtctctctctcgtttgctttctctacagatccctaaatcctctccctttggaccgttaatcccccaaaccctagattttacaaacaattcctctcaatctctctaaattctctttctcctgcaaggaatttgcggactgtttcttgtggggtaaatcttctattagctatg

SEQ ID NO: 14373 - DNA, 3000 bp, Unknown
  misc_feature (1)..( 3000): cDNA_ID_3016533_gDNA_ID_2684112_Annot_ID_190649 3000 nt of promoter + ATG
cattgctctacaaacacttgaagaccaccaaagaaactagccgcatttgttcgatccaaggaatcagcgcagttaaaacgtatcaccccattttgatgtgatctcaaacagaaggcaccttcaatgtcatcaatacagattacctcacctctgcaatctttcagtctttgacgtgaaggcaaatagtcaccttcagaaattcctattgccatagtgggagattttagatacatccacaatccttcaatagtttgctgttccccttttagtttcacgctggcatgccaatcataatttatcaggtgaacacgagtataaggaagctttccactggatttgataaagttcatcgattcttcaaaatgttgtactaagatacattctgatttcccttctccacttcttagtaaattaacgcacacaataggaacaaaagcctttttcttctggttttctccaacaggtgcatctagattcctagtatcatatcgcttgcttaacctttggtaatactctgtactgcctttataaggatccctatctgccacataaatttctgcttctgccgcagtcatctttaattctgcaccccaccatattggtatggtgccacgtcgccaaatgtacgagttgaaagcaatgctttgaccatttcttttaggtatccatacaagctgctcacactcaacttcgttacctgcactacacatatacttctaaattaggccctagtcaatccagagccacactttttaagagaacaacaaagaaattaagagagaggagcattttaggggggcatgtcacctgtgccagaacatgaattaatgcccctagctaggtaacgagtccctggatgcagtctgctacgacgggccattagagcaacaatcccttctagctggcctgagctcccaaaaggtcgatattctgcaaacccctataattaacatcaaataagaagatgatgtcatatcaatttatatgcttttgaatcttcacacaaaaccgaaatcggataggtagatcaaccttcatcaattcattaatggaggacgaacctgcagaagaatgacacagtgttcaggtagcccaatattcttaaaaggcacggacaaccatctattccaaacaaattcatcatcagggctttgaagtggcatacggcttgggaagggccgagtgatgtctctagtatcacagaaatagtgcttcccgtcgatgtcaagctcagtcaactcctgaatattcttggtttcacctttcccttgaggctgtggattgtagagtggtattttgacccattgactctcagccactgtatatacacatccaccaccaggcaaatctggaatacttggatttagcctggtcgcaactaaaagcatcccaaagctccccaagacagcataaccgagtattgccctggcataaacagagcttctaacacctcctcttgatccattcgtaatataatctaaggcttcacgctctgacttaaaattatcaaggccaggcttcccattgtaccgcaggataccagtcgtaggatcgatatagataacttgagtatcagccttagataacaaacttgcaatgacatagacttcaccagtgtctaaggtgacaacaactacagatgtcttttttgaaccacctacaccaagaagataagaaaattagccaaccaaatgatgaaaacagctagagtgaaaaaaaaaaacacttgaatcttcaaaaagaaactaacctggtggatgcagatccatctgagctcaggaccaagcggaccaggtgccctctttgacagcttcagggaccaagatatcaatgtggaaccaaaaatctagcaaaaagtcaacgaaataaggaacttccatcagagaaataaaaagcaatggaatccaaaaaatgtagcatagttagttctatacttaaaacgattcatcaacgccaattaaaatcaaaacagagagatcatcttcctaacaataatctccgatataactgagacaaaagatcagaattttctcacaaatttcgatagaagtaataaaaaaaacgagtaccagagatctgagactttttccgagaatagcaaaattaaagacgcaaatcgataattcaaattccgagaaagcagaaagataaattcttcagagaacccgaatcgaatcataagtcataagagaaggaactcaccttgaagttgtagagatgatcagatgcaaaatttaccaagtcgttcgtagacgaacaaacgaagaggaagaagagtaaatctgctgttacccaacacacagtacaaaaacaatcatagtacgacacgtgtgaatctgtttaattgatttatgaaaaaagagaagaaattattgataacttgaaaattggtccaattagttttaaaatgtaacgaatagacccaatcaaaagaaaagacaaaataaagtatagagatgatgaattaacggctttggacaagccacacgattcgctttgcttatcttgctccacccaatccaaattgagacacaatctctatcgaatccacgcgcctctatcttttttcaatcgagtcgccattaacatatttcatcaagctcagtccactcttctcatgaaacttcatcatcatcgaccttgaccctgataggttattaaagttactgcatttgatctctctttgaactgcttctgttgttcaaggttccaaacatgctcagactcagtaattgaataatgggtattcttgttgcaggtttcagacgacacccattattgtaaatctgctgctggagtcttttttgtctgaatcttcttcttgttgagacactgtttcttcttggtctgtgatttttgttttgttctcattaggacgttctttattccggttcagatttactggatcgtcattttctctttgaaattgtatttttttgttccttttctggtatgttgtgaaagctatgagattgctgtaagaatccaagactgaccaac

SEQ ID NO: 14374 - DNA, 3000 bp, Unknown
  misc_feature (1)..( 3000): cDNA_ID_2990413_gDNA_ID_2684112_Annot_ID_190647 3000 nt of promoter + ATG
ttctagaaatgtaaaattcctctcctgtcgtcttctacaataaaatccgaagtgtcgttatctacaagaagagtccaaagtgtcttcatccaatcgttggtgagtcgctttaattctttatttgatcttttctgattattttcagtcttttttacacatgtgactgcaaaacggatgccttttttaatttatttcttctttcagctttcctcactgtttgtttgtcctctctctttaattcaaaaataaatcaggcttttaaaatcacgattgtgtccatatctgaacatggcttttttctctgtgttttagctttctagctgcatttttaggttttatttacacggattacttcctcctgttttgggaattttgctatgtttgactttgctatgctctgtttgactttgctatacttgttgactttgattttaatatctctgctacacttgttataaaaaagggactgatgaacatttggatttcgaagttgaattgattattctttgatgatgtaatatttattattaatccaaaaatttagtaataagattcttttgtttttttgtatgggaagatgacttcagaaaaagcttgcttcaagcccaacaactacggtccacggatatgactacttagagcaagttccagcctcacacatgaattgcgatcttctcaaaggttagtttttttcaatgccttctttttttttttttgataatttttttaaagtgtatgatagattgataatgacatttgtttgaatattaaaaaaaaaaaaacttgcttgtaaaaaacacatgtagccaaacgtcactttaaaggtaaaaaataaacactttaatgaaatcccagccgaaacacttagtctaatttagtcgaagcacctagtaagaaaaacgtagcgcattttaagttgaattaaattttagcaactctagtcgttgtattactctaagtattagtcgaaccacgttatttagcaacaacacgtaggaattgttgctttagttaaattacttagtcgaagtagtttatcaaattcagtctaaaaagtacattatagaccaaaaaaaaaaaaaaaaaatagcccacttttagttgaaatcatactaaatagcaacacttttagaagagataaacacattagtcggaacacctgtaacgaacttagttacaaaagactgtgcacactcaaacaagttagcacctagtcgcaacacttagttgagatacgaacctaaatatctctaatcaatcgtttgtaaaccacattttagtttagccaaaaacagtcgaatactcaaacattatatcactttttagtttcgtcaaatcatattgaatagtcgaaaaataaacgaaatgcgttctcgggtaataagtattctagagcaaaaatgtgattaaaaacaatatgagtaaaatgcattcatgaattatgaagttgcaaatttcaaccagctgatgccgacgtgttggatttcaggaagttgttggatatcaaagacccttggagatcttagggtttaggcttctagaggctttaagcattgtacaatttgtaaacttcaaagcattagtcggggttgttcttagtcgagttgaataattaggcttaattattcttaattgttcttagtgttagttctttttgtcttcacgggcggctgataagaaatagaggacaattaggcttaattattcattcaggtagaaaatgtcggggttgttcattcaggggttgttcattaaacttaattctccttagtcggggttgttcattcaggtagaatatgtcaagtaagttccgagataatacttgttaaagagtttattatcaataaaaataaagtttaagcacttgttgtttgcaagtgaattctctgtgttgtttttgtctctataccttttaaattatatttttattgaatatatagagtaaatgtaaaatggtaagacttttggtatatagttttttaagtgaatttgacgcataaatttcatgaaactcttacataatatatatatcaaaattgtataacaaaatttttgtattttacagacattacttaaaattgcataactacaaacgaaaaacaaccaattttctcagacttttacagtttgtacttcgaatggttaagaaatcagattctattgatgtggttactcgttacccaataaaatagtaattgatcataatttaatgttctattgatgtagaagtcttagaagatacttactaatggacgaaaatatcgagaaagaaaaaaaaaaaggtacaacaacggcatatttccgtgagaataatgcgcgtggaacgattaatgtggctattcattgcttaacggcctttttagtgtcggctctaaggcccatttttgtctttgtgcaaatttaacggtgaatgtgtttgttcaggtgttttacattttttttttttgagtgttggaacgcttttgttagagtttatgtagctcggattaagacaaccctaattggctaattgctaccgcctaccattgtttgactcagttatacgggcttaagatgagctgattccttatcgaacaaaccaaaaccaaataatgtcaaatttaagaagaagaatcttttcaagttacattttctcagaagcttttggttcctttgttactgactatttccttgttgaccaaaccaaaaccaaacaatgtcaaattcaagaacaagaatatctaacggcaacggatccaagacgatgaatttgacattaaaaaaaaaaaagttaaccagaaagattcatgcaacacttgagaggtatgaaggtacgaataagaacacattctccacgttcgcttttggtcagtgcacttcacttggttggtgattaaaaaaaaaatgtataaaatataaaaatgaaacttaatataaagttgaaagcttggtctaaaaatggaccgtatctgaaaatccaatcgacgtcgtattccaagaaaatagaaaagtaggatcatg

SEQ ID NO: 14375 - DNA, 3000 bp, Unknown
  misc_feature (1)..( 3000): cDNA_ID_3016537_gDNA_ID_2684112_Annot_ID_190648 3000 nt of promoter + ATG
agtagccaaaatgagcatttttatttcaacccaaactccttgatgaacattatgtgaaagaaataatcaaattgtggtgggttttgaaaagttatatatcatgaaatgggaacttgttagaaacttaagagcgtcttacttcaggcctgacatctatgagcactgacttgtctcttgattttaaaaggtccagagttgacttgggagacaaatctccagcatatccaccatatgtccaaacccgatatagaaccctgcaaatatctggtggaaaatataaattcttctatactacattgtcctctcaagaaaagcaagtttaatatccttctagggtaagaaaagccgtgtaccaaaaggttcctgtggtgcctacgaagagaaaaaggtgaaggattgggtcatctggatccaaaccgatatttctctccaaacctccaatggcaacagatacctgttcatcatgatactgttagcaactgtagtccataaagaattaattttcttctacgaaaatatgaatgaaccttcagtatataagacaaagcacctgctgcaatacagctcccacgggactcaatacttttagagcaacatcttctgacgagttaagggcactctttacatctggaggaagtaattcttttgctgatccataagagtacacaacaaaagaaactccatttgttacagatctctctccaagactaactgattgcctcagcagatcaatggcaataacagctgctctgtttgaagcttccttcaagccagtagaaaaactcgaaaacttgtctccagctacatctcccgtttggtctagcgtagaaaacgctctgttaactgcactatctacaacttcagaagcattctttgtaatggatgtcacagacgaggagaaggactccaaagtgttctttacagcattttctccttggttaagtgaagagctgaaggactccttgaccccagaagaaaagtcatcaacgctagctttcgcatcaggaagtgaagagctgaaggactgcttgagcccagaagaaaagtcatcaaagctagctttcgcatcaggaagtgagactgaactatccggagatattttaacagtcgcattggttcccgattcaacagagtctataaggctactggtcttatcggttaaagtctcagcagaaaggcattcaatgggggaaacatctggtacaacagcttcaacaggagaaacatctgctgcaacagcttcaacagggaacacatcttctccattttctacatatgtcagtccctcatcactcgctacaaaagcttcactcatgttataaaccatgtagtttattctgtccaactcattctggcacaaacttccgaatgttgatactggttgttctgttttttcgatagtaccggtcaagaaactcccagtggcttgaggtacgaaactcttctgcaggcgtgttccattagagataccaaagaaggcattgtcacctgaactgtatctgtgaatcaactctctcctgaaggaagaacagcctcgccaattgccaggaaataaaatctgcagaaacaaacccgttatgaggtacttacttatctatgaaaatgaatccaaaaacccaaagcactaacaaagcgtaacacccatagctcaaattggatgacttcaataaatttgctaccagttagcttatttactttcacttctataaagaaaatctaacctgagaatggtaacggcagcttgtggccgagcacaggggaaacatgttggtcagtcttggattcttacagcaatctcatagctttcacaacataccagaaaaggaacaaaaaaatacaatttcaaagagaaaatgacgatccagtaaatctgaaccggaataaagaacgtcctaatgagaacaaaacaaaaatcacagaccaagaagaaacagtgtctcaacaagaagaagattcagacaaaaaagactccagcagcagatttacaataatgggtgtcgtctgaaacctgcaacaagaatacccattattcaattactgagtctgagcatgtttggaaccttgaacaacagaagcagttcaaagagagatcaaatgcagtaactttaataacctatcagggtcaaggtcgatgatgatgaagtttcatgagaagagtggactgagcttgatgaaatatgttaatggcgactcgattgaaaaaagatagaggcgcgtggattcgatagagattgtgtctcaatttggattgggtggagcaagataagcaaagcgaatcgtgtggcttgtccaaagccgttaattcatcatctctatactttattttgtcttttcttttgattgggtctattcgttacattttaaaactaattggaccaattttcaagttatcaataatttcttctcttttttcataaatcaattaaacagattcacacgtgtcgtactatgattgtttttgtactgtgtgttgggtaacagcagatttactcttcttcctcttcgtttgttcgtctacgaacgacttggtaaattttgcatctgatcatctctacaacttcaaggtgagttccttctcttatgacttatgattcgattcgggttctctgaagaatttatctttctgctttctcggaatttgaattatcgatttgcgtctttaattttgctattctcggaaaaagtctcagatctctggtactcgttttttttattacttctatcgaaatttgtgagaaaattctgatcttttgtctcagttatatcggagattattgttaggaagatgatctctctgttttgattttaattggcgttgatgaatcgttttaagtatagaactaactatgctacattttttggattccattgctttttatttctctgatggaagttccttatttcgttgactttttgctagatttttggttccacattgatatcttggtccctgaagctgtcaaagagggcacctggtccgcttggtcctgagctcagatg

SEQ ID NO: 14376 - DNA, 1817 bp, Unknown
  misc_feature (1)..( 1817): cDNA_ID_3016658_gDNA_ID_2684113_Annot_ID_190693 3000 nt of promoter + ATG
gaattctatgttgttctcgctgatgacttaatattaggtgttcttggtctctactgctttgtttccgtttggtttgttggtggacttactgtcttccacttctaccttatctgcaccaaccaggcaagattctttagcttttaacgtagtttccaagtagcttttactgttggtctgattctcttgttatgttttgcagacgacttgtgagaattttcggtaccattacgacaagaaggaaaacccttaccgaaaggggatcttagagaacttcaaggagctattctttgcaaaaattccaccacctttgatcaatttcagagattggtcgccagaagaagaagacgatgtggaggttggatccatagcctctgagctagtcagagcctttggtccaaaagacacgaaaatgagcagtggaaagtctgattccgaagctagagaacggtaacaacggtggcacggctgtcaagagataagtatggatgaagacgccacaacgactgctttggtctaccaagaaccagcggaaaacaaggagaagctcgagcgtggaagtgagatcaagataggccaaagtaaaggacaaacaggtgtaaaatctacttttgtaattcaaagccatgtagctctctttctctctttactcgtcaagatgagttttaaactttttcccattaagaataggaattaggagaattggtgtacataaataatcgtttcttgcgttacaggtaattcaatttggtgtttattattgtctccatctttctttttagggttcatataatgtatagtgtttcttaggtcttacggtaaggggtttataagaaaagaagaaaaatttgccaatagagaaaacaaagagacagagggatgtgaagagatgatgatgattcgttgatatgtttaatattctatttctatatataaaaaagctcaaaatactttaccaattgagcaaaagctatatacatatataacaataatatctcatcttatttttgtgagatctttaatcaaattgacttcttcttcttctttttttttgctgaaagcattcatagaacaaactaattacaaaaataatcgaagaagtgaagcatttataaaaggaaaagaagaaagaagatgaagaaaaacacaaatgatggaaaaaatctaggtgtgaagcacgtttgattgagagatgatttgacttggcttcaccagctcattgttgcatcattctatttatctaataatatttatagatatagttggccgaccaatgaaataacaatatttttaagtaataaaaatctaagttaaacaagaaattattccttcttagttcgaacagacatcctcctattagcgtaatcacttgtcctaattacatacattgtccccattatctcatttactcctgtctgaatattcggtaatgagattggaataaaaaatatatttattaccaaaagaaaaaggaaagagaaaagagaaaaggggcaaaagagatcgcaattttgcaaaacagcgaaaatagttctttgtgattttcgagtgagagagacgacagcttccattatcccctgtctctctccctctcgaactacaaatcaaattcgagtgttttcatattgttaatctttttcttcaaggaaagaagagattttgttttccgtttctgggggtttttcttgattctgatctctgatctgatctcatcatcattgtccgtggattctccgatgggtttctgattgtgggttctttcaaatttcttcacttttggagcttttcttctctctgtcttttgttttccctcagctatg

SEQ ID NO: 14377 - DNA, 3000 bp, Unknown
  misc_feature (1)..( 3000): cDNA_ID_2990045_gDNA_ID_2684113_Annot_ID_190694 3000 nt of promoter + ATG
aaattcgagtgttttcatattgttaatctttttcttcaaggaaagaagagattttgttttccgtttctgggggtttttcttgattctgatctctgatctgatctcatcatcattgtccgtggattctccgatgggtttctgattgtgggttctttcaaatttcttcacttttggagcttttcttctctctgtcttttgttttccctcagctatggcttggaatgagaccaaactcaagaggctctatcaagtttggagaggaagcaatgtaagtcctgacattttccactttgctttcgtttctttcacattttcataacctggagaagatttatcacataggttttggtcattaatgaaatcgctcttggattcctttgagtccaagtcatagcatttcagactcttgactctttattttggtaatgaaataagaaagaagcaaaccagttttgtatctaattgtcaccttccgttgactcagtttagctcttgtgttttagatcattttagactcttgactcttattcattctcttagtagttgtagttgttactatcttgagtcttgattgttcttatatggaagttttcaggcgatggtcattggaagctatggatttaaaactgactttgattttccatttttctttgaagaaatttctatgtggcgggaggctaatatttggtcctgatgcatcatctctatatctatcaaccatcttgatccttggtcctgctgtaatgttctttgtcaaaatgtacactaaaatggctgatcctcgtaccaagaatccaaatctatgtattccaattctctgtgtgtcttggatactcacaattttggtatgtcttctgctttcgaactttttttaaatgatttttttgtgtgtaaaaagtgaactaaagtttcaatagttttcttcaggatatatttttcctcttaatgacatctagtagagatcccgggattgtgccaagaagttttaggcctccggaaaccgatgatgcaccggattcaactactccatcgatggaatgggttagcggtagaacccctaatataagaataccacgggtcaaagatgtaactgttaatggacataccgtaaaagtgaaattctgtgacacttgtttgctttaccgtccacctagagcttctcattgttccatatgcaacaactgtgtccagagatttgatcatcactgcccttgggttggccagtgcattggagtggtaagtttactccatgactcttgccatatattcccggttctatgttttgaacttgtttggattcttttgcagcgaaattaccggttcttcttcatgttcatatcaacatcaaccactctgtgcatatatgtgtttgccttttcttggttgaacatatttcaaagacatatggatgaaaagattagcatctggaaagctatatccaaagatgttctatcggatattctcatagtttactgcttcattactgtttggtttgttggaggactcacaatatttcattcctatctcatctgtactaaccaggtgattagaaagatatatgctttcgtacatttcaggtctttctttttctgttcgctctgttttgttttaatggtgaaaatctgttttgtgcagacgacttatgagaatttccgataccgttatgataagaaggagaatccatacaacaaaggaattttggggaacatatgggaaatatttctgtctaagattcctccatcaatgaacaagtttagatcatttgtcaaggaagaagattatatgatgatgatggttgaaactcctacttcaaatctaggtgaaagtctagttagctcgaaagagaagattgatatcgaaatgggaggaggaaggattgttgatgagagtggaaagagctactctctacctgagattctccggaatctaaactatgaagatcttgaggatgattgtgaggaagatgacttgaaggctaaggatcatcaccaccaccatcaccatcaacatcaacataatgagggaatcatccctccttttgaccctttttttaccaatgagattggtagtaacaaagatgagagaaatggagaagaatcaggaggatcttcaagtgatggtgaaaatacagggaaacgcgttcgggtctcagatgaagatgaagagaaagttgaagggtatgaacgaaattggagtacagataaaggtatgaatataaacgcaggatctgaagatggagcaagctctcctgtatccacttcaccaatgcttcgtaaatagaggtaatcaagctttacctctgtgtttctctagttgctaaagcaagttgcttgcttttcaagaaaccgttctcagccctaaagctttacctctttgtttttttttacttgctagagaaggaaggacttgaagctggagaaatggagtttgtgctttatcattcttttaattctgtttcatataattgtgggaaaaaaaatccgaaaaataacaatcatcttagaaaattgtgagtttgagcactagatttttttatttttaaaattctcctttttagttgtatttatatataccagaatggtctggatatcaccagcatcacatattttctctcttttttatttttccttttttgttataaaaaaagatttggaccacgaatttgtaacgtatatactgttgtcggaattatttttccttattttattggttgattttcatattttatttgtttctaatgatttatcaatcacatatttttctttcaaaaatgttctgttaaataacgaaatcgcaaaaataaaacagtgatattatcaagaagacaatgcaaatcaagaaaaaccaattaattatcgccacgtgtctggctcccacatcagaattcagattttcacaagatgagatttttcacaaatataaatcaccacacagcctcatcttcttcctctagctgcttttgctctctatctcactctttgcttctgcaactcacagtca

SEQ ID NO: 14378 - DNA, 3000 bp, Unknown
  misc_feature (1)..( 3000): cDNA_ID_1019620_gDNA_ID_2684113_Annot_ID_190695 3000 nt of promoter + ATG
ctttatcatgtaacgatcatcatttgtcaagtagaaaaagcttccactcttaccaggggatgatagctcccgaagggcatcattcccgcagatcgataacatgtaatcagctgggtctaccttgaatagcttcctcaagctcctaaagatagataaaattagcataacagtgtgtgagaatacgtacagatgggaaataagtaaagcctaatgttatttgatctcacctaaaaactaatgggcaatagtctttccatttgaattcactagattgatgaggaggtgtgtatttggttccttctggtggaaatcttgtccataccttctcctttggatcaaaagccgaatgcttaagatcaagagacacaaccggagcttgttttccaacagcatgtctgcgtaagcaaatacatttcacatgagcgcttatacatcaacaaaacttcaaattgtataaatgaggcagcaaactgggatatttacctgattccaagctgtagattaagcataagctcgtaattccggtggcctttagatatcgtctcgccttgcttcctccctgcccttggcaatctcataggtgcagggctcggtctcaggctctgaatgaacccttcagcctctagtctcatcatttcagcatccaagtccctcctcgtggtggaatcaatatcagcagcaccttctccgctttcggttccccacatattcatcttctcaaacgctctatctacacccacacttaccctcccgtcaacagacatcctcctcggtttctcgacacgtttggaagagttccaaacagatagctttttctgtgaaggcaacacaggaactctctctccgctgcagatcttgtactcactcagattagtaaacacgtctttaggatcccattcaggactcccgtcgtctcctgatggataataagtaccgttcatctcttccggatcattagaccaatgaccaacgtagaaactcccatcagcccatttgaaagtaccgtttcctctaggaaaaccgtcatcccaaaatccgtcgtatctattcccatccgtccaaataaaagtacctttgccacagatcgtagcgttcttccattcccccatgtaatagctcccatctctccactgatactttccttgggcttcttgcaaacccctcctccattcaccatcatacacatctccattcgcgaaacgcttgattccatgtccatgtttcaggttcatcacccactgacctttataagtatctccactaggacctgtgtaaaggccaacaccatccatgtatccacttttgaattcgccttcatatgtggcaccagaaggccacccgaacttccctcttcccatagtcttcccgttgtaccagtcaccaatgtacatgcaaccatctgtccaaagatacttcccatgcccgtgaggaaaactatcataccattgccctgtataatagtctccattaggaagtattctctctgcatggtacaattcccctatgctgcttctgttagtgctggtctcatcatcattctcctcagtcgtagtagtagcatcatcatctgtctgtggagctacagataccgtcccaaaaatgctgtttgcacgcttcttcgcttgttgggtctttcttacggtcacctcccaagcctttagaacacagctttgttccttgctcatcttcttaaactaataaaacttttctctaagatacctatatgtatatcctagaacataaactcagaaaacatatttgttcttgtctaaacaacaatcctatcaatgtacacatacacaagagaaaaccatgaactctgtgcaaaagaaaaaacaaagtgtaaacctaaaaccattaaatcaaacgcagcatgaagaaatctgcaatggtctttactctgtgacttcctgtctctatgccattgaatcacaagaaaaaagaatgttttttggtcttttagaatgcaacattttcggagtgaaagctgatatgaacaatcatggaaacctaacaaagaatcagagagagagaaaaaccaatggccaaaagagttaagggatcaaaaaaattctctccgacatttcatcttttcttgtcaattcatcttaactaattatgtcgttcaaagaagaaaccgttcatctcctcaaaccaatgaaagccttcaaatttagagaaacaagcatgacccatttttctctattcttagcatctccgagctttcctctcataaacaaacatattttcttcagaacaaaaaaaatcggaaaaagtaataattaatcaatttagccaagactgataacgtctccaatctgagatcactaagagctataatcaaaaacagaggtaactgaaactctaactcactgaggcattctgtcgaacactttaaacgcattgcttctccactaacaagtcacatttttccgtatattcacaacttattttcaaaaggaaagatccattcccaatgctgaagcttcaaacaccataaacgatagaagagagacaaaagttacaacccaaagccaagcgtgtaaagatcaaaaggtcatatttttcctgaggggaaacttccgtcgcaggttaaaattggagggcttttttgtaaacaattcttaagaaggctaattgtagtaatttatttgtaattattagttaactgtgtaaagtaaatactttatccagtaataacgtatcactttagttgatgtctattggttaatagccgaagctcgttccaaaatcgaagagaatctataatctcatcacgacacaccaaagccaaaacctttattgtcggaagctgactcagactcaaacaatgtctctagcgtcaattatatgctaaattcaccagccgcttagagccaatcatataatctcgattctcttcaacggtcctcaattatcctaaattcagatcataaaaacgctaacttttaatttctttctttctgagaaattggttctcatcgttggaatcgaaaaatg

SEQ ID NO: 14379 - DNA, 3000 bp, Unknown
  misc_feature (1)..( 3000): cDNA_ID_3016654_gDNA_ID_2684113_Annot_ID_190696 3000 nt of promoter + ATG
ttaacctgtgttatgttcctttttctgaaaatgttgagatttgtttcagacaaaccgaaccacggcaagaatattccctgcggtgctggatgttgagaaccctgagttcaagaggaaactggatagaatggttgtgagctatgagaagctgctggctataggagaaacagatgatgcttccttcatcaagaccctcaagaggattcctttggttacttctttagcctctgagatcttggctgcttatctcatgcctcctgttgagtctggctctgttgatttcgccgagtttgagcctaatcttgtctattagtagctgcaatgtcaagtcttgagtttacggctggttcttgatttcttgtaattgaatgatcgaaactgagaaacatcgtctttttttttttgcaataaacttttactgcatatatttgatcatattgcgcattggacttacttaaatttcagattttattgaactggttgatacagttgagtttgcaacataaaaaaaaaacacattacaaaatctacgaaaatatccctggaaacaatcctaccctctgtgtcttgtgtaaaggagatttatccagagaggattaaatatgaaagctgagctcattcctcattcctcactcagatttggccttaggtttctcttgttcttcggtgagaggcttaaacacaactttgaagaaccaaactgcaagcaacgtagccttcacaggtccaagccaatacacaagtaaatgctctttcgttatatgttcaccgcgtgcataagcccatcccataacctgcaaagattcacacaaaagcaaacattcaaaacaaagatcgctatttgctgaaatcacaatcacaagacttttttttggtacatacagctgcagggttcatgcatccaccggtaagatcagagccaagaatatgaagagttaacttagcaagactaccgatccaagtcttcatgaagaaacttcccgggatttttcttgttagtcccattgagagcagtacaatgaagaatgttagtatcccttctgttaaagcaccgtggtgaattgctacatttagtttaggtcctttcccaatctcagggaatacgtgaatgatatgcttaaccgcaagaattgatcctattacctgaaataacacaaaaccagagtttcacaatagtatcatctttgattacacattagagcaaaagatcttcaagatgaagtctttataaaacaatagagcatataaccaaaatgatctggttttcaaagaagaacccatcagctaaattctccttttttttctctaatttgacattttacaacattacacaaaccctgagacctctctctaacgaagagtcaatttcaattaaaccaaaaaaagtcaacgaaacaaacctcgacggggattcgaacgaagacggagaagatgaaactgctgaagccaccggagactccagcagccaaagcggtcaaaggattataaagcccgcctttggtggcttgttgaaggtaggcgaagatgaacatggagatgatagagaagagataacgaacgatctcaccggaaggatcggtccggctaaatccaagaactccatggactaaaatgttgaccagaactcctgcccatatccacatgaacgacaataccagatcagtcactactaaaccgattcgtcccatttttcgattccaacgatgagaaccaatttctcagaaagaaagaaattaaaagttagcgtttttatgatctgaatttaggataattgaggaccgttgaagagaatcgagattatatgattggctctaagcggctggtgaatttagcatataattgacgctagagacattgtttgagtctgagtcagcttccgacaataaaggttttggctttggtgtgtcgtgatgagattatagattctcttcgattttggaacgagcttcggctattaaccaatagacatcaactaaagtgatacgttattactggataaagtatttactttacacagttaactaataattacaaataaattactacaattagccttcttaagaattgtttacaaaaaagccctccaattttaacctgcgacggaagtttcccctcaggaaaaatatgaccttttgatctttacacgcttggctttgggttgtaacttttgtctctcttctatcgtttatggtgtttgaagcttcagcattgggaatggatctttccttttgaaaataagttgtgaatatacggaaaaatgtgacttgttagtggagaagcaatgcgtttaaagtgttcgacagaatgcctcagtgagttagagtttcagttacctctgtttttgattatagctcttagtgatctcagattggagacgttatcagtcttggctaaattgattaattattactttttccgattttttttgttctgaagaaaatatgtttgtttatgagaggaaagctcggagatgctaagaatagagaaaaatgggtcatgcttgtttctctaaatttgaaggctttcattggtttgaggagatgaacggtttcttctttgaacgacataattagttaagatgaattgacaagaaaagatgaaatgtcggagagaatttttttgatcccttaactcttttggccattggtttttctctctctctgattctttgttaggtttccatgattgttcatatcagctttcactccgaaaatgttgcattctaaaagaccaaaaaacattcttttttcttgtgattcaatggcatagagacaggaagtcacagagtaaagaccattgcagatttcttcatgctgcgtttgatttaatggttttaggtttacactttgttttttcttttgcacagagttcatggttttctcttgtgtatgtgtacattgataggattgttgtttagacaagaacaaatatgttttctgagtttatgttctaggatatacatataggtatcttagagaaaagttttattagtttaagaag

SEQ ID NO: 14380 - DNA, 3000 bp, Unknown
  misc_feature (1)..( 3000): cDNA_ID_3016650_gDNA_ID_2684113_Annot_ID_190698 3000 nt of promoter + ATG
gtaggtcaatttgattatatagatatgttgtgttgattgtgctgttcggtatctgcaggtattcatatacgacttgcgtacttcaactcccataagagtgaaggatcacatgtaagtcttactgtgtttgtattaactcaaaattctttgtatatgctatatcgttaggttatttcctcagtgttcattgattttctgcaaaacttgcaggtacgagagcccaattttgaatattaagtggcaacggactcttaatactcaacaacctaagttgattactaccgacaaacacattgttagaatatgggatccaaacacggtaagcatcagataagaacaggtttaacctcataatttttttgaaaaaacaagaaatatgtcgagatttttgattcaccatattctgttttgttattttcaatttgtgtttatcagggagaaggtatgaccagcattgaaccgactcaaggaggaataaacgacatttgtgtgttccgtggaagcggacttatgcttcttgctttagactctagcctaatcccatcttacttcatacctgaactcggtcctgcccccaaatggtgttctcctcttgaaaatctaacggtaaattgaaaattcttcctatccttttacaggtttaccattccagtgatgtcaccattgttacaaacacgtttcttgtgtttaatattgttctcaggaagagttggaggaaagtgcacagacaactatttatgataattacaaatttttggcaatggaagatctggagaagttgcagctaactcatttgattggaacagatcttttgaaagcatctatgcatggatattttattaattaccatttgtacaaaaaggtgagtccttaacattttcataatacttataccatcagaaaagtcttttttttttttcgggtcaaattggaatagtctctataatgtttcttcctttctttttacaggctttagcagtgattgaaccttttgcatttgatgattacttagaacgtaggaagcaagagaagttagaagagcagcgtacgcagagaatcacagttagtatttaaaaccttagcagctatacgttcaccatttgtttgtttaccggctacttacatacacatctgtttctcttgtgcttccttcagaaaaagagacggttgccaaaggttaaccgagaccttgcagcaaggcttcatggggacgaatcagaggaggaaaataaaactgccgaggatggggaggccaccaagaaagtgctgaaaaagaagaaacccatacttactgacgagcatttcgtagatggtcggtttggttcgatgttccaaaatccggtattaacatattcttttcaactttttttgtttgatctttttattgctctatttcacatcgtatcaaacgtattcttgggaatctccttttggttttcaggacttccaaattgataaggactcatatgaatatggtgtcctacaccctgttgcttcttcgaagaagcaaccttctctgttagatgaacactttgaagctgtatcagatgatgacgagaacagtgattctgatgcatcacagccttcagatgacgaggccgacgatggagacgcaactaggccaagcaagaaagcgagaactccgaagttagtgtcttttgactgcattccaggatctacatttgacacattctatcttgattcttttgttttctgatgtggatgatttggtgtcaggttgtatgaagtgaaagatgagcggcatgccgcagcttatcacaaccgcacttcactggctaaagaagatagtcttcctatgggcgagcgtgtcaaggctatagagaaccggcgtggcaactttggaggctcgaaagatatcaaattcggtcctggaggatcacgggagttttctttcaaggcgagagggtcatcaaagtacaaagaagatagagacgatgagtatgaagatgggcaaagaaacaagaggagaggagttcagtctcttggactgaaatcaacaaatattagaggcggtttcagaggtagaggaggtggtggttttagagggagaggaggcggcggttcccggggaaaaggtggccgtggtggtgggcgtggaagaggccggcaatgataaatgtagcttttcaggggctttattagatttgaaaaatgtgtcacctactattgagaatcttgaaacttaattgatcacatatacaattttggaatatttttgacctggtcttcaatcagcacaacagaatttgcttacttgaggctaaaggtaattgattggaaagaggatgacctaaagttgaccctagttcgataatgatttatcaatccgcatgataaatcaccgaccgagggttgttaatagctaaattaacaaagctaacattgatttaataaagtaattaaagaagatgcttctggtttttttttttgggaggtcaacaaataaataaaatgcttatgtatatgcttacaacatgagaattgcttatgtatatgcttacaacatccaagtgtttgggactaggaagacgcctgaatctgatttacacgcgtcttccacaatttcttcaggctgagtcatctttcaatatgtaaactctaatacttaatacatgtaatattcttctttaattttttatatagccagtctacttgtgactagaccttgttcacccgtgggacataggctttggcatgtgtcgacctacgtcctcagatccaaacattcttctttatagtacaagtcgtataacacttataatatagtttgcgaatttttaaagttttggttgtataatagtatagtttgttaatttatacttaaccatagagattgatatattgaattgtatatatccgcattatatatacgttggacaataatattctacctaagttcagaacaatcctaaccaaagcagcttccaagcatctagagaaaacagaatctacaatacttgtccttagtaagcaaaaatg

SEQ ID NO: 14381 - DNA, 3000 bp, Unknown
  misc_feature (1)..( 3000): cDNA_ID_3016635_gDNA_ID_2684113_Annot_ID_190702 3000 nt of promoter + ATG
aatagaaacaccctaaactctcatcgttcttttcaaaaaactatgttggatcagtatccatgttttatgaaactaagaactttcttactttgatgtttgagtcttggctttatcttggtgatgatgatttaactccaaagtgttggcatgtttcaggcaattcttagctgctgttttgaacgtcgataagactggaaggtttatcaagtatgatagatcaagcaagaaagcgacagtcttattacaaggccttgcatttgcaaacggcgttgcactaagcaaagaccggtcttttgtattggtagtcgaaacaactacttgcaagattctaagactttggctctctggtccaaacgcaggaacacaccaagtgtttgctgagcttccgggtttccctgacaacatcagaagaaactcgaatggagaattctgggtcgctttacactcaaagaaaggtcttttcgcgaaactatcacttactcaaacttggttcagggatttggtgcttagacttccgatcagtccccaacgcctgcactcgctgttcactggaggaatacctcatgctacagccataaagctgagtgaatcaggtaaggttttggaggtacttgaggataaggaaggaaagacattgaggtttataagtgaagtggaagagaaagacggcaagctttggattggttctgttctcgtgccttttcttggtgtctatgatttgtagtttcctactttgctcagacttaattgtctttgcatggatatgagtttaaatgtgtattacgttgtcacaactatgtgcacgttaattctatttctgctgtttgtttttgacgtccatgtgtatacttttaagtttaaaaaaggtgtctgtactggtactgtttattacatatatggtaatcatatggtgacattttaaaggtgtcaattgtcaaatcatctaatctaaaatgtcagaaacgtacacgtagtttggtacattgtctttgtttagatcagactctcattcataaaataatccaccttactagcgtatatagcagatatagttaaatctgttttgtatgttgataaactgcttgatataacgaattgttatatggaagattcaaaattgatgatcctatgataaagatcaacatggatacaagacacgttttttcttgcgatagtacttatatctgacgtcagtaatagtcgtggtggctatgtcagaagaggacacatctgtgactcatgttatgtggtcgagaatgaagtctcgtgaaattgtatttacactttgttgtcatgtagggtttgactttacttagtcggcaacgtatatatccgatttattttattttcttcaaactggaagcttttagaccaaaatttaaactaattttctgaaccacagaaatccaatctttttttgtcactgaaagcggttataatcataaatgtccaaaatgtgatttgtttttgaaatagttaaaaggaagtgaatttctaattaaccttaatccacgtaaaaactttatatacctcaaacaaaatcccagcacaacgaggttaaaatcaaatatagccagcttcaattttaatttattctaaaatgtcgaagggtccggaaagcagtcaaattgtcgcacattcatatttacgttaattagagaagtcgcttcttactcacgtttctcgttccaaacacaatcttttcatgtttctcttttaatttgaccgtcattttttatgatgtgaaatattaattgcgcgaatacttcaaacgtacatctgtgatctgtccgtcattttccttcacgttacgataagtttcaatctaaaaactaacatcgtcgccttcgttgaatcaatgcatggattcgtcgcagcatttattctttattagacaactggcccttcaagcgaaatgagggatacgtgtatatatatgcatccacataaacaataagaaaaatataacccttatttttggatgttatataaaattgctttacctatatgtgagctagcaacatttactcatacataccaacagtcaacaatatctcttgttccggcggaaaaatgcccattaatcagaaaattccgacttggtttgccgttccggctgtttttgctgtcttgtccgtaatctcgtatcaaaccttaattgtgccggaaaatttagagggcgccaaaaatgtattgacaatggctaagaccataccaattcctgtcgctggaccggagagcattgagtttgacccaaaaggagaaggtccttatgctgcggtcgtggacggccgtattctcaagtggcgcggcgatgatctcggctgggttgattttgcctacacatctcctcacaggtttttatttaaaatatttacaacgtcttttgtcatcgtacatcgacacataatttatctaaaccaaataccaaataagttgatgaaaagtacccgagagatctgggaactcttgtgttgtgtagtaagaatattaataagttatgagagtaaagaacaaataatatgtttgtttctgttttccaagattttttgcagtgaatcagcctgagttttataatttgattttaaagtttgaatatctaaatattcttgtgcaaacattctgtggatccgtcccaattagttccaacgttttatattttatatctccttttttttttgcatattaacgaaaaagggaaacttaaatttattttgctatacaattcaatgaagaattccacactcataaggagatagatttgtgtcagccaaatccttgtggcttgtcaactggtcacctgatatgtattgtttatgtaggcttttctgaaaaaatcaaataagtaaattaactaatgatactttataaccttgttgtatatgaagagggaactgttcaaaaactgaagtagtgcctacttgtggaaggccattaggacttactttcgagaagaaaacgggagatttgtacatatgtgatggttacttggggctcatg

SEQ ID NO: 14382 - DNA, 3000 bp, Unknown
  misc_feature (1)..( 3000): cDNA_ID_3016646_gDNA_ID_2684113_Annot_ID_190699 3000 nt of promoter + ATG
attggttattgttacaataattacgaagatttaaagtgggacaaaaaaaaagttaaataataaaacgtatataataaaaattcaataataatgaaattaaaagacctaattaactgaaatgaaccaaacaaaactagggtacagttaagaaaaccaaagatttcttaaaaacagaaagagaactaaaaaacgtatcaactgaattgtttttaatttaaagtgtaacagtttaattattttctcgtttaattcaatttggcaattatttggacttcaaatcaaaatcaaaatgattaataattattttacaagaatatctgattgacaagctgttaaagtacaaagtaaataagtgaggacttccaacgaaatcttttcacaaacggcgtcgtttaagccgaaactgtgattacctaccttgtccgtggactggaccaagatccaattcttctggtccaagtacaaataggacggcatggccgtgagattgagcgagggtcaagagctaattttggttgttttcgaggttcaagtggaaatcaaatttttcgtagagagaaataaacgaaaatatacagttttttttggttctgctatagtcatattttacactcaaaatattttttacagataatttaaggtagttcccctactacctaagtatattttttgattcttaatcacaggaacatctctttcttttactttatattacgtttgaataaaatagtggagtcaaaatttcaaacgaaaagttataaactcgatagtagataaacaatgtgtatcacaacaacatagcttaaagtagttcctaccattagagcagtagagaggaaaacaaaggaccttataatcattcttttatataatattccaatttgttgctaatgcctcgcagattcttgagatacagtaggctgcgctcaatggatactctgaaactgcataaatcaagaaacttctttcagattttttgtttccttcatttaaaaactttttttttgttttcccttaacaaaagtatgaatgaaggaagaagatttacccgacacaaattcatcgatatagttgcagtctattttcccgtgtgccattgcgcctacctgaaatggtgagacaaataaggtgtgggtttgcataagaccgatatatggaggttgcaagctaaagcctattactacgtaaattaaatggactttgtgaagaagctagagactagagagaaacatttggagagcactaaccacaaaaactgtgtctctatcatcatcacatacagtagctaggtgtttctgcatattgacgagtttctcagagctatgcgagaagcctgatataagaaagagacaatccctctttttagctcacataatctggataaacaacaaaatgtaggaggaaactaaagttttttttttgtttttacctattctgtgggagttaaccggtagatgatgttcttcgatagggttcttgacacaccgtagaagcttctcacggctgttaactgcagtaatgctcagcttttgtagcagttgcactgcaagaccaacaaataggataagagacagtaaaaactgaggaggttaaagtaacaaaatatcagaaaggatgagaggaaagttggacaactaacacatgattccggcaaatcgtttgaaagttcttggtatacgaacatgtggcttaacttcaaaaaggacacctttttctgttctaacataaacagctttcaacctcccagctttattaaccggactatccaaaatcataagaagcgcctgaagagggagatccactaaagatgagtcacaatttgttataagctacctagatatgacataacagtttttaagaccctgacctgatgagtaatgtctggtcggtaatcagccggatttctgttattctttttcaagaaattagcatgatcatccgagttcagtagctggtaagtctgcacacaatcagtaatcacatatattagtaccataaacaaactccgaggcttactgtaatgcaaacattcctgcagattacctttccaactttggcaacttcaagagaggccttctcaagcacgaatacaatgccagacttttccttgttaggagcattaaggacaataggtatccctcccacaatatcctctgctgctgcagttgcttccacagttacttcctcctcgtcattatcttcctctgctcttgaagtgctttcttttttagctttcttcgaactttctcttgccttttgtttttgctcaaactttggttgctcctctacttcatcttcttccttatcatacctctcttctctctcctttctcttgttcactttaatcccatacggcctcaccatcttccttcaaaaatttctacacacaaatttaagtcaatcacaacaccacagagctaaagaatcagatgctaaagaaatatactacagtgtcgatgaattcatacaaaaactaatcaaatttctttaaggttatcgctactacagagaatcaactcaatcaatcacagttcagtagagcttaaattcgaaattaaatcgaacccttttatgaaagacagctaaaagagaaaataatcgcttaccggaactttttgagcttgcgaagaaattcaagtgagcaggcgactgaatcctgataaaccctaattcgaagttaaaggtaggcgtttttttattttttgttttttgtattgtttcacacagattatataatcgtttaagggcttattgtagtaaaataggcccattaagttttagggtttttaaaaggcccagaaaaagaaaaagagaccaagaaacctagaattgtgaccatcgacgtcgacttttgttctgccggagagcacgaccgccttatgtattacaagtggtgtttcttttcatttttatttttggcttcaatttttgcgttttctctgcaactcgccgtcaagggtagaagaattaggggttcctgttcttaactgcttgaagatg

SEQ ID NO: 14383 - DNA, 3000 bp, Unknown
  misc_feature (1)..( 3000): cDNA_ID_3016578_gDNA_ID_2684113_Annot_ID_190719 3000 nt of promoter + ATG
agaacttttccattagttacttgtaagccctcgtgatatttttttttgccttgttgaattcttttcttctttgttgttagttgttccaactgcttctatcttgcttttcaggatatcttctttaacatggcggttactcgccacaattttaggctctttatcaagtctgtattatagccttgcccaattcttctatttactttcaagttttctgattttttcatgggtgcacatcgcatcgaggagggtactcaagaatacatggatcaacttcaggatacgtagttgtcagatcttatattggccaatcttccttgaagagattgacatgatgtaagttcaaccgtatacccaaattttcttctttagttagatttgtaaactttttctgtttgcccttggctcaaaattgcatcttcatatttttttttctaacaacaactgcttacctactaatcttgggaaataaaaaaagtttaattctagatacctttatgcaatgcatttgtcatttttctgagaagtttcacacgattattaatttatgacaattcttctgggtttctcaaggtccatatcctgtgtgaaacatgcagaggaagctgcactgcaaagacattctacatggtcggccatggctgttgatcttgttttggggaacttgattggtctaggtctactgtttaacaccgaatctgtctgctcatttgtattcgactttgcaaaggagtttacgaatggtattttgcggtctggtagtgtgtggttgatgggagttccagcgggttttaagttaaatacagaattggctggagttttgggcatggtatctcttaatgtaatacagatatggtctactctctgggtcttcatggcttctttcatcttttgtttgataagagtaattgccatccttggaattacttttggtgccacagtatctgccgcatttgtcatagatgtcattacttttgcaacacttcatataatggctcttcactgggcaatcacacttgtgtattctcaccaaatccaagccttagcagctttgtggaggcttttcaggtaaatcttgagtattaaattagatgagttcattcattaagctgataactaacatctggtgaatcggtttcttggttttcttaaatctaaaaggaggagacatgcaatacgttttccgtttcctttttaaacttcttgaattcaatgaaaatactaaagtattgttatatcttcttactggtgaaccatttttgttcacctcagttccttacttaaagtaaccttaccttgaattcttctttgttcttccagagggcgaaaattgaatcctctacgtcaaagaatggacagctatggttacactgtgaagcaacatgtagtgggatctcttctgttcactcctcttctgcttctcttgccaacaacatcagttttctacatctttttcaccattacgagcactacaataaactccatatgtatgttgattgaatttgccatctccgtcatccatgcaacaccatatgcagaggttatgatttggcttgttaggcgtaaaagattcccctgtggtgtttggtttgaaatggaacactgtggagagcatatccttaaatccaatgatgccttcgaagactccaaaagtctactagaagaacacggtactcctgagaagaattctctaatggtttccaatcttcgcagcaattttctaaccttaggtaaacttgtagattgttccaagtctaatgacaagttaatctagatgatctgttatgcttttgtttggtattcaatttttgctgacatttatattgaacaaattgcaggacagattcttttgcctcactataaaacaattttttcaggaatatcagcttcttctctgacaacatcagctcgcggagtcctcagtgggaagaggtgattttatatgatcttgatcacaaaatttaagtcattctctctctctctctctctattcaaaatcatttaccttctctcgtcttttccagaatgccatcaaaactggggcttgatcttcctcctccgaggccatggctccacatgccattgagacagtactggatgctatgccataattccatcagctcatgtggcaaatgatgacttctccagctgatctcttagcgttttaatttaactccacaagacaatgagataactaggggagtaaggggtgagaatcgttaacattggaaaacatggattcctttttcaatatttgtggccctttttacttgatttgttcatcagccttgtctctggtttaactatgtaaaaatcttttgatttgatctatgaaaaacaaattatatgaaattaatgatgattttttctagtgaaattatattgctgatgaaatttggttgcatgtcaaaatgtaaataatttaattaaatattctgttgtttttctgattttcttaaaaagttgaggaatatgaaaagtaaaaaaaaaaaaatgtggtaagattctttttttttcttgaatataattgcttttgtgaatttacggaaaagaaagtttttaaaaattaagttaaatacaagaaaagtgagaaaataaatttaaagtttgaaaaataaataaatgtaattaatatctaaaaattaaaaatccttccaaattaaattaatgtaattaaaatagtcaaagataaatgtaacaatatcttcttatagggcttaccaaaaaaatatcttcttatagggaatagaatctggattcacttcccaaaagcaaaagttaaaaaaaaaaatcaagaaaatatttaggatatacatttaaaacataaaaaaagttgactaagatataatttgataggataaccgttagaaaatacctttaaaaagagtaaacctaattcgcctacaaataaaaatgcgcttttccttttcctctttcttctcactttttttctctgttgcatcatcttccaaactcccgaagaagaagaaaataactacaatg

SEQ ID NO: 14384 - DNA, 3000 bp, Unknown
  misc_feature (1)..( 3000): cDNA_ID_3016588_gDNA_ID_2684113_Annot_ID_190715 3000 nt of promoter + ATG
atatttactttgaagtttgaactatgaaaggtctttaaactggtattcacttcacgaatgataatattcaaacgaattgaacttgtatgaaagtccaattaaaggttttatcgggtatatggacctcgtttatttgggcactaaacgaattgaacttgtataaaagcccaattaaaatcaaagaaacccaactcaagcccaataagggattaccttcaagcttccagtgtcatcactgtcgcctaaaaccctaaaaaaccctagtcctttataaattaccaatcagtcgtctcctctttttccgctacaacttttaacgcctcctcctccatttttcaaaaccctaatccgaccggagccatggcggaggtcgacatctcacactcgaagaagaagaagcaagacaaaacggagaacgatgccgccgacaccggagactacatgatcaagccacagagtttcactccagccatcgacacttctcagtggcccatcctcctcaagaactacgaccgcctcaacgtccgtaccggtcactacactccaatcagcgccggtcactctcctctgaaacgtcctcttcaagagtatatcaggtacggtgtcatcaatctcgataaacccgcgaacccttcttctcacgaggtcgttgcttggattaagcgtatcctccgtgttgagaaaaccggtcacagtggtactcttgacccaaaagtcactggaaacctcattgtctgtattgaccgagccacacggcttgtgaaatcgcagcaaggtgcgggtaaagagtacgtttgtgttgctcggcttcactcagctgtccctgatgttgctaaagtagctagagctcttgaatcgctcactggagctgtgtttcagaggcctcctttgatctctgctgttaaaagacagcttaggattaggacaatctatgaaagcaagctgcttgagtatgatgctgataggcatttggttgttttctgggtttcttgtgaggcgggtacttacattaggactatgtgtgttcacttgggtttacttcttggggttggtgggcatatgcaggagcttaggagggttaggtctgggattttgggtgagaataataacatggttactatgcatgatgtgatggatgcccaatttgtgtatgacaactccagagatgagtcttatcttaggagggtgattatgcctcttgagatgatattgacgagttacaagagacttgttgtcaaggattctgctgtgaatgctatctgttatggtgctaagttgatgattcctgggttgttgagattcgagaatgacattgatgttggtactgaagtcgttcttatgactaccaagggtgaggcgattgccgttgggattgctgagatgacaacatctgtgatggctacttgtgatcatggtgtggtagctaagatcaagcgtgtggtgatggatagagatacctacccgaggaagtggggattgggaccaagggcttctatgaagaagaagcttattgctgatgggaaattggataagcatgggaagcctaatgagaagactccggttgagtggagcaggaatgtggttttgcctaccggtggagatgctataattgctggtgctgctgctgctcctgaggagataaaggctgacgctgagaatggagaagcaggggaagcgcgtaagcgtaagcatgatgatagcagtgatagccctgctcctgtaacaaccaagaaatctaaaaccaaagaagttgaaggagaagaggctgaagagaaggtgaagtcttctaagaagaagaagaagaaggataaggaagaggagaaagaagaggaagccgggtctgagaagaaggaaaagaagaagaagaaagataagaaggaggaggttatagaagaggtagcttcaccaaagtctgagaagaagaagaaaaagaagagcaaagacaccgaagctgctgttgacgcagaagatgaatcagcagcagagaagagtgagaagaaaaagaaaaagaaggataagaagaagaagaacaaagacagtgaggatgatgaggaatgagatgggtttgcgttatggtgctttttaagttttgaactcttttgattttgcggtatctatctactctggaacaaagtgagacaaaaggcattttatgcttgtattctacgtctcgcttacgttaccagattttatgtttttgtaaggttagtttcagttctaagcagattctccctttagttatatgactgtggtctctctctctgtttttggtctttgcccttcttgtctgtctgtttgtctgtttggcaacgaggataataatagacctaaatcagtattaaaagttacgggtttttaactttcaacaaacgggccttagccctgaccaaaaaatgggcctgattacgagaactcagtcctttgttgtctgtcgctgggtctagagatgattatctcggataataccgaacttatttaatacgaaccagagatgtttgaattcaacggttttatattcgtcgagtttcaaaaaacagagactatttgtgcaaaaagacaattttttattcttttgcaatttgtcgtgttcgcgagtttatgttcccaaaattagaaagtccaaagattagcttgggtcttacttagatcgccaattttgtctcatagcaaaaatgaatctcaggtttcatttaaatgaatttcctctgttcttcgctaaaaacgaaatcttgaagtcctctattatacatcggaatcttttctttttctatgttatcttgcagatccctatgcctcccatcacttgctgtctcatctttctcaatttcattcctcggtgggttagcgatatctccttctcttctctaatgggtttgaaaaaatcgattttttgattcatctgattctggtcttacagacaaaattggcatctgggttcgattctttgtgtccgtcgtaaaaaccagtgattaggttctcgtcttcgagtcggagacaatg

SEQ ID NO: 14385 - DNA, 3000 bp, Unknown
  misc_feature (1)..( 3000): cDNA_ID_3016612_gDNA_ID_2684113_Annot_ID_190708 3000 nt of promoter + ATG
atcttcaaggagtttttgccttgtgcaattcaacttcttcccatgttgtttatgtgtagtccaattagtgttatttttaattaagatgtggtccaattagctgttctttttctaaaccgtataacataataatacgtgattcaaatacattaacataatgcaaaaatgtaacagcaaattcattaaaaacaaaaaatgtaacagcaaagcaccatactttctctcgtggggattagaatatacagctttcattacaaagactagtcaactaaatcgtaccagctaactgcaaaacatcatcttaggaaatagaaaaaggtatgtgtagatcaatcaaaatgaataaaatgtttgattatgaataaaaatgaataaggaagagttcaatgagatgatgatattaaattatggtagaagaaaagttaataacaggtcagatatagaaactttccgtaaagtcaaggatttaaattattcacgtgaatactctgtctaggtcctatcttgaaatttatcattcaaacctttaatattatctatatgtttttactttaaaattaaattttaatatatgtagatataaaaattaatatttttaatttatatattcttaatatttatatctagatagagtcatatcaaaacattttgtttgaatgcaaatttcaaaagataaattttggaataaacattttcaaagacgtaaattaaaaaagcaatttagaaataaagcattgcaaaaataaattcaactaaaatttagatgtagatgtatattgtgaacccccaaaattaattataaaatcttttggaactgacatgtcaatatttgtttgattgatcaaccttttttctcctccaatcttcgtttagttctaataaaaatatcataaagaattaaagattgcagttatgaagataatgacatttttctttaatattttatttttcttcattattttaaaaacgtttggctcaatttatagacagtgaaggaaagttcttggaatttggttcttcttctatacataagctttggttacacaatcaaaatcaaatcgagaactgttgttgtgtccgaaaatcaacatcaacatcgtttctttcttctgccattaaatttcaccatcttccaccttcaactgccctagacagctattctccacctttctcttttctctctctgttctctatcattcccagagataaccaaacaatctcagaagaaaccagaaagagcaaagaaactaaaaactattattcattaaagtcagtgtttttaaattcgatttcgtaatgggttcttctgcttcaaagaccgcttcttccgtttcttctgcttcttcctcatctgcgttttctccaccgccgaccaaattcagctccgattcatcttcaccggcggtgcagagagctttttcgtttccgacgccgttggttcaccatcctccggcgagaaaaggcgactctcatcaccttgtttcccttacatctacatcgtacggttctcttctcctccttgatctcgatggatccaaaaactcctcttccgaccaacaaacgctgcctcgtatctcaatctccgggaagaacacaccagatccggtctctcctgattcagtcataaacacttgggagcttatggatggcttggacgatgaattcgaattcgaaattcccaaaccgggtaagcgtctaaattcggatttttgctctaaacccgacccgaatcggaatgtgagtttaaatgggtcttcgttgaaattggatgaatcttacgagattgtgagaatcgaagaagacgatggagattgggttcctttgacttataaacctaagcaacctttgtggaagcatttgtctgaagaatcatttctctctgatttagatcccagcattgtctcatcctacaagaaagctttgtcttctaagctattaagcaatcatagtaatactagaaaccctcatagacccacaaagtctctctcttgtagcccatcatcaaatccatccatcttaataagcgaagaaccaaaatctgtatcctctagtcaattgatttcatcaccagccaaaccgagattaccaggaacagaagacaagattgtactctacttcacaaccctcagaggaattcgaaagacatacgaggattgttgttgcgttagagcgatattgagaggagttcaagtgtccgtagacgaacgtgacatctctatggattccaaatacaggaaagagcttcaaagcgtgcttggcgccgcagagaaaccggtttgtttgcctcaggtgtttatcagaggaactcacattggtggcgtggaggagattatgcagctaaatgatggtggtgaattagcagagatgttgaaagatttccctgcttgtgaacgcttggggacatgccggagctgtggtgatgcaaggtttgtgccttgtactaactgtgatggtagcaccaaagtgtttgaagaacaagatgaacggtttaagcggtgtcctaaatgcaatgagaatggattggtgcgttgtcgtgtgtgttgtctctaagtgatcagtttgatcaaaagatgtgtgtgagaaaggggatatagattgattgactaaacatggtatttggttagtaatgtatattcaaataagtaagttggctcaagccttttattatttactcttatgagttgtgttcttttgttccatttacgctcttgaccttttgaactaaatgattcttactatatgaagtacatcaaatggtagatgatgattgataattcgcataatagccgaatgatttgctttgtttgcaaggtattttttatcaatgaaaaatatgtgcaacattaccacaaatgtagtttgattgattgatgtcacctgctcgctcacctatattagctttcttccttctgttcttaaatcctaaaacgacaacgtttagtctccctttaaatcccatcactggactcgacgacttttgctcagataagggagacaaaa

SEQ ID NO: 14386 - DNA, 3000 bp, Unknown
  misc_feature (1)..( 3000): cDNA_ID_3016619_gDNA_ID_2684113_Annot_ID_190706 3000 nt of promoter + ATG
gaaaggtggagaatagctgtctagggcagttgaaggtggaagatggtgaaatttaatggcagaagaaagaaacgatgttgatgttgattttcggacacaacaacagttctcgatttgattttgattgtgtaaccaaagcttatgtatagaagaagaaccaaattccaagaactttccttcactgtctataaattgagccaaacgtttttaaaataatgaagaaaaataaaatattaaagaaaaatgtcattatcttcataactgcaatctttaattctttatgatatttttattagaactaaacgaagattggaggagaaaaaaggttgatcaatcaaacaaatattgacatgtcagttccaaaagattttataattaattttgggggttcacaatatacatctacatctaaattttagttgaatttatttttgcaatgctttatttctaaattgcttttttaatttacgtctttgaaaatgtttattccaaaatttatcttttgaaatttgcattcaaacaaaatgttttgatatgactctatctagatataaatattaagaatatataaattaaaaatattaatttttatatctacatatattaaaatttaattttaaagtaaaaacatatagataatattaaaggtttgaatgataaatttcaagataggacctagacagagtattcacgtgaataatttaaatccttgactttacggaaagtttctatatctgacctgttattaacttttcttctaccataatttaatatcatcatctcattgaactcttccttattcatttttattcataatcaaacattttattcattttgattgatctacacatacctttttctatttcctaagatgatgttttgcagttagctggtacgatttagttgactagtctttgtaatgaaagctgtatattctaatccccacgagagaaagtatggtgctttgctgttacattttttgtttttaatgaatttgctgttacatttttgcattatgttaatgtatttgaatcacgtattattatgttatacggtttagaaaaagaacagctaattggaccacatcttaattaaaaataacactaattggactacacataaacaacatgggaagaagttgaattgcacaaggcaaaaactccttgaagattctttattatttttggtactttgttctttgtcttttactcttttcaataagggaagaggaaagattcgaaattcagaacctaacactacaaagactaaatatgatataaggaagatatgcataagacaaaaagctaatataagaggaaagctcaatagttttagaggtggatcttgacagataaaaatgtttggttcttcattgaatatttgaatgtaatagatttctttgacgccaatgagctaaatatatacaaagtaaattcaaagggaaaaatcattttctcttgtgtgatcttccaagcagaagaggctaaaaaagatttcttgaaattgatagaaactcaattgtttcagcaacattttttcacaagtatgaggtcacatatgttctggaattctacaaactatatactatacacatatactgctgctctgctctctctctacctctctctgtctgtcaaaatgtttcatagttaagaaccttgccagcgtaccaacagaagatatgatagaaccttacttgtgtactctgcgcatttactgctgtaaaagcccttcctgaattcagaaaggcctgaatgcaaaacaatgactagtaagctaaggagaaaaactaaaacaaaaggtaatcttcaggattataaaacatgcttccaggaatgttttggtactgaagctaagaaggtattatcacctatgaactgttttccagacaatcacttaagcatatggatcatatcatcaatgctgatgtacttatgtagagaggagataaattatctgagcatgtgaatgatcctgaggatacttgtatcgacacaaaaaccagctactatgagagataaactcaagcagctgagcaaaaggaaacgagcattatatgcatcccagagttgctgatcagaacaaatacaaccaaattggagttgagaaatctcgatttttgttcatgggccattaacaagcatcattaacataacaacatccatgcgaatccataagatatgtatagtttcatatacgaagccgaactttagttacacatacacacactgagtgactgagacatatatcaatcacttccaccaaaaattgttcccttttcgaccaaaatgatctatctttatcctctataaactcaaactattatcaatttcagagtttgtagggaaatttgaagcgactctaatctaaaacaacagagcaaaacaaaaaaaaacgtaaaatttggggaagagaagaacatatacgcacagaaggagagctaaggatctcgaattcaatcatccgacgtggaaaggaccaatatctccgtttctcagagaaccagcgatctcatcagcgatagccacgcaagtgaaaacccaaccactcagagaaaaccaaaccattctcatcagatacatcgccatgcccagcggcatcgccatctcaaagcttttctgcttctttctctctctttcgtcagatcaaatgattggccggcgaagccattagagtggccaaaagcttggggaaaaaaaaatcaaagatgattcggtaggttcaaggatcttccaaccatttagattcggccacgtcttcgtcgtatttattcaccagccgacggagactcataattaaattcgagggcccacatgaagataaaataattaggatccgacccggttttgtatccggaacccgacccgataggatgatccatggattcccgctccgttgcctttttcgatttcattttgaaattgaaattccccaaaaggtagattcttctttctctctctctcctctgagcaacgtctctctctctctctagaaaaaatg

SEQ ID NO: 14387 - DNA, 3000 bp, Unknown
  misc_feature (1)..( 3000): cDNA_ID_3016627_gDNA_ID_2684113_Annot_ID_190704 3000 nt of promoter + ATG
tagtcgactcgtcggtgtgtgtatgaaccacacgattacgtagttacgtcaatattactaatttaattagcttaatgagctttatggtcttgatacggtgaaccaaacctcggccataattttaaacgatacagcagcgatataactttcacatgttttgagaattttattaaatgagaccaatcttttattttgtttatataacgttaagtagatcagtttagacaatttaatgttttttataattaatatttccttgttcccgttgacccacattatcatatactatatgatttcatattttaaccatatatagaaagtacgtgtattattacaatttatttaaattggttttatagagtaataatttacaccaaaaaaatgcttcagtctattacatttttttggggctctttatgaactttatgtgactacctgatcatgaatacccaaataaaaatatatagatcaacatttgtcgaagaaaaaaaagagagatcaacatctataaattttactcattcgttttggactcttgaaaaatgacaacaacgcattaacattaaaatttcatgtgtgtaattcgtgttcgaataaaagcaattaaaaatggacgggaaagtgttatcaaatataatattgtatgtttatagcgggaattgaaaaaaagaaaaacctaatcacaaagtgagactttttgtttaattatctaattatacatatatatagagggagagataattcatcttgtctggtctgaagagataatacactttatttaggttagttcacttttttttttttaatgaaatttttagaaaaatatggagatgtacatgcatgtaatgatgtaaatgtaaaaacaacacgtttaaatgaattaactaattacaaagagagacatgatatatccatagattcggattttcttagatccatggaaacatcatgcatggatcacatcacatggacttaatgttatcatgtggtaggtttgcgagactttgttttgcttgatatattcacaacgattggaagatatttgtaacatcagcaaggactcaccaccaaggagcttgagttggattaataaacaacaacaaaaagaacaccagtggtggttacttagagagattgaaacaataatagatccttatctttcactttttaatttccattattggtattaataagaaaaagaataccattattgatgtttgcattctttcatagaaaggctatatatgattataggcttctagctacaaactttcttcctctcataatatcaggtaacaggttccctatctgattagccttcctttcttgtcgtcgatttccattctcctgtgtcataagaaaagatgcagattgatacatatgtcgacaactttataaattttcttaatactataatcgattaatgtaagtgtgtttggtattatgatatactccctctattccaagttatttgatgttttagtgttttttttttgttccaccgagattgatattttgtaaaaatataattattaattttgtttgtagccaatagtgaaaagaaagaaataatagtaatattattaaactaacaaaaaataattaaaaaatagaaaaattattttttcttaatttatgtccaaaacttaaaatatcaaacttcatgaaacagtaggagtataagactattctcattcacatcaatgttaattatttaggttttatcatttgttccattatattattttagagagaaaaaggtagacagaattgggataatatacttaactcgtgtactgaacaaaatagatgagtacatacaaaattgtagttagaagttagaacttcaactaattaataattactaggaaaaatacaagagaagttgcaactcattagttccaaattttatatatattgcatgcctattataatctaattaaatatttagattctaaattttgctagccataacaatacacgtataaactcttcagtccttactgagttttttacccgtttcactaagcaaataacgttcattaaatatacaaatattgtatagttaagtgtacgaaatcgtgaacatgcaatactcatttcccttacttcgttaacttgaaaatgtaacgctattcattcatttctgctttcgagatttgtgccaacaaatttcaagatttaatatcagaataatattgattaaactcaacacttaatacaaatgcccttacagttgctgctaggccatattcaagatacgggaagtgtctctccgatggagtacagagccacattattgacacaccaaatcccttttgcttttcttgtttttcctttgccagcaaatcttttattattttatctatcgcgtgagtttatatttcatgtaacgtatcatttaattcataaaggttgtatgattgtgttcctatataagatcttttaattatcaagctagttaactcattttaaaccattagtgacatttctcttggtttttactataagaaatatcaattatgattttaaaaagggaagtcaatgtatttgtatcatttgttctcccattttttttatttttgaagaatctatctaatttctgaaattttcttatgttcagacaaaattttacataaaataccatttcgtaaagaaatggctcaagattactatgttctaaattgggcataatctcaacagaaactggttgcttaaaacattatatgttctaaattgggccggcaaatgggcttcaataaagtccattaacatgttagtttcgtattcttcatttcaatcttttctggggataattgatctcttaacaactaattaggctaaatctgaattaaacaacaattataaggaagtttctctaatttctctaaccttaagacttttctccaaagaagagagaaacaaaagtaaagaagctctcgtaacagtagaagcagagtgcaaatctcactgactactaccaaggcaccaatcaccatg

SEQ ID NO: 14388 - DNA, 3000 bp, Unknown
  misc_feature (1)..( 3000): cDNA_ID_3016652_gDNA_ID_2684113_Annot_ID_190697 3000 nt of promoter + ATG
acattgatttaataaagtaattaaagaagatgcttctggtttttttttttgggaggtcaacaaataaataaaatgcttatgtatatgcttacaacatgagaattgcttatgtatatgcttacaacatccaagtgtttgggactaggaagacgcctgaatctgatttacacgcgtcttccacaatttcttcaggctgagtcatctttcaatatgtaaactctaatacttaatacatgtaatattcttctttaattttttatatagccagtctacttgtgactagaccttgttcacccgtgggacataggctttggcatgtgtcgacctacgtcctcagatccaaacattcttctttatagtacaagtcgtataacacttataatatagtttgcgaatttttaaagttttggttgtataatagtatagtttgttaatttatacttaaccatagagattgatatattgaattgtatatatccgcattatatatacgttggacaataatattctacctaagttcagaacaatcctaaccaaagcagcttccaagcatctagagaaaacagaatctacaatacttgtccttagtaagcaaaaatgtgtgcattagtacctccattgtttccaaactttgggtggccatcaacgggagagtacgacagctactacctcgccggagatatcctcaacaacggcgggtttcttgattttccggtaccggaggagacttatggagctgttacagcggtgactcaacatcagaatagctttggtgtttctgtttcgtcggagggaaatgaaatagacaacaatccggtggtcgtcaagaagcttaatcacaatgctagtgagcgtgaccgtcgcaggaaaattaactctttgttctcatctctccgttcatgtcttcctgcctctggccaatcggtaagaagctactccgactcattgattagacccgttatagtttatgcatctatacaatttagaagaagaatactgcgttaaaccttttttctttcctttcttgcagaagaagctaagcattcctgcgacggtttctcgaagcttgaagtacataccagagctgcaagagcaagtgaagaagctaataaaaaagaaggaagagctcttggtgcaaatttcaggtcaaagaaacactgaatgttacgttaagcagccaccaaaggccgtcgcgaattatatctcgaccgtttctgcgactaggcttggtgacaacgaagtgatggtccaaatctcatcgtccaagattcataacttttcgatatctaatgttttaagtgggttagaagaagataggtttgttcttgtggacatgtcatcttcaaggtctcaaggagaaaggcttttctacactttgcatttacaagtggagaagattgaaaattacaagctgaattgcgaagagttaagtcagaggatgttgtacttgtatgaggaatgtggaaactcatatatatgagaatttggtcttgtttctttatagttatgttatgtcgtcctttttctcttcgaaatctaacattcttgacaaagcgttgtagtcgagttgtttcgtttttttggtcgaagtcaatgatcgattagttatgctattaagtataaactgattattatgaagttcatgttacagctataaactttaattttcgcctagactttgaatgttactaataaaaaatttgtttatgtatatcttgttatttatatccagttaagactagagttagtgatgttttggtgtatcaatagaatataaaaacgagaaaagacaaaagagggtattttattaacaactactatatatcactacttgtgggcaacattatagtaaagagtctatgggctccaatttagaagataagttatgtaattaagccaagttgcacttatgaattaatagattgtggtgacattaaagagttaattaagatttattaggataaatgataaatgagaagccatgtggttatccattgatcctttttttgtcaaagggttatccattgatcttggagttattatatactagaggcagtttttttaatcagagtggcatcacagaaaaaagtttggagtattggttttgaaagagttaaatctttggatttttagtttatgtttgtttaaaaaaagaagaagaaatgtattggtttacttggcttggttataaaatatatgagatcgaataaggatatgaatttacatgatgataactgtagctttcggagattatcatattagcttagaaaatgtgagtcacgaaacgaatgttggaaacttcattgattcacaatcacatatacaattttggaatatttttgatccattcgtgaaagaataactaaatcagaaaatatattactttagacacaaatgggatcaagttgacattagaatataaaatgaccatcgtcattgtggaattaaaataaccaggttacatttattttagataaagatattaaattttgaaatgcttatgtatatgcttacaacatgaaaatgctagtttatgcttacaacataaaaaatgtatgggacgaggaagtaaagacgcccaaagcatcttccacctgattaccacgagctctcaacattctcactcgcatgagtcatctttcaatgtgtaaacaataatcttactatcgtgtcatatacatgtttgattcttacacaatatgctgagcttgtgactaaacctagttcatgcgtggaacataggcttcgacacgtgccaacctatgccctatagagacctaaatatttctctttatagtatgtaagtcgtataacacaatcatataatctcaacgaataaaaacacttattatatagtttgttgaacaatatttaacaacagagatttgtttctttagtctttcatccgcatatataatcaggagactataatattcctaccaaaacaacttcaagaaaaaaacagaatcaataaccttgtccttgattaagcaaaaaatg

SEQ ID NO: 14389 - DNA, 3000 bp, Unknown
  misc_feature (1)..( 3000): cDNA_ID_3016745_gDNA_ID_2684114_Annot_ID_190739 3000 nt of promoter + ATG
cctatttgttcatagaatctaaaaacaaaaatttgtggattttttaaaacaataaaaattaaaaactaaataaatttccattcacgattttgcaaaaactaaattctacaacaaaaatcaaaaactaaaaacaaaaatccaaaaaccaaaaacgaaaaccaataaaaagtacaaaacattcaggaccttactgtaccatcgtacgttaggaaaaatattagaaaatcaacaaacactaaacaaaccaaaaaccctacgatcatttctttcttctccttcaattttttttcctgagtagatgccacaacaaaacaatagattataaactaaactgagcaaaatcatcaaaacaaaatgcaacaaaaaaaaacatcaactattctctttgaacaaacgtgcaacatatatataatatatataaaatatttcacaaagaatgaaaacataaaatttatagaccaaaaagaaacataaagatatagaacattctcaatattaatttcgatttaacaatcctgatatcttcagctccaatcacctgaatgttgttcacatgtagcccacttaatcatctccaatatcaatattttatatttatagattttccgttgcttccttctacaacttataaacaaaatttaacccactttattataagtgcaaacattaaagaaatatgtgtaccttcgaagacactacaatttgactcatcaaagcttcgttctttatcttatttgccaaattggttcaagaaacagagaagttagtgttgattcgactcgtatgtaccaaacaggacctacttcaatcccaagcctatcgatatggagacaaagaaagaaaagagcaaagaaggtttaatcgctgccaaagagctcaagcgcctccaaaccaacttagtccgacttgatcgattcattgattctcatgtttgtcgtctccttaaattcgatctcctttttgttcttgctgaattttcagagacaaaaccaaattttcctttgtatgacggacataagttagaactataccaacatgaacactatttattatatttataataatgatacaaaaaggtactttaaacagcaaaattatatatacttttttgctcaaactaaaagagaaaactatttaatatatgttattattctttatatagaataacataaaataatatagaaattaatataaaattatagaacggttacaaaaatatctatctatatatcttattttattgatttagaaaaacagataaagattagataataccgaatacttgtaaaaataaagttatattataaattgttactgtgataataagtttttaaattattatatagttaaatttatcattctcagcagccgtcatgtttcaggtatatatcattctgagtaataatatactcaatattaattactttaaaattttcaatcttcaatttagcataataatcaaatataccaatgcagccgatgaagtacattctctgttaaacttacgttagtttctgggtgctcctctacaacatcactctaggcacatgcattaaaatattcactgttttattaaatatatatatatatttatttattttctgacaagataagttacaaatttttgtttccatactctttgaaagagatggagaaaaaatcgaattcaataattgttcttggtatttattccatttcatcatcatcattaattgttggggacatattacatgtaacatggttgtgacgcatcaatcctactcgagccaagtggggaccaacagttcactgagcttgattcagttgagaacttaggaatcaaaaagagggacctgattggctctatcaaaacctcactggagcatgagtgtcccaagcaagtctcatgctctgacgtcatcatcctctccgccagagacaccgtggctctcacgggaggcccactcatttccgtgctattaggacgaaaagactccctctccactccaagcaaacacgtggcagactctgagcctcctccctccactgctgatgttgacaccaccttaagcctattcgctagcaatggcatgaccattgaacagtctgtggccattatgggtatatatttataagaaattttcatcgtagccttctatctcagtttttctttcaggaacttgcaaagtggacagggccaatcaaattttagccatttagacttaagtggacgaatatactctcgaacgagaaatgaaacgaggcggttcagtttcattttctttgttttctggttaccaaaataatatttaaactttaaaattaaatcaaaaacacattaataattttaaactacaaaaaaatcaaaaactgtttcgtcgaagacgcagaacaattccgacgaaacataaactcagatcgaaagtgaaattttgattgaggctctatgcgagttcgagtcgttgcttaagtggaggaaattttgatcgagttcgtgttaaagggtaacaataagaggattttcgggtttctcgagttactgtttctagaaaaactcaaatggcggagatgaagaagagtagtcggcggtgaggagtttcggaagttaatgtatcatcgtcggcgacgacaattatgggtaagggtaagtttggtttaacttcgtttggggaatgagttgatacaaaatctaggtaaattttggagatttcaaatcagaaaatttcaattgacaatgggttttttgtgttttccgccaaaaaacagtagatttgagtataaaatttttggtgtacgtgtatatgaatatcaaggacatgtttagtttgtatttggatatagtgtacgtgttaagaacttcatcgtatttttcaactttcatgaagtacttctaaggatccgattgaattaccatagaggttgtttgcactcgaccactaccctaccaaggcgaagataaatgcgtactccaaagcggagtacattggtcagataacatttgcgcttaagggaacaccagaa

SEQ ID NO: 14390 - DNA, 3000 bp, Unknown
  misc_feature (1)..( 3000): cDNA_ID_3016706_gDNA_ID_2684114_Annot_ID_190751 3000 nt of promoter + ATG
aaaggaccgagattgaaatacaaaaaaaaactataaactatattgctattgctatgcactaaaatcaagctacgatgtttgtgtttgagaggagggatcctatatttataggtattttcagcataaggttttagggttttacatatgacagcgtaaattatacgggcctaatatctttgtttgaaaagcataagcccgttagggttgttaggcgacttatgattgattaggtttgattaggattaataggcgatttaggtttgattaggggcgccagagaataggaaatttagggttgagagtgaattaaaccttttttttttctacacattaaaatataaaaacaaaataataagttatctcattagttagtaaaaatattaatttatccttaaaaaccttaagagagggagggcaaatccatcagttcattttctgagagcgaacatgaaagtttttgacatctgctttaatatataagattctccaccgcttatgtttgggccgctacgaattcaagatgttctgattcgaatgattgagtgattatgaaattttttacaaaaatgatcgataggtattgtgttgttatgggttttaagaaatatttaaatacttttttagagacggtatgcttgaccttttgtaatattatggtcgaattttcaaatctcataactatattctatcattgaaatttaaatttttttttaaatactctagttggtattaaataacattccttagttttgcctcgtttgagctctaattattaatcggatgacaaaaaaaatagttaatattaaatagtgaaatcttttataaaaagaaaagaaaacatttatttactagtggggataatgtttctaaagcccaataaaggcccaaacgttctctgaaataacaccctaattatagcttctgaggcccaaatctctctctctcccctccggaaatctcctcgattcctccgtcaccaccgtaccgtaaccgagactggtcgcaatgttgtcgctcaatctatctttgaaaccccaacatctcaagctcttatcttgttacacggattcgtctgctccttcaatcgcgaaaaaggtacctacacacttgcttctgtttcttagttcacttcatatcttgaattttaggtatctctctactttgtacagttgatcaaggaatcaaagctatctagggacttcagtcaaaagatacaaatcgtagactacgctccattagttcaaactttaagccagagaagattacctgatgtagctcatgagatttttctccaaacgaaatcagttaacttgttaccaaattacagaaccctttgtgctcttatgctttgttttgctgaaaatgggtttgttcttcgagcacgtacgatttgggatgagattataaacagttgttttgtacctgatgtctttgtagtctctaagcttatatctgcttatgagcaatttggttgttttgatgaagttgccaagatcaccaaggatgttgctgcaaggcactcgaagcttcttccggttgtgtcttcacttgctatatcctgttttggtaagaatggacagttggaactgatggagggtgttatagaggaaatggattcaaagggagtgttgttagaggctgagactgctaatgtgattgttagatactatagttttttcggtagtttagataagatggagaaggcttatggccgggttaagaagtttggtattgtgatagaggaagaagagataagagctgtggtgttagcgtacttgaaacaacggaagttttatcggttacgcgagtttttgtcagatgttggtctcggtagaagaaatcttggaaatatgttatggaattctgtattactgtcatatgcagctgattttaagatgaaaagcttgcagagagagtttattggaatgcttgatgcgggtttctctcctgaccttaccacctttaacattcgcgctcttgcgttttctagaatggctctcttctgggatctacatctcactcttgaacatatgagacgtttgaacattgttccggatcttgtgactttcggatgtgttgtcgatgcatatatggataagcgactagcgagaaatttggagtttgtatacaaccgaatgaatctggacgattctcctcttgtcttaactgatccacttgcatttgaagttctggggaaaggggatttccatcttagctcggaagctgttttggagttcagtccacggaaaaactggacgtatagaaagctaattggagtttatctcaagaaaaagttgcggagagaccagattttctggaattactagctacatgccacatctttgctgcaaagaccgtcactctttgctcactatcacaatccccctgataaacttttccgatgcttgaaatgaaacattgaggttagagagtcttcttgctactagatttacatataaatcatacatgcctgtatttacaatgttttattgttaaatagatatgtatattgaattacatacatattattaatgcacatttttatccggagttgtggaccatagaaagacatattgactcctcaaagtaaattctgcatgttacattgaaatcataggctaaatttgagatgcactatttttagaaagtgtagagaaaaggacaggaagaaataagcgaaagctttggtaagccaccaaacctgattactggaagaaaagaaaaaagttccgagaatagagttagatcgctggtgagggttttaaatggaacacaacaatggttgttttagagtgtgttattcttttgtatttataccttctcataggtttcttgtaatacacgcttcttcctctctctccctctctcttatggcctcgtcttgaaagcgtcttgcatgctaagagaaggctttagagcaaggagagaagggagaagttgatttatacgtccatcggatatatcttctttttatatctgtctctcttttaaggaagaaaa

SEQ ID NO: 14391 - DNA, 3000 bp, Unknown
  misc_feature (1)..( 3000): cDNA_ID_3016714_gDNA_ID_2684114_Annot_ID_190749 3000 nt of promoter + ATG
tggtccacaactccggataaaaatgtgcattaataatatgtatgtaattcaatatacatatctatttaacaataaaacattgtaaatacaggcatgtatgatttatatgtaaatctagtagcaagaagactctctaacctcaatgtttcatttcaagcatcggaaaagtttatcagggggattgtgatagtgagcaaagagtgacggtctttgcagcaaagatgtggcatgtagctagtaattccagaaaatctggtctctccgcaactttttcttgagataaactccaattagctttctatacgtccagtttttccgtggactgaactccaaaacagcttccgagctaagatggaaatcccctttccccagaacttcaaatgcaagtggatcagttaagacaagaggagaatcgtccagattcattcggttgtatacaaactccaaatttctcgctagtcgcttatccatatatgcatcgacaacacatccgaaagtcacaagatccggaacaatgttcaaacgtctcatatgttcaagagtgagatgtagatcccagaagagagccattctagaaaacgcaagagcgcgaatgttaaaggtggtaaggtcaggagagaaacccgcatcaagcattccaataaactctctctgcaagcttttcatcttaaaatcagctgcatatgacagtaatacagaattccataacatatttccaagatttcttctaccgagaccaacatctgacaaaaactcgcgtaaccgataaaacttccgttgtttcaagtacgctaacaccacagctcttatctcttcttcctctatcacaataccaaacttcttaacccggccataagccttctccatcttatctaaactaccgaaaaaactatagtatctaacaatcacattagcagtctcagcctctaacaacactccctttgaatccatttcctctataacaccctccatcagttccaactgtccattcttaccaaaacaggatatagcaagtgaagacacaaccggaagaagcttcgagtgccttgcagcaacatccttggtgatcttggcaacttcatcaaaacaaccaaattgctcataagcagatataagcttagagactacaaagacatcaggtacaaaacaactgtttataatctcatcccaaatcgtacgtgctcgaagaacaaacccattttcagcaaaacaaagcataagagcacaaagggttctgtaatttggtaacaagttaactgatttcgtttggagaaaaatctcatgagctacatcaggtaatcttctctggcttaaagtttgaactaatggagcgtagtctacgatttgtatcttttgactgaagtccctagatagctttgattccttgatcaactgtacaaagtagagagatacctaaaattcaagatatgaagtgaactaagaaacagaagcaagtgtgtaggtacctttttcgcgattgaaggagcagacgaatccgtgtaacaagataagagcttgagatgttggggtttcaaagatagattgagcgacaacattgcgaccagtctcggttacggtacggtggtgacggaggaatcgaggagatttccggaggggagagagagagatttgggcctcagaagctataattagggtgttatttcagagaacgtttgggcctttattgggctttagaaacattatccccactagtaaataaatgttttcttttctttttataaaagatttcactatttaatattaactattttttttgtcatccgattaataattagagctcaaacgaggcaaaactaaggaatgttatttaataccaactagagtatttaaaaaaaaatttaaatttcaatgatagaatatagttatgagatttgaaaattcgaccataatattacaaaaggtcaagcataccgtctctaaaaaagtatttaaatatttcttaaaacccataacaacacaatacctatcgatcatttttgtaaaaaatttcataatcactcaatcattcgaatcagaacatcttgaattcgtagcggcccaaacataagcggtggagaatcttatatattaaagcagatgtcaaaaactttcatgttcgctctcagaaaatgaactgatggatttgccctccctctcttaaggtttttaaggataaattaatatttttactaactaatgagataacttattattttgtttttatattttaatgtgtagaaaaaaaaaaggtttaattcactctcaaccctaaatttcctattctctggcgcccctaatcaaacctaaatcgcctattaatcctaatcaaacctaatcaatcataagtcgcctaacaaccctaacgggcttatgcttttcaaacaaagatattaggcccgtataatttacgctgtcatatgtaaaaccctaaaaccttatgctgaaaatacctataaatataggatccctcctctcaaacacaaacatcgtagcttgattttagtgcatagcaatagcaatatagtttatagtttttttttgtatttcaatctcggtcctttttatgatgcatcttcatcgatttttccgactcctttttatgttatggtcacttggaaagtaagatctcatagatctttgccaattggtgatgagttgtttacccaaggtttacagtttgttcggttacatgttttggttttcgtagctatttggtttttatatgtgtgagaattttcttgattttgattagcacctcttttttgtttctgaggtacaatcataaattttggggattgtagaattgcaaacgaacttcgaatcaaaccgaggtatctcactaatctttcttgatttacacatttttttagtttcagctttatcggatatatttccttgattgtctccgattgtatcaatctataaaattattgagaatctctctcacttaaccaaaagagcttttcaccagagagagcaaaaagcatcaaccaaaccatg

SEQ ID NO: 14392 - DNA, 3000 bp, Unknown
  misc_feature (1)..( 3000): cDNA_ID_3016680_gDNA_ID_2684114_Annot_ID_190758 3000 nt of promoter + ATG
cttctttcacaagcctgcaaacacagcttaaggaagctaactgcaaaatgaaggaacaagaaactttacaagcagagcgtgaagaagaggctttgcaaattgcagctgagcacttgatgatcgtgaagtacttgagcgcaaccgacccaaacattctcgccttcctcgagtctcaatctattgatcccgctactgctgatgtccaaacataggtaccttttccatccttctctgaatttgaaaacgtgtgttggtttgaataagaatttttgttttgttttgaacatataggttgtttggttttgaattgaacaagaatgtgtggtttgttggatctgttttaaatacacatttcttatgtgttaacaagtctgttgataataaattagaattataatcaatttatcaagaattaattgaaggctaaatcaagaattaaacctctaatcaatcacaaagtagtagcaattcaatcaccaaaacgttcacaaaacaattgtgatgttgtggcaaagatgtcgcataacagtcgctatacttagcgacgacattgcgactaaatagtgaccacttaaatcggttgcacattagtttgttatgcgagtgattattttaacactcgttgtttaggaaatacgtgttttagtcgcaaataagtcgcaagtaggggttttgcgactgattagtgacttcttatgttgtcgccaattagctgtttttttgtcctaccaacaaaaaaaattagttgttttcttgatctagagacttgatcgtagaattcgatggtagtgaggaatgttggtgagatgagagagagagagagagagagagagagagagagagagagagagagagagagagagagagagagagattgttggatagcatgacaaaatttataaatcaatgataatagcatgttttgtccttgaaatacatgcgtttataaaatcatatataatcttatatgtcacactgacgagtgatggagaaaatccggtgagaggagaaacacaaaatatacgagggataagaaagatagcttctaggaagaaagaaagagagaattgatggaatcacatatccaacgagaggaagataggaaaaaaggaatgtggtggtgatgagattcagtaaaagaaaaagatatctagagagagaatgactataatgttgcagccaaacaagaaaaaaaaagaagaagataataaaaggataagatgaaccaaaaacccttaaaaaaacatatagcaaatagtgtccatttagtcaaaggttatttcgttgattcttttcgagtcttaggttagtttctatatattctctaaattttataattttcttttcgattctagtgagagctgttgctaaagctaaaaagagaaaaagatatttaagtaaagttttctattaaacattatatattttactatccatatcaaatcatggaacattcatagccacccaaaacattttgagtgccaccagcaaaaaaggcctaatcatatcaaaaaaaaaacatttttgtaagtgtaagagttgaacctactacctattgttctatcacccaacgattaaccagtatagttataagagatatttggaaaatagatgacggttaattaataactatatcttataccgtaaacacatgcttccctagcttgtgactaaggcagattctggtaacaactcatattttatgcataagataaagctcacatagaccttgttcaaaagcattacatatccaacgatttacaataactctatcatttacatttccaaatgttatatattttagtgtttgtttgatttaatggaaaaaaaaacagttttgcattaactttgtaagggatacaacaattaaaaaaagagtcagaaataaaatagaaaaataatataaacaaaaatagagaaatctactaaagaaaactagatatttgatcttccaacatattaaacagaaaaataaaaaactaaagagaaaaaaaattagaaatggagtaaagaaaatacagcaattcaccgttacccttaactactttttaaaatattaaatgatattttcttttagaatcttgaaataaaaataaaagtttcttttttgatatcaaaaccatattaaaaactcatcttttactaattttagtataataattaaaaaacaaactaagtaaatgtttttgttttgtgcaaactaaatgttaagttcatgaatttgtgtaagatattttccctataaacctatctcaatgtggacccaataggccaccatgcacacaacttggcttttactctttgtgtcagtaaaatctaaagatagtaaagacagaccaaatcgcagccgtttatttcccatataaagaagtacgtacatggaaatgacaataataccctcactccttaaaccctcctcttctctcactttatttttcagtctctctttatttctctctatcactttttatcgattctgcgcaaattcatgcaaaaagggaaaataaaaagttctacactgtccccaagattctgcgtgagtgtggtattgaattcttcgccgtcccttttctatttatcatattttgttccttctcttattttcctcttagtgtcaatcatggactagaatcaactctctttttccctcaaaggtgatatattgattttgtgttctgatcataaagttgtggttttttcaatctgggttttgtttgttgttgatgacgatcatgtttcgtttttcattttgatacgacactgttactctgttttacacctttttagtacaataatgttgctttcgcacattaaccaatatgatcaagttttaaagttcatatatcatatatgttctgggttgtctctagttgcagataaagtttgaatcttttttttatttgtcaagtggtgaatgaatcctaatgaagctatacatgtattggttacaggagatcatatgtggatccacaagtgatcttgaagggaaagaaaaaaatg

SEQ ID NO: 14393 - DNA, 3000 bp, Unknown
  misc_feature (1)..( 3000): cDNA_ID_3016684_gDNA_ID_2684114_Annot_ID_190757 3000 nt of promoter + ATG
gtctttagaagcagaaattgtgtgtggttgattgacgaagctgtatcttgtttctttgtagttcctcaagtggatattaactaaagagacaaacaaaactatcttgctgggtcgtcgttgtctcttttgttacttgttagaaaagatactgaaaaatagtcatcagattgttgattaactaaatgatctgtcccatttgttttattgaaacaaaaactcaaatagtgaaactgaaatctaaaacataaacacaatctgaactgaaactaaaacataaactcaactgaaactaaaacgtaacacttgaactgaaactaaatcataaactcaactgaaactgaaacgtaatacttgaactgaaacaaaacaagacatttaactttaagtatcaaaccaattttttcaaaagtacttaaactgaaacatccaagtacttaaactaaaagtacttgaactaaacaaagacatttaagctaagtctaaagtacttaaactgaaagtctaaaacattacaaaacagtgataagaaacatatttaccgtagcagcacatatctcagtcttgtttcttgatttcaaaagtgattgcttccaactcacaaacaaaaaaatatatccgtttttctttgccagactgcttggtgactttccctgtgagacaccaacaatataaatatatgatgtcaagactaaatcgatgtgggtaattcattaagaaggaatgaagatatatccttttttatatgaaagccatgacttctacaaactctgcatcaatctgaagcaaaggaccaaaaaaacactgaatttattttacaatgtcaatattttacaatgctgactataacgaaccccaaattctcatctctctgcctattacttctcaatttcacaacctcaacagctggcttaggagtgatcacagattcaatcttagcctttccgatttcgattgaacaaacatgaattcactacaaaaaaatcattgtttatttcagtaaatcaaggaacctccaaagaattgaagcaacacaaaaaaaaattacttatgattcattacaaatttatttcagtaaatcaaagattcaaaaagaactgaagcaggactgaacgaagatttttttttttttttttttttttttaatcatcccaaaatgggctttaggcaaggccttacaacaaccaaacgggtacaaaataagaaggtaacgactgacaaatccggtgacccgagatcggacccggaggttgatcggaaaacaaggaaacacgtccaatagtaccagcgattacaagaagcactgcttcgcggctacgacggcaaggacaaactcaatgacagaagtaatcagttcccaacgccaagtcgatcccgacgacaaacctgaacctacaacacttcttccggtatgaaccgaaacctagaaaatccggaacccaatccctctaatccttaacctagcaaaaagagagaacctaaaaatctaacacccagactccagatctgtcaagcaaacaaaaccttgtacgagcaaagccaacctcaaatccggttagacgaaaactaaaacttggaagctgagaggtttagtggctcaaaccaagcctccacggccaagatccaagattagccgaaacagatctacaagaaaagtcgttaatcgtctcaacaaacagcctaaacccaccaatccgccttcatgacttccgccgcaacccacagcacccaccgcaaacatatgagccgcaagaaaactccaccaccatgcctccgacgtccataaccagaagatttagccggggagatttctcaaaaatgtcgagatagaagccacagatgcatcacgaaccagattaaccatacgcagctgtcggagaagaaagctcgctcacccccactttattgaataaaaaccaaacctgcaatgaagatctaaaacaagaaaagaaaccggaaagtagatctgttttttttttctcttgaggagagagaagagagaacgattggaacgattgtccccttaaatcatcttttcctgctacaatattctattgtatcaacaattacagttttaaatctgctgtgtcacttttctctttgaaaggaatgatcgtcattttcttttgcttaaattatctttaaagtttttttccttccttaacgaagattcttcataaaagatgcaaaggttttttttttctctaacttttttccgggtcgcccgcaaaaccgcggtctttaatgggcatccatgaattaatccgcaatccaaacggaccattcccgcgagacccgctattttttttctccattatataggcgggccaggcctgcggaccagaggcccgattaacatccctaaacataataaatgacatctgaattaaatgtaggtacatattgtgtaggcattgttgcaagtgaaaagaattcagcatacgatttcaaataaagaatgatccaaggtcctcatttccaagttataattaaagctttccgggtcattaagtatattaattctgacccgattagcttttcttaaaatatacttcaaaaatgttaatttagatattggatacccaattagttaatcatgtcggaccgagtcagatcagattttcgaacataaatctttatctctccgaattgaaccaaatattaaaccaaaccaatttgtaaaaagaaaaatcggtttggtttggatcaatagaatcgggtcgcatcaaaactccatgcatgcctagttctgtccatgctggaaagaaaacccacctacactcgaaagttttctttaaagaaaagcgcgagagaagtttaggttttgtaaatttccaacttttaaccacattttttaaagacaaaaaatagtgaaaatggtaaataatatcccgcgtgtcccactctgaaactggcgccaaaatcgaggttaatactaaaaatgcccaaatcaatcagatagaactaaaaccctagaaccacccaaaacaatcaacatctccg

SEQ ID NO: 14394 - DNA, 3000 bp, Unknown
  misc_feature (1)..( 3000): cDNA_ID_3016702_gDNA_ID_2684114_Annot_ID_190752 3000 nt of promoter + ATG
cagtatcgaatggtggtgcttcagtcaaattcgcggattctaaatgtgaaatcgagagggtatagaggagaattgaaattcaaacattgaaccttggaggaggatttgcagacaaaaggagaagaagccatcgtttcttcttcaaggtttgtgtgaagctcatcaactacaagttgaaacccggggtaataggttcagccaaccaagagaataaccactagactagaataatatattcgtatgataaagttaaacaatttaatatataaattcaaatagtagaattcaagtttaactccgtcaaatgattctgttatgtctgttaacggctgttaactcatatgtccgattcaaccaataattaaaagattgtattttatttggcaataatttattaaatgaggtatttttattccaattcaaaaatattgggtattaaacttccaaataaaaattaattttagttttttttggggattttttcccttttgttttatccattttcatttctaatctctttaaatttttaatgaccattttacccctatttgaaaattattttaggttaacaaaatgaaatattaataatttttcgtctaaaatattccaaaataaaattcccgccaaacttttaccgcaaaattttcccgcaaaactttttcgaaaaaaaagtttcccgccaaaatttttttttaaaaaagatttttcccgcaaatttttttttgttggcgggaaatagatttacaagggattttaaaagtgttttaaaagattgacaagggtttaaaagatttacaagggattttaaaagggttttaaaagatttacaagggatttaaaaagggttttaaaagatttacaaaagattttaaaatatttacaagggatcttaaaaggattttaaaagatttgcaagagattttaaaaggtttttaacagatttataagggattttaaaagggttttaaaagatttacaagagattttaaagggtttaaaattgttttaaaaggattttaaaatatttacaagggattttaaaaatgttttaaaagatttacaagagattttaaaagggttttaaaatatttacaagggattttaaagggctttaaaagatttacaaaagttttttaaagggtttaaaagtgttttggaagatttacaagagattttaaaagatttacaagatatttttaaaggctttaaatgtgttttaaaagatgtacaagggtttttaaaagttttttaaagaatttacaagaaaaccctttaaaattcattggaaatcttttaaaacccttttaaaatctcttgtaaattttttaaaacccttttaaaatctcttgtaaatcttttaaaacccttttaaaatcccttgtaaatctatttccagccaaaaaaaatttacaaggatttttaaaagcatttttttggctgagaaaaaatttgttacgaaaaaaaatttgccgggaatttttattttggtgggaaaaaagtttggtggaaatatttttttggcgggaaaaataaattttggcgccaaaaaatcggcgggaaaaataaattttggcgccaaaaaattggcgggaaaattctagtttccaattacatgttcctattagatgagggtaatttggttattttgttaaagggaagaggtattttaaaaaatggacaacataaaagggtattgttacaaaagggtagtaaataaaaggtagttttgcaaatctccctaaatacaatataattatataaattatgaataccaaatatacttgacaaaatacgagaaataaatataagaaagaaaatgcagatagttgactgaatttaagtaattaatttctgtatttttacaaaattatttatccaaaaaaaatagaaaaaaagaaaaggaagaagaagaaaagtaggagatccatcggttttataagtaataggggtgtttttacagtttataatggatctcaattgtcttccttcatttgacccgcatgtgttctactttcttctttttattattttattactataaaatcaagaaacgcttgtgtttgacaaactttcatgaatgaaaataattttgcgttcaaccccgttaagcgtacgaaccatcaattaaaagccatttcattcaaggcctataaatgtgaacatttttcttatgtaaacaatagtttttttcaactgcgttttcaactttctattgtccaaacgagttaaaagctgtgggaataataacaacatggtaaataagacacaatcgaaattttaagcttttacagtactaaaggtgtatggcactgacacatggtagggttacacaatctactcagagacacaattatttaattaaatcactatatcagcctctgaccagtatttgttcaagtcactatatcagcgtatgactatccttttcgatatcttaattttctttattatgcaattttttatatatacatgcaatgaatgtacatatgtgtgacagtgtgagaatgtataaacagaatgtaccagtaaattaaaaatagagctttgaaattaaaaactcatcaacttgttataactctaaatgaacgtacatatgtgttagtagatctcttttactcagtttgagaaaacaactatatgtgtcaatgggtgttaaaaaagttgttgtcaggtaagctgaatagatcgctcctaggtttactaatgtttaatgggcttggttttaggctcattacgtattgggccaaatccaacccccaacaatcaccataggaattaaaaaaaaaaaaaaaactcaatccaattttattgtatcaagttaaataagaatgtagcgctacagtaattaagtagtaaaacattaaactgaaatagttttgtgatttatttttacactactctgttttggatgccgatataaaaactaagtaaaatctattcatatataatcatcactttttaaagaacctccaaagtgacaacaaacattctcgcatcatg

SEQ ID NO: 14395 - DNA, 3000 bp, Unknown
  misc_feature (1)..( 3000): cDNA_ID_3016724_gDNA_ID_2684114_Annot_ID_190745 3000 nt of promoter + ATG
gtcacgcaagttatgctttggtctccaaataatgagagctcgagtaaaggatcgagcatctttttgaattgcgcagctcttgattaaacggtggagagcttcttgttcttgatcactcgatcaaacggacaaaaataaaccttaagaattcactcgatcaaacggtggtgatgcttctctcatttggtcattcaaatcaacggctcaaaacacttctcctcattctactcgatcaacagttgagatctttcttgacttggtttgaatttactcgaccgttgacttcctcagggttaatgaaataaacctgaaacaattaaacgaaaacatcaaaaataactagaaagatagaaagttatatacatggatagacatgggatttcctcccaagtgagcttgttttaagtcattaagcttgactcttacagagcttagtcaaaaaaaaagttaaagagaggaacatagaagtcctcatcttcagtggttgaattttcagtgcctgaatcattctctgcattctctgcatcctctctgcatcctctcttgaatcattcagtgcctgaatcattcaagttaactcacacgatggaagagttaaatagcaccattcttcttctcaaccaggctcctttgacgaatcctcaatttcaaagctggggtagcctttaaccattttcttgaagttccagaatggtgctatttaactcttccatcgtgtgagttaactttccaattgtatcctcatgagctttatatccaatccagagctgtaccacccaaaattaaaagaaaatataagatcagattttgggttaaattgataattttgaaattgtctgatttcaggaagatttctgagatattcgaaagtctaggcaaaatctgtaaatagagaaaaatcagaggactaaagtgaaaaaacgtggaaaaggagagaaattcgagtttatcttttccgaaactgaagggaagttttggcaattcgaatccttgttccttaaccctaatatatcgtatatatatgtgttttatagccccagcaaactagaagccgaaaccataatcaatttgagacttttggtgagtttcttagatcatttttgcctcaatgccaatttgaatatttgttgatattttgtgaccggattttgtggctgtttatgttagttgtgacttcagttgttgactctttagtattgggttgctttcagccttcttcagagttctaggtaagcttcatcttcttcctttttcagtttgcttccttaaaatgagctttaagctctttaatggtgaatctctttgcagaaagaattaggagttgatctatatcttgttagaaaactctcgtttgtaagaatccaacgccactgacatatcatcaatcggaagtcggagttgatcgaaatttgatcggtatatatttgatttttgttgattcatagtcaaatcgggatttatttacgccggttcttaagcttttaaaaccggttctagaatgttctgactatgggcaatactcgtttgaaatctaattttgaattggttgagtctgattttaagcggttagtaatttggtccggttcagcttgttttaaacaggttctgtcatttctgatacttgattaagattgaaattgaaattagcattcagatggtatatagtacttatttttctgatctacggttgaatttaggcaaattaattggtgatttggagcgtgggtagaattgatgtaaacactcgttcggtttttaaagcttttccaggtgagttctaactcccttattagttattatacatttgtataatattttaggagtgtgataaaaagaataaaggaattatttgtatattctcaaaattgatttgtttgctttcataattaatttggttataattataatactaagatacgttattctgttaagatttgatgtatatttgcaaaatatttgggaagaaaatagaaacaaaatttgaattattggaatatgtgaattctaaaatttgattaattatttagggtgataattctgaatatgattctgataatgaaatatgtcattctgttaagaccagtattagcatgcgactctaattttgctagctctattgagcaatctgtggcggccggcatcgccaacagatgtattccgtattatgttagtctgttagtggtattgaggtcggttaataccgtggaccgtacttccttatcaccttgataggggccagcatccctatcgagtatattatgtaaatattttgttagtatacggttttggtcaaccaatgttggggttgtaccattccgacacgtattgctggatatttggtcgttctgttctgatgttaatattttgtgctgttgatattattctgttatgctgatttgataatataattttggtagtataagctctgatgtgtttactttattttaaattaattaaattaaaatttatgtctattagtaccaacacgtgaatattattctgtacgggatcagaccgtgttggtacttgttcgtcgggtttgtagtctcactgggcaatttttcgctcatataagttttgattccgtgcaaaggacattgaggaggtggagcgtgcaactgaggtttaaagtttttagttcaatcgtaaagcgagacttggttgatttttcttgattgaaattattttgttttcgacatttggtgtttttatgaattttcaaacattatacattattgaattttagtatttttattatattatttttagtaatactttcaaaattctaccgaatttggggtgttacagtttggtatcagagccaggttttacgaaaccttgggattttcaaaagccttcgtaggttttgtttttaaaataaaaaatatatatcttactggtctcgcgataggattttgaatgtgaggtttaactgttagcttttgtgaccaaatttgtctaaactaagagtttaacttctcattcaattgcgttcagatg

SEQ ID NO: 14396 - DNA, 3000 bp, Unknown
  misc_feature (1)..( 3000): cDNA_ID_3016816_gDNA_ID_2684115_Annot_ID_190769 3000 nt of promoter + ATG
aatcggaaatcaaaaaacgacgctgaaaagatttttctctctaaaggatgttagagagataagagaggaaaagagaactatggacaagcatttcttctttaacattacatatgtttaatatccctttcttgaattttcttcactactaactttaacttttttgttgtgttttgaaaactattattggcctagtttaacctatttttaaaacgaaaacaaaccaacaaaatttatataaatatttgttaaataaatgaatgatttataatgttgtaagtaattatctaattcacaataaaccacatatatccatcatgaatatatatttttcttacaaaaattatttttaagatcaaacaaaatttgtagagaattcatatattatgtgactttaatcaatctcatttataactttaggcagtattcatatatgtatgaattatgatcatcaacatattaaacacatcaaaaaaaaaaaaaattttaaaaatagttttcaaaaaataacttttttttattagatacgagtacgacatacattcacttgtatcattacaatttcaatcactgcagtggagatcatctaccactaccatctttattttttgaaatataaggatgtttgggaaaacggacatcaactctattcataaatccataatcgcacttatcacggcttttgtcgcaatatgctacatcacataggcagtttcttctgcattcttcatctgtcgaacaagaatcttcatacgcaagagtgtatccttaataaacaaacaaaagtataagaaaattatcttaaatacaagcatattggtaagaaaataattaactagaaaatgatttcgaatataaagtttgtttaaacaaaattcagactcgattcttttataaaatggattttaacaaagattactttcaattatttgtgaagagatatgtaaaattttgttggcttgtttgaaaatgatactgttggtagctagggtatgtatacttacgagaaacgacgacaagaagagaaaccaataacaaaagtttgaatgaaatgcttctcatttttctacttctttctgcttttgatggtgaagttatacatgcgtttcgtctctttttatagtctagtttagatgatggtttgagcaaaaaaacttaaagattttgtttgtatatatatacaagttataattctttcaagatttcacttaccaaaaacggttacaactattaataaatgtatagtgatatttagtcaatactgaaatctgattcacataactatattcctattgaacatttaaagttccggtcatcatttttctttctatagactttttcatgagactatttctcatcatccgaccagtatagagcattcaaatgtgttatgagttatgactatgatataacaatatataatgattagacgattttttctcatgatgttttattttatcctagttttggtagatacttataatgtattttttaaattcaataggaaattaacaagaaaatatattgaccaattatagagggcttaaaacttcgtggatgtaacgtttggaatttttgttgtttaacgatggaacccactttctttgtccctttagagattctttcccgacaaagtacaaatcattcacagaagaaaactttttattaccattgttcccacaccagatttacacttttaccacttgttgattcttgtttatttggggtccacacggtgaatctgaatcatgtgatagtgattaagttttagattttgttttttctctttccatttactaaattaattgtttttgtagtttccactagagctttattttgccatgattttgtatggaatgaaatatactcaaattggtgagaaaataaactagtattacattattgtgaaaaattaaattacaactttttgtttataaataaatttaaaatttataagttataactcattggttgtataactaaatattttatttcaatatatatatatatatataatgaataaataattattttaagttgaaataacctttttaatataattataattattgactattttaaaatttattttatataatgttggtaagaccttcaatactgattaatcaattttatcattatattttgaatttaagcaagtgaaaaaaaaaaacatatgttcaatattggatattgattttgtgtagtttaaaatacaaaatttaatgatgcacgatacacaaatccaaaactaaatatatttcagaatcttaaacgctataaatacggtttacatcatatcacaagaagaaaaccaatcccatctctctgcaaatcgatagaacctgtgcaaacaaaacagttgtgaaggtacatcttcatactcttcttctctcaatcgaagtaaaatcctattcttctattttaaaattcttaccacctcaattagataagcaagtgcatatattatattccatggaaaaaaaagattcactagtaacataaccaaaaccaagttcatagcttttttttctttcgggtttaagatataactttttctaaagttttttaagtttttataaatatatatatatgcacttatgtttatatatatatatatattaaagataattactcttatggttagattcgatttgagattattacacttatggttagatatcgaatctacttttcttgtaacatatagttaaattgctgacaaagacctgatcaaatgagtcggtgaaacttctaataactgaaatcttgacccaaagaaaaccctaccaaaataaccaaaaaaaataaaattattaaaaaccccctctactttattatctcttaaattcacacactttatcttttcaattttagatttcatcctctaattttctaatttactatgttgtattatttattaaaattgatttagatttaatctcttgcttctaaacaagttggcaaccaaaaattagattctaatttcacgaaattaagatg

SEQ ID NO: 14397 - DNA, 3000 bp, Unknown
  misc_feature (1)..( 3000): cDNA_ID_3016808_gDNA_ID_2684115_Annot_ID_190772 3000 nt of promoter + ATG
ttggaggaaactcgcctcaaaaagtaacaccgagcttccgcaacacacaaggataactcattatcatccactgctctcaccgtctctgcaaccccatcaacaacctcgcctatacagccgcataaattcaacaactacagaggaaacaatcatttcagaggaaacaagaacaacaatcagtttcaccccaatcaacaaaattagacttactcaaatttctggcccagaccatttaatctgtggcccaatcaatttgcgaactggggacccaactctcaactaggctcataccgaggcccatatgtctttcctcaaatacaccagtatcctcaacaagcccatctgacggaaattcagtcgacgactgacttcacacaagcttacacgataaagactttggttgatcctaatggtgcaccatgggtcatggattcggctgccactgcacatctctcgggcacagcaggtaatcttcactctaatcttaatcataacatcactcactcggtcatcgttggtaatggttcaaaaatcccttcaatttacggcttatgtcaaaaatcaattcaatacccaaataaaatcctgtcaatgcgacaatggaggaaaatataataaccatgagttcaagaattatttggattcaaatgaaattacagttcgtttttcttgtcctcacacatctcaacaaaatggaaagtctgagcgaatgatacgcaccattaacaatgcgattagagctcttctctttcaagctcaactctcgccaagttattgggtagaagctctccatgtcgatgtccacctattaaacattcttccctcttccgccatccaaaaccaaatcccctacactcgtctttttaataagaaaccaagctatgatcacttgagagtattcgactgcctttgttttccaaacttaaatcattccaatcttcataaactttctccaagatcaagtccatgcttgtttcttggatatccatcacaacatcgtggctacatatgtcttgatctaaaaactaataagatcattatatctcgtcatgtatactttgatgaggatatttttccggcaaccgaaacacatcaaaaagacacaaagtatcaatttctcgatgatgatgttccttcttctcaattgcaacctattcttcaaactccatttcctactcaaaaccaacacctactagtgttcctgctcaaagaacccagccacaaacacaatttatttccattcagccctgtcactcaatgatgacacgtgcaatagctgggattcgaaaaccaaaacaggtcatctcacttctcaccaccacaaaatcgcctctcccaaaaagtcacattcatgctttttctgatccaaattggacaccagcgatgactgatgagatagatgctatgcttaagactaagacttggagtttagtgcttagacctcctaaggtcaatattgtaagatctatgtggctgtttaaacataaatatgatgcagatggcagcataactcgtcacaaagcaagattagttgctaatggaaaatcacaggaagccggtgttgatttcacagagacgttcagtccgatggtcaagccggcgacaatacgaactgttctcaatgttcatgttggtctcgattggccaatacgtcaattagatccatcccatccgacgatcggtctgtccgacccgttccgtcagacgatcggcctgtcccatccgacccgtccgacgatcggtctgtccgatccgtctggccgatccgatccgtctgatgatcggtctggccgatccgatccaacgatcggtctatcggatccgattcgtctctaagacgaacggtctaccctctccatcctctacactccatcgaaccgttggaccgggaggtagcatgcgcatcagttcggtcgagttatactcgccgagccgcaccccctttccgaccaacaactctaggatgtgttgggactcctttaagaatgttttatggtgttttggatgttgtgagatgatgtgagatgccttgggcgtcctcccttatatagggggcgaatggatgcttcccgaagcatcacatccgttccttgcacccctccgaaaggtcacatccgttccttgcatcctttcgaaaggtcacatatgttccttgcatcttttgggcgatgcaaccgttcgttggtacccgctcgaccttacaccttttggccgagacacctcttcacccgtgagctaccacagtccaccagctcgagtgtcagctgaccggaccacccagctgggtcagtacttgatcagctcaccgagctcagttgagctgtcggtcagctcacctagcagagctagctagtcttccagctggtttagctcacatagcttacctagctagttcatacagcttgtccagctcacctagctggtttagcttatactttctcgttcttcctacttagtattttgttccattcctcgaccatgatctagttttctcctaaaacaaacctgcctctttatgaacgcgggatgcggtcgttacaagtctaccccgttacactgaattcgtcctcgaatttggcgggtgagagatcttgtttactccctaacttgggacacgggcgttacaaactctcccaatcatgtgtgtcgattacacaaagcgatctatggtctcaagaaagcaccacgagcttggaactccaggtttgcaaaattcatcacccaccttggctttgttacaagcagggcagatgcatcgctgtttgtttacagaaaaggagttgaccttgcatacattctcctatatgtggacgatatcctcctaactgcttcttcgaccaaacttctggaaacatcattgcttcactgaaagctgaatttccaatgacagacatgggaaagatacaccactttcttggaataaaggcagattacaacgacaaatgattgttcttgagtcagtctttgtatgcaaaggagatactggaacgtgcatgaatg

SEQ ID NO: 14398 - DNA, 3000 bp, Unknown
  misc_feature (1)..( 3000): cDNA_ID_3016796_gDNA_ID_2684115_Annot_ID_190775 3000 nt of promoter + ATG
agaaaggaatatacgcattgaatattttaaattaatatgattcagttgctgaaaaaggaattcaattaatataattaacaaaaattaatataaaccaaaaaagtaattaatcttatttttaaatgtttaaacatattttttctattttaaatatcaaacataaaaaatagtttagtttaaattattttccagttatttaaataaatttagaatatttaacccaatttcgaattcaaacatattaattcgatatttataatgttatatctataaataaagcagatttgattagaaaatatttttaaaaaaataattggattagtaatattttagaatataatattgtaaattcctttgatatatgagtataattagttatccaattttaaacccacgtaattatgaatagtattgaataagggaatataataattgaaaataaataaaaatcctctctccaaaaatcttgttgtaggatttattgaaaaaaattcaatggctacaattaattaaatcgaatggccaagattataacgtatgactcaaaagtttaaatccgggtcaaaaggatctgcgtgttttttaagtgaagacgagagattgaacggacacaaataattcaatcgaatggccaagattataacgtaagttaagtgattctcaattaaaggtaatttttccatgatattaatattttaaacatatgattttaaggtaaaaaatttttttaattgagaatcacttaacgtacgtctcaaataatagtgtagatatgtatatagcaaaattaaaacgttttgcacagaggaaaatgtacgttatctgcctttattaattttaggaaatgatgatccatgtttaattccaagaataaaaagcaaagagttatataaatcatagagtattggtgtgtcgtagaaatgccaattaagtcccagaaagaagtacaagttaggaatatttggtttggtagactaattcttttgagaagaacttataagttcatgaactaatctaaaaagcaaaaaaattatgaactaatctaaaaaagaaaaaaattatgagaattttaattatgtataaatagttaaatacgtaagagatcgtttaattgaaagcaatagtttttattatatttataatcacataacaagttgatgacacataagttgattttttgatagccgaaatatattagctgtcatatattacccggtcgtacccccgattatcccctagtttggtgttatcatctatacttgtaagaaagtccattttgtcatagttttgtaagtaagatagaatataaaataaaaataagataagatttcatgaatatctttggataaaatgtattaaacatattacctagttgtattcttatttttacttactttgaatttattataatatttatggtcagtaagtttaggaaagaaatggagtacttaatatctttggtatgtaaatcttctatatcaataaagtcaaggaaaataatttgtccacatccatttacaaaaacaaaacaatagagagagaataaaatatttgaaaaaataaataattattactagaaaatcagtaacactaaatggtaacaaaatattatacagaaataaacttgatgttatcatctatttttgtaaaaaaaaccaatttttattttattttaagtaagatataacatttaaaaaagaagaagaagataagatgcatgaatactgtatgagctgtttgtataacttcttgttcttactttgaagttattatgatctttttggtcaatgaagtttgtggataagttccacaaacttaccatcagtaagtagagagaaatcgagtagttttttatatgtaaatgttctatgcaaaccaagtaaaagaaaactatgttttcacatccatttacaaaagaaacaatagaccaaaaaaattgattgagaaaaataaaatttacaataatcatagttttgttcatcgaaagacaaattcatccaaagactgttatgagaaatttggattgtcttggtagccgtattcggtttccagttaactgtgctttcaattattttagtcgacaaaaaaaaacttgacttcaaaactaacagtaagaccctcttctaaaatgtcgagaaagctatcattttaatttctatggccaactaggcattgtggaagaggcaaccaacaattttgctgtcaatcttgaaaccgagtttttgtgtcagttgaaatatttgggaagcacaactcaccggaagccggatgagacggtcacgacctccaattttcacatggcggtctttcgatgaagttgcctaattaggactacgcttcttttcttttcatttcatttctcaatgtggctatatatttaaacttcagtttagcctttaatctcgacctactttgaactcccgggtttgcattactcgaaaaccgtcggtgacaaactaatattaatctaacctaattctggaatttatgtgaatagaatactcagctattcagttacgacataaaaaaaaaattgagaatgttatttcatgtgaatacagacagatgcttttatcttccatgtgacagatccctttaaatctaatttgtctttattaggtcaatctcgcacttaacgtcaaaaaataggtgattgatacgtcaacaaaatgatcatattgttattttaatcattgatttgcttatataaaatctggtaatcacaacacatatataaaccaaaaacactttcagtgatttaacaatttcatatatacattataagttacacgtaaaaaattagattaaataataaatccataatttcttgcatgcttcattgctttcaacgtgaacaagatttttcacggcattggtgagtccattacgtctcttgaacacatatagatttgccttcttgagctgtcttttttattttaaacattaatataaagaatctcacattcaagatcgagggagagatagataaagaaagagatg

SEQ ID NO: 14399 - DNA, 3000 bp, Unknown
  misc_feature (1)..( 3000): cDNA_ID_3016775_gDNA_ID_2684115_Annot_ID_190783 3000 nt of promoter + ATG
ttaattagaaattgaatagctcataaaaaagttattgtgcaaaaaatgtaaaagattaaagagatttaccttatcactgaaaacacaaatggattcttagaataatttcatataagatggagaaaatacttctcttcttctcactagacgaatttatatatgaatctatcttcatgaaaactcaccacataggctaatgggctaatattttgtacaatgattggattccacataggctgaagtttggtttgagattctctcagttatccataaaagaaaaaatcacatttcgaaggtttttaccatataatattttcgaatcaatactaacatcgttaacttaagctaatcgacgttacgatcattttactttttcagaaatgtttttgtaagatttttgcaaaagaatatatcactattagtagggaaaatggtcaaaatcaacctagattatttgttggcgattttttcatacctaaactataatattgagtatatatcaacctaaactcattaaaaattcaaattctcaatctacactatatttaaatagccaaagtcaacatatgctgaaacgatgttagttgaccgcttaagacgatgagtcagccaatactgtggcaatgacggggcatcgaagttcagtaaaacaatgtcgtttcgtgagcttagggttctcgaatcgaagattcattggcgattactttatcgattctttgattcaagaaccctaaactcacgaaacaaagtcgtattactcaactacgatgccttgtcattgccacgatgtcggctgattcatcgccgttaagtgattaactaacaccgttttgacatatgttgattttggctattttcatataggttaggttggaaatttaaatttttagtgagtttacattgatattttccgagtatcgtagtttgggtattaaaaaatcaccagaaaatagtccgaattgattttggttattttcccaccattagtacgtctgttcatatagcgtccaagttgttgttaaagaaaccgcaaaatctctaatgtatgtggcctgttggaagatgagtgagcgagctctcacgtctgtaagaaaacctattaggaaaaggtgaaaatgtttacacttataaaagcccaacccaacttacaatatagcccaaatacaaattttagtgaaaattgaaatatatgattgagagatttgagaatttctccggctgtattgatcttttagaccgaaagtccaaattttgaaactttcattgatcaatctaactgtgacatctaaactccaaaaatgaatattacaatgaccaatataaaatttttacacaattacgtacaagtctttgtcgataaagaatgtttccatatttggaaccagtaaaaatgaacgtaacgtaacactaagtatcgttagctcaattagtaaagattctaggcgttcgtctagaggtcgtcggttcgagtgacgcttaggacgaaactaatattacatactgtggtttcgggtttgggggattatgggattcggcccagaaccttctggtattcaaaaaaaataaaaaatgaacgtaactcattatacgacgacctaaaaatatgtaaacacatcgatcttataaaacaaaaaataaccgattaaaaaatacgagtatatcaattcttcaaagactttgatcaccaacattagtagacattttcggtttttctgtttcatcaacattagtttcgtttagtttaactactacatcttcttgatcagcttcatacattctcatataattgtcataatacatatatatccgctattttatttgaaataaacttctatataccacaatactaacaagctatatatttttcatagcttatctttgccttttacattagagcttaacgatgtatatactctaagcatatagagccaacgatgtatcaatgacaagattcaagatagcatgattttcatattttattgcaacttagcgcaccatgaacatcaaactatactaaacggggatagaaaacaaaaattggtaaatattgtatttttgagaaatttaagacaagattttcatcaatttcaagaatacacatagtttgataaaaaaaaaaaaagaataatacacatagtaagaaatataccaaaagggtaatatagaagatataaagaaaatatcttatattaccagattaattacttatctaaatttggttatttcttttttttcaaaattagtcaaatatatatttaccattttcctatttttcataatcaattataaagaaagaaaatggaatgagaaaggacaattttctttagaggcatgacaaaatcttatcattgcatacaatgtatataggcatgacaaaatcttattgaccaccttaattaagaattttttttggtgtatggtatataagattttagtaagaatgatatatatatatatatatattaaattttattttatttatggtttagtccttaaaactcaatgctaataactaaagtagaaaataatattttttgtcctcaaatttgtttagttatgagttgtatatataatagttcacatcacatgaaaagaattttgttttagttctgagttgaatatgtaatagtccacattacatgtaagtgaacaaaactaacttaaaaagatgttcataactaactgttacttataagtaatcataaaatatctagtttgtgcttagataaaaacaatcaaattcttgtatttattaacgaacgagttatattgcgtattacttttaacttaaagggattgacctgcacattttggagataagggttaagatgcgaaaaatgacaagttggagggtctttttttatgttctttttgcaaaaacccctaaaaacacgggcttttaggtgtataaaacgaggcgattagataataaaatgcattccaacaacttctagatttctttcacattcaccaaactttctacagtcaaattcgattatg

SEQ ID NO: 14400 - DNA, 3000 bp, Unknown
  misc_feature (1)..( 3000): cDNA_ID_3016791_gDNA_ID_2684115_Annot_ID_190778 3000 nt of promoter + ATG
tgatttgcctgaatgaaaataatttattatacacagaaatgtatttgatttcaaaattcaatttatgtgacctgaatgacaacaaaattcccgaaaacaaaaccaaaccatgagatgttttaaccgttctaagttttgtaacccagccggagcatgtccaatgctccaccttgttgaaaagatatattaatatcatttttttgggccaccttttttactgcaaattaacaattgtttggctatatactccaaaatatgaaaaacaatagttgttttaactacttacaaatttgaggtaactccatgtattagctattaggaggtcaaattattcaaaattataactcaaattttcacgtttgcaaattaattcctcaagttttcgctaccacgcaacatcatgctaaaaatagtcaacgttaacttctacgttttcttatttggcgttgacttttttcaattgtatagtcaatttaaacttcaaaaatttaatgtgcgcacacacagttgagaaattaataagtcaattgcaaatatttaaggaataatgaataatttccctatctatttggtggtttaatctccaacttatcttttggagaatcttgtttcacagttattaactttcactaaaacaaatgagttctttctaaaataaccttttaagttgtaacctaattatagtcatatacacatacaaaaaatctacaaaattctatattcatatacacgacttttgctttctttcttctctaaaaccatcatctttttgtgtagtgaatttgagtgaaattaactttgatacgtcaaaaataattttatttttattcttgagaatttgctaatcttgccattaaaagtatttttgggatatctaaaaactaaaaaaatgaagaatctaaaataatatttgttctacaatatagagtaatctctttttcataacatcttttacaaagaagttacaagcaaaacttgaaataaatatgtggaacagcgttatcaaaatacatggaatgcttatgatgtttgctacataataatttttgtttgttacacattacttgatgttttcatttttcaatgcaaaattaattattttatttgtttttaatcatttatattctgcgctttgttgtctaaatagtttttaattaaaaaacattatgttttaattttgtttttaaaaaaaaacacaattggtttcttaatctatttaatcatcactaatattgaaacttaagaagtaatgttaaaacaaagtagccctatagggtttttatagaaattaatgtaccgttaagtaatagatttcagacatcattgactatcaaaaactaaattttcggacaaaaagaatttcattactattttaaatttgttgatgttaaagagaatagattggctgaagtgattgatgttaagctgaaaaacaatcacaaccatggaaaagtcacatcagcggcaagactggctagtagttgtgtgaggatgaaaggtaaaaaatggccaacaatggcgaagtggctgtcgaattggagcacattcgctcattagcgtagtcgcgtttttttttgtatttttttttttgaagaaaagtaaacaggacctagtgtgactgtgtgaggtcattgattcatgctgatcttcaagaccgatcgaagtgtagcaaacaatcatcctgcatgcaggcatctggttccttgagcagtctccatagctttgatttgcgtttgctcttgatttcaatctattttcacttattatactttaaaagaccttgaaaactcgaaaccaggaatattgaactgatcagatcctggaccactgcaataactgagttcatgtacgtacaaaactaatatgtcacgactaggaatttagcgtcctcgtgagattgagagagacacgtatggtgtcaattgcccgaaggtacagtattagtttgaattgggcaacaacaacaaaaacgtgcgttctctaatactcacttctctagaaaacaacaaatatgataacgtaacctcctttgcttcttttcttattaattaagaccactcgtaactaataaagatgatagatcttttatataaaaaattgtattcgtcaatgctcttttatgaaaacaatagttcaactacccatacttgcatctattagctatctagtattctcatattattacaaacattatgcagattggagataattaccaacatttctatataaacaatccgaatttggtgattataaatacttaattaccattctggaagtaacaatataacaggtagtatctatgttattttggcatgaaaggaaatgatcttaacttctcaaagtatatttcccacttttctcaagaagatcattaataaactaatacctcttcttggacagacatttttgagttatcttgtttttgtttcggtcactagttaagaaaagagaagaaaactcaacataccattttatcacgttatagccatgttcgaattgaaaactaaccacctaaaactagaggatatgatttcttatctattttttggtttcattttaagcaggaccaaaacctaaatggccggttcctccaaaactagttatattttttttttgtataattgcaaattcataaagatgaaaagagctgcattcttgggtatatacatgttaacatatctttctttagatacagtggtcctcctatgcatcacatgcaatatcgggtaaggtcaaaaagatattgaattgtccacaacacataagaagttaagatgtcactcgtggacattaacgtcgtagagtacccatatattcccatggaaattattggtattcgtaactcttggatatttttaaacgttgttaatactttaataaaatatattatattgtctaccgaatcaaacacagctgtatcaacaaaaataatttgaaacttgtataaatagatgaagtggatatgagaggaatgtaagccttatagaagagaaaaaaaat

SEQ ID NO: 14401 - DNA, 3000 bp, Unknown
  misc_feature (1)..( 3000): cDNA_ID_3016769_gDNA_ID_2684115_Annot_ID_190785 3000 nt of promoter + ATG
ctgtttcaggctctggaggagaagagtattcaattggagattccgctggagaattatgagatccgagtttcgatggtggtgatgcgtggattaaaggcgaatctgctagatccggtgacggagccggtgaggatttagttaaaatctcaccggagacgagtacgagacttagcatcatagcaacaataatgaattcgagcttcattttcaagtttttttctgagatctttctctgagaagttgtgatgatgagtaagtagaagaagagagatctggagaagttggttttaggagtgaaagagaagaagagagaattaatgaatattattacgatcgctagatttgcggctacgaaaagtgtacgactaatgagattgtgacacgtaggaaacgtatggaaatagagaaaggtgcgaaacacttgatcttgccaggttggtttttttaaatttgaaaatatggagaaagaggattttcgcgtagtaaaaaatgtgaaccgtagcgtgaaaccggcacgtgcggttcacgtgaagagctgaccttcacggtatctttattcaccggcactcgcaatggtttgggctaggcctgggaaaaaaaccgctaaccgattaaccgaaccgaaccgaaccgaaaaacatagttcggttcgagtttggatagcttaaaataaaccggctggatattatatgtcttagattccggtttcggtttcggttaggttagtaaccgataaccaaaggataaccaaagcatatatgtatgatagataatatatcacatatattgtatgtattgacacttaactatgttcttctctttattagttttgtgaatcatgtattttaatattatggagagtatggaccatatttgcatctttatgagttgtgaataggttttttttacagacgttctatatcggttattggtcaatttttttggttgtttcggtttttagtcggttattttggttttggtttatttatggttaccaagtttaatattcaaaccgaaccgaaagatatccgaaccgaaccgaaccaaaattcctcaaatatccaaatggttcttatattactataactaaaataaccgaaaccatgcgcaactgaaccgaaaccgaatggttaaccgaatgcccaagcctagtttggacgattaagagaaagtaacaaagaacaatgctatttgcatttctcaaacttttttaacagaaaaaaactttttggttaacaaaattcatttagcagcatataaagtttatatgatcttgcttctcctcaccacgaagttaacttttcgtagcttcgaaacgaaagtaaagatatccttagttttcgaggtaggaaaaatgcataatacagatatagaatccattttgaagcacgaaaatcagggcttgttcaataaattaagagttctggtataattctttaaaatgaatttttgcatactaaaaaaaaaattaaacaatttttcatgctaaaaaaatatttaaaattttaatcattggcttttttttcgtactaaaaaatgttttgaacttttttcatgctaaaaaatctttaaaatgatcatttcttcgtattaaataatacatttggacctttaaatttatccacaaaaatttggacatagaacatttgctcctcttgctctcctcaagagccggccctgacgaaaatatgtcacaaaaattaggaactacgtttctagatgtttcccatttctttttttttaaatcgtttcatcgttttgaatgtttcacttctgcaaatctgtttccgtttacatgcatcttagataaccacatagttctggtattcttaattttaatactgtatttccatctttatgtggttactcttatttttcaataagtgattctggatgcatatttattaactgtgaactgaataatgccggttacaaaaatttgattatctaactaagaacagcagtctatgaaacaccataatctgaagctagcgatgtcaaaatcgtaccttcttatttagttcaattgcaaagatgtttctgttagaattgagtccatgattaaaatatcatatatgctatagtttatatttaaaggcaatggatgttatgtgttacatatcatacactacgaatgggtgtgagtaagagacataacttatcggagaagttaaaactgttaccaacggttatgtagttggttatgtagttagttatgtatacatctatataagtgtgtatgttgtcttatgtaaaaacagtcgagaaaataacaagcttcagttttaataaaagaaagtcttgtttacaagacaaatgtctcttgctctgtttttcttcattctctctcaatattccaacagtgccgtgtgtctatgatctagtttttactattgatctccaaaattccccaacttatgaatgtcaacagataatttgacatgatcatgatgaatcaatttgagatggatatgaattgcttatactaaatgttatgtctgattagtcacacaaaccataagatatgataatactaatgttgttaagtagagaaaagcatacacgatataagatgcactgaaatgcatgaggtaatcaatactcttcctcttcctcttcttcttcctcctcttcttcttcattggtaggagtttggtccaagatctcaaccaaatcaaatcatggggtcaaatcaaagaacataccgcatatattagctactgatttatttttaaatagtttttgtgttttcgatttagtaaaatggcaaatactatgaagaaacatttagaaaaatatttgttttgccatcttattggctttctaaccccacaaatctttgttttcgactttaaataagatttactttgtaatcgtggccaaggtgatgagttcgatgactattcaaatttattttgaaacaagatatatatgatattcatcaccattcgtccccacgtctttctcgtttggaaaagaaaaaagaaagaacaaaccatg

SEQ ID NO: 14402 - DNA, 3000 bp, Unknown
  misc_feature (1)..( 3000): cDNA_ID_3016800_gDNA_ID_2684115_Annot_ID_190774 3000 nt of promoter + ATG
tgcaaggaacggatgtgatgcttcgggaagcatccattcgccccctatataagggaggacgcccaaggcatctcacatcatctcacaacatccaaaacaccataaaacattcttaaaggagtcccaacacatcctagagttgttggtcggaaagggggtgcggctcggcgagtataactcgaccgaactgatgcgcatgctacctcccggtccaacggttcgatggagtgtagaggatggagagggtagaccgttcgtcttagagacgaatcggatccgatagaccgatcgttggatcggatcggccagaccgatcatcagacggatcggatcggccagacggatcggacagaccgatcgtcggacgggtcggatgggacaggccgatcgtctgacggaacgggtcggacagaccgatcgtcggatgggatggatctaattgacgtattggccaatcgagaccaacatgaacattgagaacagttcgtattgtcgccggcttgaccatcggactgaacgtctctgtgaaatcaacaccggcttcctgtgattttccattagcaactaatcttgctttgtgacgagttatgctgccatctgcatcatatttatgtttaaacagccacatagatcttacaatattgaccttaggaggtctaagcactaaactccaagtcttagtcttaagcatagcatctatctcatcagtcatcgctggtgtccaatttggatcagaaaaagcatgaatgtgactttttgggagaggcgattttgtggtggtgagaagtgagatgacctgttttggttttcgaatcccagctattgcacgtgtcatcattgagtgacagggctgaatggaaataaattgtgtttgtggctgggttctttgagcaggaacactagtaggtgttggttttgagtaggaaatggagtttgaagaataggttgcaattgagaagaaggaacatcatcatcgagaaattgatactttgtgtctttttgatgtgtttcggttgccggaaaaatatcctcatcaaagtatacatgacgagatataatgatcttattagtttttagatcaagacatatgtagccacgatgttgtgatggatatccaagaaacaagcatggacttgatcttggagaaagtttatgaagattggaatgatttaagtttggaaaacaaaggcagtcgaatactctcaagtgatcatagcttggtttcttattaaaaagacgagtgtaggggatttggttttggatggcggaagagggaagaatgtttaataggtggacatcgacatggagagcttctacccaataacttggcgagagttgagcttgaaagagaagagctctaatcgcattgttaatggtgcgtatcattcgctcagactttccattttgttgagatgtgtgaggacaagaaaaacgaactgtaatttcatttgaatccaaataattcttgaactcatggttattatattttcctccattgtcgcattgacaggattttatttgggtattgaattgatttttgacataagccgtaaattgaagggatttttgaaccattaccaacgatgaccgagtgagtgatgttatgattaagattagagtgaagattacctgctgtgcccgagagatgtgcagtggcagccgaatccatgacccatggtgcaccattaggatcaaccaaagtctttatcgtgtaagcttgtgtgaagtcagtcgtcgactgaatttccgtcagatgggcttgttgaggatactggtgtatttgaggaaagacatatgggcctcggtatgagcctagttgagagttgggtccccagttcgcaaattgattgggccacagattaaatggtctgggccagaaatttgagtaagtctaattttgttgattggggtgaaactgattgttgttcttgtttcctctgaaatgattgtttcctctgtagttgttgaatttatgcggctgtataggcgaggttgttgatggggttgcagagacggtgagagcagtggatgataatgagttatccttgtgtgttgcggaagctcggtgttactttttgaggcgagtttcctccaattccaacattgacttagccgtctcaaaacttggaaacagctctttgtgtttgattacgttgacgatgtaatcatatttgtcattgagcccgttgaggaggtaagtgaccagatgtatctcgttgaccggtgcatcaacattggcgagcagatcagcaagcgatttgagtttttgacaataagcctgaatcgtttgttctccaatctcttgattacgcaattcattatctagttggatcgctcgagcctctttgttgttgcggaattagttttcgattcggatccaaacgtcacgtgcagtgcctccagtcttgaatgatgagcggaacagatctggagcaagagttccatagatccagagtttaacgagtccgtcgcgtttcagccaagaaccatcgttatctccactgggaaacatagtaccatcaaggtgtcctagaacatcgaacgtcagacagcgtgtctggaaaagctctctccaagcatcataattgtgatcattgagatcgagaattaagagtatgtgggctttgatatttgtaaccccaaacgctcgctctatcgctggaagttgagcagccattggagacttttgaagaagaaaaaagagatgaaagaaggaaagaaggaaaaaaggaaagaagaaagagaaatgagagaaaaggttaaggagcgatggtgctctgataccatgaaagttaatgaattcctcttgagaggatcgttgaattgacaaggctatataaagccaatgttgttacacaaaatcagggattaaaaaatcatatatacagaatatataaaacagattgtaacagaacgtccctatattctatcatggatgtgtactttaattttttttagtagtaaatgaatgaaggtgttaaaaaaaaaacccaactgggc

SEQ ID NO: 14403 - DNA, 3000 bp, Unknown
  misc_feature (1)..( 3000): cDNA_ID_3016908_gDNA_ID_2684116_Annot_ID_190791 3000 nt of promoter + ATG
attaggcaaaatcgattttcccaggtttgatggaagcagaatcaatgaatggctgtttaaggttgaagaattttttggtgttgattttactcctgaggatttgaaggttaaaatggcttccatacacgtttattcagtctggtgtgggtttggatgttatgtttgattggcctgaatatgtgaaattgttgaaagacagatttgatgaagatgatgatgatccaatggcagagctgaaaaaattgcaagagacagatggaattgtggaatgtcatcagaagtttgagaatattaagatgagagtgaatttgtttgaagattatttggtgtgtgtgtatttggcgggtttacgtttggatacacaaatgcatgtgaagatgtttcagccgagaatagtgcgtgattgtttgcgtttgggacgtttgtatgaaaaggctcatcctaagaaaactttttctacaaattggcaatctaaagcaggggttactacgggtgtttctaagacttcgcgtgacgtggatcagaaaggtgagaattatggcaacaaggtgtcttttaaacctcaaaatacaaagaaattaacacagcaagagatgagtgataggcgtgctaaggggctttgttatttttgtgatgagaagtttacaccggaacactatttggttcataagaaaactcagctttttagtatcgatgttgatgatgaatacaaggatgctgaggaagttttgtacaatgaagaggaacctcagatttcagttaatgcagtttcaggagttgctggttatcgaacaatgcgggtcaggggaacatatgggaagaagcctgtgtttattttgattgattcagggtcaactcacaattttattgactctgctgtggctgctaaacttggttgtgcgattgaatatgcaggtttaactagagtttctgttgcagatgggagaaaaattaatgtggatggcaagatttctaagttcacttggaatctgcagactacaacatttcagtctgatattttactaattccactacaaggtattgatatggtgttgggagtacaatggttggaaactttgggccgcatttcatgggagtttaaggagttggaaatgaagtttaagtacaataaccagaaggtgctattacgtggaattcgtgaaggttctgtccgagatgtgaaagcacagaaattaagaaagttggatgatgatcaagttcagattgctttgttgtatgttcgtgaagtgccagcagaagaagagttgttggaacagggattgagttgttctgtgaatgcagtagcaaagacggagggtgatgatacggagatagaggagcttgtcaaagacttccctgatatttttgctgaaccaactgaattgcctccatttcggactcaacatgaccacaaaattgagttgttggagggctctaatcccgttaatcaacgaccctatcggtactctattcaccagaagaatgagattgacaagttggttgaagagatgttacaaagtggtacagttcaagtaagttctagtccttatgcttcaccggtggtgctagtcaaaaagaaggatggatcttggcgtttatgtgttgattatcgggaactcaatggaatgactgtgaaagataggtttccaattcctcttattgaagatctaatggatgaactgggagggtctgttgtcttctctaagattgatttacgtgaaggatatcatcaagtgcgattgaaaaataatagtagaaggcagtgaattgttttacgaatgtgaaagaccaaaattttagacttaagcatacatggcaaaaggagagacttgcagttttgggaaaagtgactgttgatttagtataattagatgaaaagtaaactggtagattaattaaggtaataataaaataacacgagagttgaaccaaaaaacaaattgaaataaagagtaaaacgtgtacttccaaaacggcgtcgctttacgtcgataacgattcctttatgggcattaccatctgatctccgtcgcaagatctgtcggccgagatgatttcgcagttttctttctcagaggcggctcatggcgacactgtgctttctcccatcggcttgatttcattgtgattttctaaattgaggatatgattttctgagccatgggaagggagagaagaaagcttagcttgagcttgaattatgattcatctgagaaatgcaggcaaatgttgatgcacatctcctgttgttcaagtaaactttttctgattcgccactacagtatcttgtccgttcaatttctgtctgattgatggccttttttcgttcaaaatcattgtttggtgttgatgagaacacgggagctgcaaatcataggtatcaaatgccaaagacgagtacttggcgtgaacatggtggacttgactttgtattcagcttggtatgaatatttttacaagtttctgtgtctacctaatttggattatgaattgtttctttgttaggatgtatttgcttaatacctgaagatatattggagttgagaagaaactagtagatatatacttatttaactagagattctgattttagtattgtgggtttgttcttgatgatagtggaaaatattctttgaaccagggaatgttatagaagtctcagtttttttatatctattttagtttagtattttaggagctgttatgtttaaaatatgtgatggcttagtatatgtaaatgttgcatgtcattacatttctcaagtcaactctgaaatgctcaaagataagatgttttcattgctcttagacaaattcaatggatacaagaaaagttaataaattatggtggatttgacattgaaaaaatattggatgttgtattatatagtgaaaaagttttgacctgaccttttttgcagctggagaaaatttcatcgaccattggtgtgaaagacagtttctttcagaataatcagactctctgtttcttcagaaatg

SEQ ID NO: 14404 - DNA, 3000 bp, Unknown
  misc_feature (1)..( 3000): cDNA_ID_3016896_gDNA_ID_2684116_Annot_ID_190794 3000 nt of promoter + ATG
taattatttaactatttcttaggcatattttaaaagtctaaaaaaacaacgaagtcaaaaaccaaaaagggaattttaaaaagggaaattggcaaaactaaccaacaaaaagtttataattaagaaactatcataaaaaaaaaaaaaactgatatcctctatattttgtatattaattccaaattcacctttctatctatttctctcatctctctttctgtgtacctctctcttccgttctctctctcctctctctttctccctctccccctctctctttctctctctttctttttccctccccctctctctttctccccagtaaagtccttacagctacatcgttacttatttttgttttcaaatcagagtctcttaattacttttgggtgagatttgatctgggggtttcgaattacagaggaaggaacacaatttggattcagagagtcgactttcgttattgcgcttggtgtcttggtgatgaaattgagttttgttgttgcaatttgagagatactattctatttgtaaatatactatttccgtataccttgttctatatacgttttaaaatgaattatttcttttaattaaggatgttaagtgatttaattattggtttagatttaaaccattgggttccctatatattatcccttagggtttaatatctttccatcaaaaaatattgtgtatctatataaaaggttatgttattcattgacaacactattcacatctaaattattttgtgtctgccttgaaaatttaagtcatgatatatgtagaaaactatacaactttttaattgatatatcatgaacttgaattattttttttaagattagataatatgaattacaattgggaaggggtaaagaaaaaagaaagagaaaaaggacttctctcctaccacctgattttttttctcacctcaacaccaataataaagtcacgtcagctcacactaaacattctccttcctcgctgacaaacgtaacaccaggccagtgatgtcttttcacaccccttaaaggttatttactacatttataaatttatggtgttagttagttaattatttaatgaaaaagtgatatatctgcaaatcacccttttaaaaataaggatatcaaggaaaaactactactgtatactttaaaaaaaaaaaataataataacattataacgagaaactatcgagaatccgttgggcgtacttaaatgaatcagtttctttaaaacttacaacattttcatacattgaatgaaacataaatatttgtcaagatgaaaagacaaaaatggagaagttaaacgtccttagtgcagtgtgacataatatgcactttaaattattcatgagaccctaaattagttgcagttttttaaatgaaaatagtttcttatacaaaaaaaaaaaagcagagcagttcagttatacgtacttcttaactaaacaaattatattctctcttatgttttgccattaattagattgttgtgaattaattgctggcttgtaattcttgcgagaaataatttatatatctgatttggtttaacaagaatgaatctgatttttcaatgcagataacaaatagtaaatgtaatccaaagcaggaacgagttgtccaacaactattggaacaagtccaacttcttagccaaaaatttgattctagtaaagctattctggtttctcaaaacaatatcaagtttgattttaaacttgcaagagaggcaattgtttctcaaaccagtagggcctcagagatgaagggagaaacttgtgtcatttgtctggaagaaaccaaggccgatcgcatgttcgtaatggataaatgtcttcaccgtcattgctatccttgtgttaatcagttagtagaagtgaaactgcgaaacggaactgtgcctacatgtcttgactatgaatgcaagttaaaactaagtcttgaaaactgtttcaaggttttgaaacctaaggtgattgagctatggaaacacatgatgaaagaagagtccattcctttagcaaagagaatctattgcccatatataaactgttcaacattgatgtccaaaaccgagatttctcggtctaataaatccaatgaccgtgcatgtatcaaatgttctggactcgtttgcattgattgtaaagtaccatggcattctgatttatcgtgtgctgagtacaagaaacttcaccctgaccctgtacttgatgacttgacgctaaagcttctagcaaacgatcaaaaatggcgccaatgtgtcaagtgtcgacacttgattgagcttaaccaagggtgcaaccacatgacttgcaggtacatataatacatatttaactcaattaagacataactagagacaaaacgtttatgttttattgtaatgtcgttgtggcctttgtagatgtgggtatcaattttgctacaaatgtggagttgaatggaagaagggtcaagtgacttgtcctactggttgtccacgtactggccaaggttatttttatgatggtgaatgaagatgattgggatgatttgtatgctcatggtggactggtcgtatatgctgaatatccatagttgttatgaaacactcttttctcaattctttgtatcttatgaggtctagagatcaacaaaaatacttttttttttttttaatagtactacttttccgataacattacttttccctatcgtttttgtttaggttttttaattttaatttacttttttgatatatatgaaaaaatattccttaatttgataaaagtttaattttcttttttttgcatagggctctttcttttttaatttctcttagttcccttttaattataaagttaattagtttaatcacacgaacgagctaggagccgcttctgatatataatctataaaacctagaattgtatgtgtcgagtcattaaaccttaggccccctacgaaaaacaaatcttcaagtatgtgcaacagattcatg

SEQ ID NO: 14405 - DNA, 3000 bp, Unknown
  misc_feature (1)..( 3000): cDNA_ID_3016892_gDNA_ID_2684116_Annot_ID_190795 3000 nt of promoter + ATG
gaatcactcgacttagggatcagaaagatcgtgatctattgtgatgacaatgagctttaccaaaacgtaagtgtttactttactttggtataacttttttcgtgaatattttggcacttttatctatatcatatcttgttttgtgacgacggtttcattgtgatgttttggttaaacaaaactgaatctgatttgcaatgcagataacaagtggtaaatgtaaacctaagcagataaaagttgtcaaacaacttataaaagaagttcaacgccttagggagaaatttgcttctagcgaagcaattctggtagccgaaaacgacattaagtttgcctttgaacttgcaagagaagcaattgtttctcaaacaaccagtgccgatgatgatggacatgatggtgacaataatgacgatgaagatgataatccttgggcttacggttgtggttgtgattggtgtttacctgatcctcccactaagcccaattacgatgccgattacattgaattttatagtctttagtctctgtgtttggattaatacatagatttcaaagttgttttgaattttctttctttggattttctatattgttattcgattaatttaagtttcattttgcacattttacaaaaatgtcaacctttttttttttacttttctcctattccacaacatttaattacaggcaatgtttttaaacccgacccggacgatgaaccggactaccttctgggtcaccgggtcatcaggtcaaccgggttggaccataggttaattagttaaaatttatttaataaatttaatattaatagaaattttagagtattttataaaaaacaaaattagtattataaatataaaacaaaaataatcatatcatatttaatcaaatataaaattatattatgtttaacaaaatataaaatcatttacacccaaatatatatatatatatatatatatatagaaaaaatcaaacaataataataaagtggttaaaaatttgaaatccaactaaatgtctaacaccgtaacaaatatattaggagatcatcaatgacagaaataaattaataaaacatcgtgaattcaaacaactaatctcggttgtctctctcaccattcgattcaattttaaggcggtattttaaagtgttcaacaaaatctaaaacatcaaatgaatttaagaactgaaaaaacttttaaaaataattgaataaagtctaaaatcccatattttattgtaaaatcaagagaactttttaaaacccacacccggccggttcaaccggttcaccgggtcacgggttaattgcgagtttttgtgggttttttcggttttgaacttgttgggttttagcactaaacccaaaccggaaaagtgttcgggtcacgggttaaccggtcggaccggacggttcgggttgggcgtgaaaacactgattacagggctatcttctgtgttactggatcatcgggtcaactaggttgaaccacgggtcaactgattaaaatttatttaataaatttaatattaatagagatgatagagtttttagagttcttattaatttaaaataatcatatcatgtttataaaatataaaatcagattatgtttaataaaatataaaatcatttacaccaaaaaaataaaaatatattttatatatatgtaatcaaacaataaaataaagtgattaaatttttaaaatccaactaaatgtctaataccgtaacaaatatagtaggatatcaccaatgacgaaaataaactaataaaacatggtgaattcacataactaatattgcgtgtctcactcaccattcgattcatttattaaggcggcattgtgaagtcttcatcaaaatctaaaacatcaaatgagtttatgaactgaaaaaatttctaaaaatgattgaataaaatctaaaatcccatattttattccaaaataaagaaaatattttaaaacccacaccgaccgattcaaccggttcaccaggttatgggttaatggtgagtttttgtggatttttttggttttaaatttttcgggttttagaactaaacccaaacaaaaaaagtgtttgggtcatggttcaaccggtcggaccggacagtccgagtcgagcgtgaaaacactaatacaagctcattctttagcctgaaactctagctttatgatttatgacatcagatttgtaaacgttttcacttccggtttacatttctaaacctattaaattaatgaatattgttgacagaataatgttatgttgttaacttacaaaaaaaaaagtaaaacaagattaagaaaatcctataaaaattgcttctctctcgaaaagtctagccgctgatctcttgccttgtttgtgtcccatgatgtttactctcatttgatattctatctctaattatagtctctgattcttttgatttgtggagctttgtatttggaaaaaaatcaagaactcatgtcttattgttaatttatccaaaattttaattaaaaacataagtgagacgagagtcctaatgattggtaaaatacgtattgatttattcaagagaaacaaatagttgccaatccccgaaattacttataataaccccatttcacatttggttaggcttaataaaaggtccgtaataatcttattaagaaccccatttcacatttttcatttatatcttatataggatattatgggttttttcacatttatcttagtaattagttttttttccctcactaatttaaatttaattaaataattaaaattcttaaaatattatgttttgttgagatattcgtgagagtatctaaacaagtagatatgctttaagtttccatttctctctcgtttcttgtttcaatagttatccttaacttatcatataagatttgtttaagagagttctacgagtcataaaacctaccttaacactaaataatcttagagtttgcacaaaaagtacgagaagatg

SEQ ID NO: 14406 - DNA, 3000 bp, Unknown
  misc_feature (1)..( 3000): cDNA_ID_3016880_gDNA_ID_2684116_Annot_ID_190798 3000 nt of promoter + ATG
ttaattaatcgtaaacattaaattttcgtaacttacataatttataatgggttttttcttctgaatctttttgcataaattagaacgcaaaataataatttatcgtgttaacattagatttttgacatcaaatatttaatagatttctgtttcatatatattttactttttatcaatgttatatagatattatcaaatttaaatagttttctttgttatttgaaagtttcctatgttaaaagttacttttaaaaatatttgaaaaacaaaaagaggaatgacgatatctcatgtttatgattgtaagtatattatatactagaaaaagtctcacgcgatacgtaagtgaaatgaatatagtgaaatatacgactttcacgtctaaatccgacattgttttgctcgtcaattcatattcgttgggtttaagattcaccgaattgatcgaagaagagaacgactctttctaaaaactcatctatgttcataaaattcaaatcaaatagattaggtttggcgatttaatctgaccaattttatgaggtaaaaaatcaagaaagaagacaatatcatcggagccaatttgagggaagaagagccatcgagctagtaactacaacgacttgtcgtttcagattttatagagattgtgaagtttaacgatgatgttataactggagaaagaaaagaagaagaagaagaaaaaccacgaagcttacaaatatatttatttgtaaaactacaatgtgaattatgttagcatgttggtgaagttgtgtctctagacaatagaggtcatgggtttgagactaaatctctaagtttttaaaattttgatttttcgtaaaatgaagtcgttttgtgttggcgatatacacgtgtcattcatgtcaccacgatttcacagtggattaacggtgtgaaatttttacacgtttctgtaagatttagcacaaaaaaattaactttgggtttgaaattcaaaattttttaaaagtgcatgtatgatttaacacacatataagttaaatctgtgaattcaacatagttcatttgtgcaggtatgaaaaagccgatttttggtaaattaagttataaattactgtttagtacataagcgtttatctagatttgcaaagatcaaaaattttaaaacttgacccaaaataaaccaaatatgaacaaatggagcaatgtttgtatattgaaattctaaactaaatgaaggagacggaaaaagtaatcacacataaaaataaaaggtgaatatattaagaaacaccaacctgaaaagattttatgtatcaaatgaacaatcgcctatatatgtgtcatttggttaagtactcatttttggtgttttgactagaaactaaatactttccaaaattaatatgaattttagcaacttgacaaaataggcatttcgaaaacaatatttgttaacttcaaaacatgatgaagaagtagaggaccattaataattccactctcattattttctcttcttttccaaataatcaacatttccacttaacttctgcttgcttgcttaaattctgatcagcacagctattctctctttcaaacatgccacggtttctgataacgattgcactatgtgctccatctatgcatcaaaggcttggggaatattaaccatgaatctagcccaaccttgaaaatatataactgcttagatatacagcttacaaaaaagagaaagaaaggcaatgagagtccgaggaaaacattaccgggtgttgagcaagaaactggttttctggaacaagggctgactcgtcaaacttttatctctctggatccatcgtaaccttccacgctcttgtcgcttgcttatgccatttaagtccgacccaatgcttttattataattataagatacgtcgttgtttatttgtatttttatttacaaatctgaaaaccaaaaaccaattttctcgttgtgtataccactgctctttatggatttgaccccgaatatattactacacacttcaccgtgccctattgggtaattactcggacaattataacactaactaaataaaacgaaaaattatcatatgtgatctatctcatagaataaaagataaatcgtctttgttcaggtaacttttcattcggtcaatctattgcatatggcataagaaaaatgactgcatctacctcaagggccaccttctgatcgtgtcgcactcgcctcatcgacaagagcatcaagaattggatgacttcactttggtatgagacgttggtttgcaaacaaaaacctctaagttcaataatacttgtttttttattgtttaattagctttaactttctatcatttttaaaatgcaaatttcttttactctctctgttaaaatagatatctaaatgaataatttttacaaaactatatataaaaaaattagtctaaaacaaaaatatcattgacgtcacttcaatatttttttggtcatatcacgtacgtgtattatactcatttcaatgcctaacctcgaaagtaccatatagtcggctcaaggttagctgtcatgactttgatttcttccttcgatgatctggattgatacaataaaataaaatctttctttatctatagggtaatgatttgctattatttgacttataaacaataaagacgactagttgagagttagaagagataagataaatgaaaataaagaagtcgaagtaaaaaaatgtaacatggcagacacaacccgaacagaaccattgacattagcgtttaaattaaacaaagaccaacgacgtgcccactagttgtattagttaagatttgtcaacgttaatattagtttatatatcataatataacaagtggcattgatataagtagagtatatagaggaacaacttcattgatccactattattacacgaaccaaagtgctattacccccaaacattaatttccattctctccacctctgctacctgcatccgtcatg

SEQ ID NO: 14407 - DNA, 3000 bp, Unknown
  misc_feature (1)..( 3000): cDNA_ID_3013477_gDNA_ID_2684116_Annot_ID_190808 3000 nt of promoter + ATG
ccgccaaactcttttattacaatatgacttgttttgaatccccaaaaaacggtttgatttgatatgtttaggatttcgttgctatattggcgatggcttttcaagaataataatattttgaatgattagtggtgttaaaagtcaggaaaaactatttggaaagtgaacgaattttttgttcaaattatctctatgtgtatagtttatgacgatcacaaaacaaaaaaaaaatgaaatcgttactcaaaataaaaatgagtaataatatcatcaatttattttcacatgataaaactaaaattcaattaatatttatgaaacaaaactatcatatgtatatgattatgaatccaagttaatttgtgagctacaatgtttggatagtttgcaaaaaccttaaaattcaagatacgcctctaagctagccaataataggtttaacatcaaattctctaacttcagtgatcaatttttctgtggcccaatgggccttagcccaagaaaactcaaaatgttcaaactggtttctatacagaacagattacgagcttttaaagaagtttccaaatcaacatcaccgcttaagcggaatctgaagtggacaaatgacaaaatatttccttacaaaattttgagggatcattgattaacagatcgtaaattttgatgatattaactcaagaagcgcaagatgcataagaagagaactgagaaatttcactctgttcatatattatgattggaagaaaaatgaatattttgttttaaaaaaagacataactttaaatttataaaaaaaatataaatgattgttaaaaggaaaatgtatatgtttgtatattatcaaaattttataacaaaatgtagctcaaaatataatttggggtatattttgtcatattaagttttgctaaaattaattataatttaatatttttaattgtttatcacaaataaataaaaatacttttactttttagaagacaattcatttacattttcttgggtcaaaattgggttaaaatagagtcaaaatcggattaatttggttaaattttagataagtcaaaccggatgtataattatcggttaattggtcggttcaattggaggcatagttttaagaacaaatccgaaagtatatgtagttttatcgagattaaaattttttatggtgattttttaagtgactaaaaatttatggtgaaaagttgagattccaactattatagggctgaaaattcagacaacccttctatttttgaagaataacaatttttgtttggtcctatctaaatgaaaactcctaattagctaatgctatctcattaattatctatctaacaaaagctattttgagcttaaacccttcttgttttggattctccaacaaacataacctacaaataatacagatatatgcgggactagaatccaaatgataacaaatgacgaaactagtgtaaattattaaaatacaaaatttctatcgtattatatagaaatgtgtgtattcagtaaggtcggtgtagggatttattcaattgacttctttaagagatatggacgttatgacaaccggcttttgtatgtgttccatgcaaattgatttgaaattgacgaataatttacaaagactatgaaaaaggaatcgattcctttgtattgtcgcattatttccctacacgtaacattatagttgtattgtaatttcttttctttgaataagcacctctcatttgtattaatactttaattagacgagatatacaatttcgtagcatttcgttcaagactgagattggctataagtaatttaatccgttggagtattttgaataattaatagtccacttgaagtatcttgcaaaattatgacttttaataacaaaattggttaagcgttacaatgaagtgatgtcatggtcaaaagacatcagcgcaatatcaaaacacaatgccagttgaaactataaatttcgaaaatttaggcataaactgagattgaactacttatgtcaagatcaagatcaaatgaatagtctacacattatatacaatctagtaactccaataatatcttctgaggtaaagcaaaattccataccaaatctcttgtttatatactttagtaaacacatacatatgttttctactttgatcctctcatgtttcttctcttcctgttcatatactgctttgagtttgaaatgtgctccaatggagtgtatatagccttaaacatcttccattaaaaagcatatcaacatcttgaaatattcttccttaagtccatcatttcaaattttgaacttcaccacttacttatttttcttagaaaaaatcaatctatatagtttattcttctagaataccatttaagagagttgtcttgatatttaactcttctagctcaagatatgtagaaaaaatgagcataccaacccaagtgatgaattatatgatttcatcaccataagaaaaaatgttcaaaaacatgaatatgtggattaattcagtaattatacaaatataaaatcttcaaaaatatcactgagctaccgacatggtcactaacatatgtggatctcaaacgttcaaaacctaatcctatcttacgtaactttcaaaacctaattattacgtaaaaacttatcactttaactttatatatatgcagcttagatatcaatatcatgaagatcttttattttagtcaaaacagccttaaaaataataaaatcaaatatttgcgtcacgacaaaaaaataaacaaaattttcttgtttttcttggtaaacatcaataaactaatcaaatgacaataacacactacccaatagcaaaatcagactgtactgacacgtgtcaaagcatgtgcagagatatgtaaacccattatgtcttcatcacctcttctttaacgcctctggctctgcatttctcagtctttttgcacaagaaacaaagctcaggaaaacctcaaaaccctaagctatg

SEQ ID NO: 14408 - DNA, 3000 bp, Unknown
  misc_feature (1)..( 3000): cDNA_ID_3016837_gDNA_ID_2684116_Annot_ID_190812 3000 nt of promoter + ATG
ttgtgttcggacatggtccaactttttgtttcaataccgtacggtgagttctagttatagttaccggtaaatccggttttatcgtcgccgttctttggtattttgcctttatttgtctttatttctaataaacttattaagtttcttcattacgaagaaaaagtggaagtttaagagtttcggcttcataagccttgtcgttcaaattttgtagtagtttcacttgatgggcatggcgacgttaagtctcaccggaaaatctttttggttgcttacgtcattgtgatgcttcatgctactttggaatggtggacgctttccttcatatgaaagaaagtttcgttcgtttgttaaatctgagtttaatttcgtttggaagaggaagactagatgtgcaatttctttagagggtcttcagtgctctacttgaagcttctggttttgcggagtgaacgaactttcggtgggtaggcgttcttcgatctcagaaaacatgccggcagtggttggcattctcgacaaacacgttcttctcgtcacgtgtctgtgatttcctcatgaggcgacacatgtctctgtgttgtatggctttcttatcccttcctcgatgggttactatattgggctcggtttgacttttgttgttggacttttgttttaagaaggctttgttttaagaagaaagagatagcaaaataggcaaaatctctatttgcgcaaattggttttggagttgagaagcggatctttgtggttacttttcgttaggatatctgtgtaagagggccttgcagaagttttggattgattggattgcactcatggctccatcagatcgcgtgttaagtgtaaaggttccccgaatggggattaagtgagagattcagtttctccctttttagtatcttattttcttttgagatttctgtaagatttactctttcaatagttcattgttagtttacaaatttgattcgtcttttaccgaccaacatataccatttcatttccaatgaaagcagacaagataaagcagaacttgcagattatgaaaatgttcaattctgagtagatgaaaattaaaggagattatctatatgtgtttgataatttaatatcgtaatgctcattagcctatcgaattctgtaagtggagttttccactattgtaacactttgttgttatatatcaaagccaacacttatgaagaaaaaaaagtaagctattttcgagttcgaacaagatattaatatttagtttacaaattcctctaaataatcgtatgcgctatataatttatgttccaacattatcgttaaaaatattgattttgttatgaaatttatttaagttagagttctatttatgttaaggaataacgatgcatcgttaaacttcactggattataaccttctaaaactattccaaagtcatctaaaagtgatttcaaatacttaaccttatcaaaacaatgattgtttaaattagttctaaactttaaatcgagtacttcctagatggacaaacgaaaatcattaggtacgggcaaaatcgaaagcttataaagagcttccaaatgcatgtggatgatatttcccttatgaacactcttttgaaaagaatggcctagtcgtttattccattgttcatctgtagaacgtttaaaagcttgaaacttgtggactgttcaaaggttttgaagcaagtctccattgcaacaacttaaaatgagttcttctttgttacataaactaatgatgcatgagtgtgttctatcactttgttactttttcagcttaaaatagtttatcccatattcttttgcttattactttttttagctgtattttattttgaacattgagttactcttagatacaaagatatatatgaaggatagtattcgtgtatgtttatgttttaatttacgagtaaaatattttctgaagtcacatgtttgagttttgttgtgtacagtattcttatttgtaatttgttcttaatccggtacttagatcatcataatttatagaaaaataattattttgatgaaatttcattgtattagacgattagttttataaaacttgtaactaaatttctaaatttttagatttatttccacatgatttctgaaaatatcggatatgtagaagaacaaaaattaaaatataatcattgggttgaaataaaaccaccaccaaattaaatcagtctttaaccgacgccaaccaaaaataatcgaaccggagatagtggcagatccgtaataaactaataatctaagggcatagttaattcttcttattaggcaatcgtggatctagaagcggccaaaatctcagccatccaatctctctcacttgttgtctcttgcaatctcccacttctctcaatcttcttcatcttccacaatctccgatcgaatctctctactcagccgtatgttttcacttctctcgtaattgactctttcatgttgggatttgaatcgccgaatctcaaaaccctaattctggtgtttcgattttagttccggagtagttattgagatcaacgtgtttactgattccgattgtatgtagaaatctcatggagattttggattgtcgtcgatatgtttttttttcgattgtactgtttcgttgacgcgtctcttattgaaccgtcgcgtcccatgcacggattcattatggactttggcttgttagattctcgatttcgatctgaaagtttgatactttggattagtttaagatttgctaactcaattttattggattagtgtataatattagtttctttgatcgggaagatgttcaatttgaactgttattagtaaaactgtcgatctttttattctgtgccactatacacgaatgttgctgaattactaaagtttaggtagttttgtcagtatggtttgcttttgcttgtatgtcttatgatgagacatgattccagtctttttatctctgtcttgttcaggaaaaaaatg

SEQ ID NO: 14409 - DNA, 3000 bp, Unknown
  misc_feature (1)..( 3000): cDNA_ID_3016841_gDNA_ID_2684116_Annot_ID_190811 3000 nt of promoter + ATG
attaaatttggtacatgacaatgggagagattgagagtaattaaatgattaaaatttgatttattcctattaaatagtgtaatttgttttgattatttctgattttatctccggctcttttttgtgttgaatgtatctttaagaatatttgtttttgtgaccgaaaatatcatatatgtaacgaataattcgcaacaattaagtggcaaaattaaaccattttttaattgattagttagatatcccaataactaaactgataaagtaacaatttaggaaaatgattacctcttttgataagagataaatgagaggtaaaaatcattcaaaggcgttactgttgtcactcattgttaatgcttagtttgtctccaaatttgctggcgactaactattctcgtttagacaactcgagaacatagagatgaaaacgtgagtatatacaacagaactcaaacaaaatattactattatatagataccaactaatcttgagtttatattttacagacactttggaaattaaggtgaataaacgttttgcaaggctgtcacattctacgactaaaattagtgattcataagaaatgattggtatccaagtaaggaatattgatcattacattgcaattggaccctcctcgtggatcaagtttaaaccaactaacgatgaccatttcatatctcttttgagttattgtaatataatatatttatttatttcattacaacaatcaatttttattaacaaattatagtttcgaattttagatcagataaaagaaacaaagtgattgaggatccgcatgataaggattaaaaaatgcgacacgtgacgaaaaaagaaaaaatctttgaagaaatcgagaagagagacaaagaaacaaaagtggggatcccagaaggctctgatagatatgagcatgtggtctcagtcaaggccaagactcaaagctgagaccaacccacttctattatagatacatacaatatttgttttatatcttgtcatgtattgatgtatatctaagtagatttatcataattatcgtaccatgctaagtgctaacgaataacgatcgttcatgaatccaaataaaatcacgtcaggtgctgcgacatggcttcttcattcggtttgttactgtttttttttcctctctttttctttctatgatcatcataaatgttgtaaaactatgttaaaaaatcgattcatgtctttttgtgtatgatgaggaagttttaacatttctttaggtatcatatatagtttatctttttgcatactataatatagttaactattttgtgcaaattttataaatcataattttttaaagtttagaatctatattggtattttcgtcctatacgaaaacaagtacaaagaattaattatacactacaaaaaaacgacattaattaattcatatagttgtacaactaatactataatccatcggttcttttttgtttgattttaggaaaaaaacgatattaagaaaacatattaaatgtattattctttgtgatttacaattttcaataattctaaacgaatgatattcaataatttttattaatatttacaatttatcaattataattaacaagtattgcattaataacttaaaaaatcaattttttataaaaacaattattctagaaaatccaaaaaaaaaacatatggagtatatattagaaaaaaatcccatggctgataaataaataattgtatatatatatatatatatctcacgcatacatatataagatatgatatcattactctataagatataaataattttattctatattttgaatagtccattttcatatgcaatttgaaaatttataacattataaaaaagggtaataaaacaagtagtggatcggaccagagattttgaggcgcaatttccaaagcgatctgcatctattcttacctccatcttcaagcaaagcatcaacgcctatagattcccatgcaacgctattttctttataacatataataaaaatatttctgttgctttttattcgtttcactttcctgacattgtttttgtttattcttactttctattcatagaattaatgaatccttatcatatgatccgttataagtctctgctttcgaacttaggaaaattaaattcgcattttttttatcaatgacaataatcataatcactagctaggttaggtataacttataaggtctcgcacttccttgattttaaaataactttgtctttaccaaacaaaaataactgaaccgtaaataccaaaatattttggataacaaaaaatattttttaaaaatatatatttcaaaatattagttatttctaactaaaaatagttgaaaatatatataaacagtaaaaatatttaaaaataacaaaaaatattgaaaaaatgacaaaaatatccaaacataactgaaatatccgaaaatattcaaagcaaataaccgaatgaatactaaattttaaaaccaaaagaaccggagccgaaccaaaatcgaaccaaactttcaaaataatcgaataaatattaaactttagaaccgaaaaaatcgattaccgaatagatacaacctaaactgaatggataacagaacgtcgagaattatttttaatggtcaaatcagttgccaacaattttgaggcattaatactctcaattttgccaaaacaattttgatctatgaatctggaccgactctactctccaacccaattggtattttccatctacttaaaatatgggcttgtacggcccaaattattattttactcatatcgttttaacgtcattaatgattttctgaagaaacgtaaacatttgcactgtatgacgttttagagtgacaaaaacaacagatcaacaaatttcgattaccgtagacgacacgatgtttcacacccgactacgaatcacgacgacttatacaaaacagcaaaagcgtaaagacttgaacttaaaacc

SEQ ID NO: 14410 - DNA, 3000 bp, Unknown
  misc_feature (1)..( 3000): cDNA_ID_3086066_gDNA_ID_2684116_Annot_ID_190815 3000 nt of promoter + ATG
aagaagagaataaaaaaattctgatcgaaaatagcttacttaaaaatcataattgaatagtatcttttgtttttaaactaatttagtctatataataataatattattaaccatcgtaaaccacacatgatattcaatacttataataaattaatcgcataaaatacaatacttaaaacgagtgttatataattttacgtaacgtaaaacaatacaaaattttaattcctgaacgaataaaacgagtatattaattaatttattgatcgtattaaaacgaatatgatccaattaagattacaattactaaaatccccacactattattgtcattatttaactatggcagatagatagatacagaaccgtaaaggacgttaggaagaggaagaacgttgacgaagtcaacaacgaacagaaaccgtcgatttgaggcggctctaatctcaaccacacgatcttctctgcctttccctcttctctcttcttcttcttcttcatcttcttcctcgcaattaccgcgaaaactcatctctgctcaatcctcaatctcagtctctctgttgactccgactgttatataaaaccatacaaataccttcagattcactacttcaaacctcaaagcaaccactgaatctcgactttgatcaattgagagagaaatgaacaccggcggtggccaatacacggattttccggcggtggaaactcacggaggacagttcataagttacgatatcttcggtagtttattcgagatcacatctaagtatcgtcctccgattataccaattggtcgtggagcttatggaatcgtttggtatgtttccttctctgagctttttcttaagttttattctttgagatcggagtttttaatttctggattttgattttgtgaagctctgtgttggatacggagacgaacgagctagtagcgatgaagaagatagctaatgcttttgataatcatatggatgctaagcgtacgcttcgtgagatcaagcttcttcgtcatcttgatcatgaaaacgttagtgtttttgttcgattttgtgaaatatctgtagaaattagtaaataaatcatgattagggttttttgatttggtattgcaacagattatagctataagagatgttgttccaccaccactaagaagacagttcagtgatgtttatatctctactgaattaatggatactgatcttcatcaaatcatcagatctaaccagagtttatcagaagaacactgtcaggtaaactaaaaactgttcttggcttttttctgggatttatatttgatagaagagacatgaaactgatacttgatttggtgtttttgttgtcatggaaacagtacttcttgtaccagctacttcgaggactgaagtatatccactcagctaacattattcatagggatttaaagccgagcaatcttctgttgaacgcgaattgcgatttaaagatttgtgatttcggtcttgctagacctacttcagagaatgattttatgactgagtatgttgttacgagatggtatagagcacctgagcttctgttgaactcttcagattacacagctgctattgatgtttggtctgttggttgtatctttatggagcttatgaatagaaagcctttgttccctggtaaagaccatgttcatcaaatgcgcttattgacagaggtaaaatattttagagagttatgtaattttagcatggtttaaagattctgccttttcacggaatatgtgatgaatttgtttgaatcttgcagttgcttggcacaccgacagaatctgatctcggttttactcacaatgaggatgcgaaaagatacatccggcaacttcccaacttcccacgtcagcccttagctaaacttttctctcatgttaacccaatggccattgatcttgttgacagaatgttgacgtttgaccccaacagaagaatcactggtaagtttcatacatgttctctgttggtttttcttaccatcactatgttttgattaaaaactgaaaataccatcttgtgcagttgaacaagctctgaatcaccagtaccttgctaaattgcacgacccgaatgatgagccaatctgtcaaaagccattctcttttgagttcgaacaacagcctctggatgaggaacagataaaagagatgatctaccaagaagccatagcactcaatccaacatacggttagaagtgcagcagccccgtgaatgcctggtattacccaataaccatccgaatggctacttagtatctttgcctgttcttttattcatgtacttcttccacatatgtaatcttgtaacttttatttgtttgttcatgttatttactgctagtgattaagtgtagctccaatgtaaagtactccagttattaaagaatatctatagacttttttacttcacatactcttgagtcttccctagtaaacaaagagaagagagaatataattttgtaatgtacagagcctcaatatttgtgggagacattatagagctagagccagagtcaatgctgtcgccgtgagttgtctattctcattcaatgactttcaatagattttagtgggattggctttaggtagcttgcattattgaagtagaaatggtcaattccttagcaataattaggcacaaatgtgtctttctttagtaatattgtaatatcctttgtctgacaatttagagttgacttctaaaacgttgggttggaaataatgttgtcttcacacaggctgttacgaagcagacagtgatggctcaacttgcatcaacggaaacctttgagtttttgttttactttcttaatgtttctttatttgaagctgctgcgcatggagaataaaatatcgtggacccgagaaagtcatcattgctgtattattacttatactgtatatatgtttcagaatttcaggccattgttgacaaaaatagtgaaagatttctgcttgattttgagac

SEQ ID NO: 14411 - DNA, 3000 bp, Unknown
  misc_feature (1)..( 3000): cDNA_ID_2990381_gDNA_ID_2684116_Annot_ID_190814 3000 nt of promoter + ATG
acggatctgccactatctccggttcgattatttttggttggcgtcggttaaagactgatttaatttggtggtggttttatttcaacccaatgattatattttaatttttgttcttctacatatccgatattttcagaaatcatgtggaaataaatctaaaaatttagaaatttagttacaagttttataaaactaatcgtctaatacaatgaaatttcatcaaaataattatttttctataaattatgatgatctaagtaccggattaagaacaaattacaaataagaatactgtacacaacaaaactcaaacatgtgacttcagaaaatattttactcgtaaattaaaacataaacatacacgaatactatccttcatatatatctttgtatctaagagtaactcaatgttcaaaataaaatacagctaaaaaaagtaataagcaaaagaatatgggataaactattttaagctgaaaaagtaacaaagtgatagaacacactcatgcatcattagtttatgtaacaaagaagaactcattttaagttgttgcaatggagacttgcttcaaaacctttgaacagtccacaagtttcaagcttttaaacgttctacagatgaacaatggaataaacgactaggccattcttttcaaaagagtgttcataagggaaatatcatccacatgcatttggaagctctttataagctttcgattttgcccgtacctaatgattttcgtttgtccatctaggaagtactcgatttaaagtttagaactaatttaaacaatcattgttttgataaggttaagtatttgaaatcacttttagatgactttggaatagttttagaaggttataatccagtgaagtttaacgatgcatcgttattccttaacataaatagaactctaacttaaataaatttcataacaaaatcaatatttttaacgataatgttggaacataaattatatagcgcatacgattatttagaggaatttgtaaactaaatattaatatcttgttcgaactcgaaaatagcttacttttttttcttcataagtgttggctttgatatataacaacaaagtgttacaatagtggaaaactccacttacagaattcgataggctaatgagcattacgatattaaattatcaaacacatatagataatctcctttaattttcatctactcagaattgaacattttcataatctgcaagttctgctttatcttgtctgctttcattggaaatgaaatggtatatgttggtcggtaaaagacgaatcaaatttgtaaactaacaatgaactattgaaagagtaaatcttacagaaatctcaaaagaaaataagatactaaaaagggagaaactgaatctctcacttaatccccattcggggaacctttacacttaacacgcgatctgatggagccatgagtgcaatccaatcaatccaaaacttctgcaaggccctcttacacagatatcctaacgaaaagtaaccacaaagatccgcttctcaactccaaaaccaatttgcgcaaatagagattttgcctattttgctatctctttcttcttaaaacaaagccttcttaaaacaaaagtccaacaacaaaagtcaaaccgagcccaatatagtaacccatcgaggaagggataagaaagccatacaacacagagacatgtgtcgcctcatgaggaaatcacagacacgtgacgagaagaacgtgtttgtcgagaatgccaaccactgccggcatgttttctgagatcgaagaacgcctacccaccgaaagttcgttcactccgcaaaaccagaagcttcaagtagagcactgaagaccctctaaagaaattgcacatctagtcttcctcttccaaacgaaattaaactcagatttaacaaacgaacgaaactttctttcatatgaaggaaagcgtccaccattccaaagtagcatgaagcatcacaatgacgtaagcaaccaaaaagattttccggtgagacttaacgtcgccatgcccatcaagtgaaactactacaaaatttgaacgacaaggcttatgaagccgaaactcttaaacttccactttttcttcgtaatgaagaaacttaataagtttattagaaataaagacaaataaaggcaaaataccaaagaacggcgacgataaaaccggatttaccggtaactataactagaactcaccgtacggtattgaaacaaaaagttggaccatgtccgaacacaacctcacaaacatacgggaaggcatacgaaacaaagaattttttctttttctcaaaattttagagaaagaagagaataaaaaaattctgatcgaaaatagcttacttaaaaatcataattgaatagtatcttttgtttttaaactaatttagtctatataataataatattattaaccatcgtaaaccacacatgatattcaatacttataataaattaatcgcataaaatacaatacttaaaacgagtgttatataattttacgtaacgtaaaacaatacaaaattttaattcctgaacgaataaaacgagtatattaattaatttattgatcgtattaaaacgaatatgatccaattaagattacaattactaaaatccccacactattattgtcattatttaactatggcagatagatagatacagaaccgtaaaggacgttaggaagaggaagaacgttgacgaagtcaacaacgaacagaaaccgtcgatttgaggcggctctaatctcaaccacacgatcttctctgcctttccctcttctctcttcttcttcttcttcatcttcttcctcgcaattaccgcgaaaactcatctctgctcaatcctcaatctcagtctctctgttgactccgactgttatataaaaccatacaaataccttcagattcactacttcaaacctcaaagcaaccactgaatctcgactttgatcaattgagagagaa

SEQ ID NO: 14412 - DNA, 3000 bp, Unknown
  misc_feature (1)..( 3000): cDNA_ID_2991095_gDNA_ID_2684116_Annot_ID_190813 3000 nt of promoter + ATG
tctgctgatatcgctgtttctgcatcgccagtaactgaactagccatgtctcaaaatcaagcagaaatctttcactatttttgtcaacaatggcctgaaattctgaaacatatatacagtataagtaataatacagcaatgatgactttctcgggtccacgatattttattctccatgcgcagcagcttcaaataaagaaacattaagaaagtaaaacaaaaactcaaaggtttccgttgatgcaagttgagccatcactgtctgcttcgtaacagcctgtgtgaagacaacattatttccaacccaacgttttagaagtcaactctaaattgtcagacaaaggatattacaatattactaaagaaagacacatttgtgcctaattattgctaaggaattgaccatttctacttcaataatgcaagctacctaaagccaatcccactaaaatctattgaaagtcattgaatgagaatagacaactcacggcgacagcattgactctggctctagctctataatgtctcccacaaatattgaggctctgtacattacaaaattatattctctcttctctttgtttactagggaagactcaagagtatgtgaagtaaaaaagtctatagatattctttaataactggagtactttacattggagctacacttaatcactagcagtaaataacatgaacaaacaaataaaagttacaagattacatatgtggaagaagtacatgaataaaagaacaggcaaagatactaagtagccattcggatggttattgggtaataccaggcattcacggggctgctgcacttctaaccgtatgttggattgagtgctatggcttcttggtagatcatctcttttatctgttcctcatccagaggctgttgttcgaactcaaaagagaatggcttttgacagattggctcatcattcgggtcgtgcaatttagcaaggtactggtgattcagagcttgttcaactgcacaagatggtattttcagtttttaatcaaaacatagtgatggtaagaaaaaccaacagagaacatgtatgaaacttaccagtgattcttctgttggggtcaaacgtcaacattctgtcaacaagatcaatggccattgggttaacatgagagaaaagtttagctaagggctgacgtgggaagttgggaagttgccggatgtatcttttcgcatcctcattgtgagtaaaaccgagatcagattctgtcggtgtgccaagcaactgcaagattcaaacaaattcatcacatattccgtgaaaaggcagaatctttaaaccatgctaaaattacataactctctaaaatattttacctctgtcaataagcgcatttgatgaacatggtctttaccagggaacaaaggctttctattcataagctccataaagatacaaccaacagaccaaacatcaatagcagctgtgtaatctgaagagttcaacagaagctcaggtgctctataccatctcgtaacaacatactcagtcataaaatcattctctgaagtaggtctagcaagaccgaaatcacaaatctttaaatcgcaattcgcgttcaacagaagattgctcggctttaaatccctatgaataatgttagctgagtggatatacttcagtcctcgaagtagctggtacaagaagtactgtttccatgacaacaaaaacaccaaatcaagtatcagtttcatgtctcttctatcaaatataaatcccagaaaaaagccaagaacagtttttagtttacctgacagtgttcttctgataaactctggttagatctgatgatttgatgaagatcagtatccattaattcagtagagatataaacatcactgaactgtcttcttagtggtggtggaacaacatctcttatagctataatctgttgcaataccaaatcaaaaaaccctaatcatgatttatttactaatttctacagatatttcacaaaatcgaacaaaaacactaacgttttcatgatcaagatgacgaagaagcttgatctcacgaagcgtacgcttagcatccatatgattatcaaaagcattagctatcttcttcatcgctactagctcgttcgtctccgtatccaacacagagcttcacaaaatcaaaatccagaaattaaaaactccgatctcaaagaataaaacttaagaaaaagctcagagaaggaaacataccaaacgattccataagctccacgaccaattggtataatcggaggacgatacttagatgtgatctcgaataaactaccgaagatatcgtaacttatgaactgtcctccgtgagtttccaccgccggaaaatccgtgtattggccaccgccggtgttcatttctctctcaattgatcaaagtcgagattcagtggttgctttgaggtttgaagtagtgaatctgaaggtatttgtatggttttatataacagtcggagtcaacagagagactgagattgaggattgagcagagatgagttttcgcggtaattgcgaggaagaagatgaagaagaagaagaagagagaagagggaaaggcagagaagatcgtgtggttgagattagagccgcctcaaatcgacggtttctgttcgttgttgacttcgtcaacgttcttcctcttcctaacgtcctttacggttctgtatctatctatctgccatagttaaataatgacaataatagtgtggggattttagtaattgtaatcttaattggatcatattcgttttaatacgatcaataaattaattaatatactcgttttattcgttcaggaattaaaattttgtattgttttacgttacgtaaaattatataacactcgttttaagtattgtattttatgcgattaatttattataagtattgaatatcatgtgtggtttacgatggttaataatattattattatatagactaaattagtttaaaaacaaaagatactattcaattatg

SEQ ID NO: 14413 - DNA, 3000 bp, Unknown
  misc_feature (1)..( 3000): cDNA_ID_3016872_gDNA_ID_2684116_Annot_ID_190800 3000 nt of promoter + ATG
agagaaattactagatttgttttccctctctaaacaaatctattgtgtgaatccttggttcaacactgagcagatgttaactgttgatttttgccgtcatcaatcctgtgtggagtgcgtgaaacgatatatagaagtaaagctagttgagggaggtgtactaagttgtcctcattatcaattctttctttggtgtagaaatggaggtttttttttttggtgcattttcaaaaatgcatttttcaagaataactccttatgttgtctattttttaaaatacctcttttatgtgctaaacgtcgaaactacttttcttttgttgaatgaatataatgagaaaatcaaatattcttgccaaagtaatttttggtgcaaaaaaaaggtttctcgctaaaaataatttggtactcatattttcctttttaattttttttcatgccaaaaaattaagaaacccttataatctttttaaattcttataaattcttttaaaacttttgtaaatctttttaaaacacttataaaatccctataaatgttttaaaaaccctgtaaaagcttttaaaatctttttaaaacccttatcaatatttttaaacttttgcaaatcgtttaaaacattcataaatcttttaaaaccgttttaagacaaacatttcgcaatgacaaaattaatttacaaagattccagcaattccttaaactctttttaaaaaaccttttaaaaaattctagtaaactctttaaaaccccttataaacccttctaaatctttttaaaacacttttgtaattcatttaataatatttgtaaatccttttaaaacacttctaaatcctttaaaaccattttaaaactgttgtaaatcttttaacactcttataaaccatttaaaaacactttaaatcctttaaaaaatcattgaaaacccttgtaaatctttttaaaacgattttataatcattataaatcctttaaaacccctgtaaatcctttaaaaacactcttaaatccttttaaaaaccttgtaaactctaaaagtttctaagataaagtttcccaccaaaaattatgggatcaattatttttgttgggaaaatgtttcagatattttgctgggaaaattcaaatgtttatttgtttacttaattatttattaaataggggtaaaatgcccattaaaaattaaaggaggaaaatgaaaatgatatcgaagtgaggggttattttttaaaaaagaaggtatcaatgaaaggacatttctaacaatttctcttttttttcctctctatatattttttctttctttttaatttaatcatttttatctttccacttttttggtatgattcatattgatttattctaggaatctctttttctttatatagttttgaactaattcattttgcaatctcttttagtttaaaatctgttttctttatccacatatttgttttttttttgtcaaccacacattaattaaaaaataactccatgattagttgcccaattaggaggagaagtgtttacaaaagatccacatattatttaaataatgaaattttgctattttatttagagaatctagaataaatttttaaagttaatacttgaaatgattaattatttatataaagaagaatatatctttactatactattaacactctacaaggaatactttttatgataatttaatttagagatttatacatttatttaaatacattaagaattaactaaaactaggaatatataaaatgagatctgtaatacatcatttcaaaaggtgatttatctagttaaagtcttaactcttaacttctctataggatgtaggatgtatttattactttcatactaactacactcacgcacaaccgaattttatatgtttatatatcagtttttcgacctaattaataatctaaacatgtgtttggctcggatcatcatctaaactcaaaattaagttaaatttgcaatggaaacaatagattgtgaaatcagcttacttgtggatcctgagacttgcagtatatgtttcaatgatgatttcaaatctgagcaaatgtattatgttgctttatgcaatcataaattctgtttggaatgcatgaaacgatatatagaagtgaggcttctagagggaactgtactgatatgtccttattatcaatgtgagtctaagctgactcttaaaagttgttttcatattttgacatctaaactaaaagcgatgtgggaacaaaagattgaagaggaatccattccagtaacggagagattttattgcccgaacccgaggtgctcggctttaatgtcgaaaatcgagctctctaaatctaccttagaagatggatttgtgagatgcttccaatgcggggagcgcttttgcattaactgcaaagtttcatggcaaagtaacttgtcatgtgacaattgcaagaaattgggtaataatcctacatcagatgataagatgctaaaagttcttgcaaatgagaaaaagtggcgccaatgtgaaaagtgccaacatatgatcaaactttcggaaggatgcatccatgtaacttgcatgtatctctcaaatcattttcttaattataatccattcaaattttgatgattaaagtttgtttgcctaattaacattatattcatgttttgatggatagatgtggctatttgttttgctacacatgtggagccgaatggaagcaaggaggttgcccacatcgacaaaggatgcttgaggagtgttgtattggtactcttatcttggttcttcttgtctctttaatagttctttatttttattaatttctaaaaaataataaattaatcggatttctagattattcatgacgataatgaaaactaaacaatataattataagaacaaaaaacataagaggtttcatgcttgcgtaaaaaccagaatttcccaaaacagaataaattcaatcgcagatgatcaaggacatatgtacatg

SEQ ID NO: 14414 - DNA, 3000 bp, Unknown
  misc_feature (1)..( 3000): cDNA_ID_2991762_gDNA_ID_2684117_Annot_ID_190824 3000 nt of promoter + ATG
gtaatcccatcatttcgacgatcaaaaacgccctgccatattggattgatatcattgattgtgaagtggatgatgtctatctttggaagctcgagcatcatccacccacaccattgttctcctctactctaacttggctcgctttgcacccatctacctgtccggttctgtggcataaatctatatggtttaaggactatattccaaatcatgcgttcatcaattgggttgtggcttggaacagggcttcacactagggaccgaatgcggagttggggaatttctattcccacggattgtgtcctttgctctggaagttcggagtctagagatcacctcttctttgagtgtgactttagtctggcggtctggagtcacttcaggaatagaacaagattatctcctccggtccccttcatggcctgcctcttatggattaattcggcttcgtgtgatgcttatctctgtctcatcatcaagctagtgttccaagcctctatttatctcttatggaaagaacgcaatcgtcagatccattctcatgctccccgtacctctgctttgatcatcgaggaacttaaggttattctatggtcaaagcttgatcccatttctcggcgtagtgaatttgattctccaggatcctctctgctctctacttggtttcgtttcttcagctaagggcagttccttcgttctctgttcttctttttgggctgtttgggtcttgttgggccattcaagtttagtttcgggcctgcgtgacttggatttgggcttcttgccgtgtatatttttcgggcttgcgtgcctttttttggactctttgttttgtaacttgcttttatctttaatggaaatttaaacctaaaaaaaaagaaaagattgggtgggcaaatgcatgttacctactgatgttaccgagtatctcaagtactaacaacagctctatgtttctcaaaaggaaagtctcaaagcgacgacgtattattttcacgcacgttttaaattcttgatgcctttttttgttttattcttttttcttaagttacacatttaaacaaacaaaaaagaacaaaatgagaaagaaatagattgttttcgagctttctctctcttctctctctaaaaaatcttagagaaaagggaaagttttctcttttgtttcgctggcctgatggcattccgacgtttatgtgttttaatatagttgggttttatatctaacatctctgtcgtttttagcagtgatggctggctcttgcctgacagcgttcgaattccatgaccatcgttggccggatctacttttcttatcagtgtatctgatgtttttttttttttttttctttcaataatctcatagatcctctattggaaatttaggtgtttttttgcttaaaggtgtttattatccaatttgatcttttgagtttgcgatttgcaggaatcaatccaaagagttacatcttaagttgcagaaaagaaaacaatttcattgcacactaatattgcttttagctgtaaatctctattttgatgttcgattggtttatgaacaatgaaacctagaagaatcaagcttgcttttataatcaatgatgatttttctcactggaatcgatctcagatggcgaatgatctacaattgaggctatttgtctaattgatctatggacacgagtgttttcctttttgtttttaggtgttgctgaaaagctccatcggcttaatatctacgttgatgttctttggagttcgggagtcattgcccttgtgaagatcttttctttacagatttgatgatgtagttggtaggattctctagttaaaaacctgtggacttatttcttgaagctctgacggttttcggtagttttggagttcccttacgcttcgtaccatatcggctatgagcggcgaacggcgacaacatctacttcaactttacttcataggctcacacatggttttgtgttggatttgttatatttcttagttccttaaaggggtatctttatggattggactttttaagttgggtctccgcttataagctgaattgttggtgaagtggaagcttccactgttgtaccttttacgacatagagttttaaatagaagagaaaattcccaaaaaaaacttcaactattaaaatttgccaaaaaaacctcaactttttcggttgtcaaaaaactcaaactaatttattagtgacaaataaaacccaaactagaaatattggcagattatacatacgctctaaaaacaaattatagttttatccttaaaaaattaattcttttttttttgaaacgaaaagaaatttcttatttactttgtatttttttagtttatacgtttttgcctttttggaaattatcatagaaaaatgatatgagtgtctcatttttaattctcttttcatatatttttactttttagattttcaaactttaaaaaccaaatcgtttctctatttcttttttttttgcttatttctttctaatttttggttcctcaatatcaaaatgattcaatgttcttcgactaatttacatattttgattttttcatcataattatatagttagctttgtgttaatatatcttatttaatttattttagcaatacgataacggcggtatgcatgtactaaaaaggatgcgtaaagagtattaagtttttcacatcgaacaaaattgtccactattttatttttttaaatagttgtctatattacaagaacaaatgaaaataaataggtattattagataagtagtttttttttttggtaaggcattattacttattagataagtagttagatatataaaataatcaaatagttgaggtttttttggaatatttctgagaaaaacaaaaagaaaacaaaattgattgaataatgaatacaccgaataacgaacgttgcgtagagaagagaaccaattcccaatcaaacggagaagacagatattattcacagagaggctc

SEQ ID NO: 14415 - DNA, 3000 bp, Unknown
  misc_feature (1)..( 3000): cDNA_ID_3016996_gDNA_ID_2684117_Annot_ID_190826 3000 nt of promoter + ATG
cacaagagtactcaaaaatgaccatgaaagacttagtgtccttataagcaaatcacgaccaagaaacatacagagaaatcatcaaatactaaccggagagattagtagggacctcagatcaaaattttcaggtctggttaggcatgtgattattaccagaaccaaaattttcaaaccaagccaatccagtttttggtcatttcaatttagggtcggtcactaaaagtgaacaggtcggcataattttttagtacatatatttaacatgtgcccaagttatgacaaacgatgaaacataacatatttattataaatgatttatacatcataactcataaaaacatcaaaattatgaaatattttggtagcgctaccataaccactcaatcatccgactgaaatcatcaaaataaaaaaatattttctaactttttttatatttacataaatatatctacaaaatgatcccgtataaacttgtaataaattatatatgtgcatttttcaagaccaaatctctaagatcaaagactaatgctaccacatcattcaacgaaacaatgcaaataaattttgggataactttaactttgatcatcttttaaagtatttaaggattttacatacaaatttgtaatttaaagggttcacaaacggcaacaaaaaacaaaaaaaggtttactaacgaatttgtaattttaagaagatcaaaatataagaaatataaataatatcataaattttaaagggttataatgcaaatgttgaactttaggaaaccagctgacctcctttaatcgtctttggatgtctatgcggcggacccataaatactttttatgggtccatcaaatataatttaaaaataataagtaattaaaaacaaccaaaaactaaaaaaaaaaaaactcatctctttaagtttacatatgaatttgtaattttaaaaaggaaaaaacaaaataattttaaaggtctacaatacaaatatagaattttagaggggtcgtctgaccccttttaatctttttgggtctgtcgcgtgggcagacccataaatactttatatcagatcaaaatataacttaaaataattagtaatttaaaaaaaaaaactaacaagttttaaaaaatattattagtttaaaatataccgcaaattaggttcaatatttatgggtgaatcacattaaaaggctaaaagtatcaaaacacaaagtagaagaaaatatataataaaacttaaaaggtttacatcaaatttgtaattttaaaagggtcaaaacatatgaaatataaataatatcataaattttaaagggctataacacaaatgtagatttttagttgggtcagctggccttctttaatctttgctctttggatctgcctatgcggcggacccataaatactttttactaggtcaaaatataatttaaataattaatagtttaaaaagattaaaaaactaaaaaaaatattcatttgcttattatataccatagagaatgattcccaattttttttttgtcggcaatgattcccaattttaaatacagagaatgatataatcataatttatttatttaaatattcatacattgacaataactgagtacatccatgattctttatttttgaatcataatgtcctttcttcgattattattcgcttacaaacaacactcttataaaatattttcatagaggaattaagcacgatcattgctcggaaagttttgtatactagtttcatcactaccgatatatagataattcaagataaataacattcatatttaggggtgtcaaagtgggtcaagatttatggatcaactcaactcaacgcaacttttgaaccctaatgagttgaaatttttgactcaaatgagttgatgggtcaaatgagttattgggtcaattggtttgatgaataaaatgagttgggttgtaatgattaatggtttcaatggtttacccaattaacccattaacccataactcatttaaccctaaactcatttgattatgagttgagttgagttgggtaacccattttgacaccccatataaccaaaagaataaaaaaaaaagataagttggagagtagacagtttttgctaaaataatttgaaaagtagacatttttttttagagataggaggcatatgtagttttatctctcctctctaatagaactccctctcaaatacaacttttagtaaagtactattttacccttctgttgttttgatgaaataaaatggacctcattaaaagcagcccaatatcatcttcaatttcgaattgttcatgggcttgacatcaactaaaccccatattttcttaagtcattagaaccaaacacactcataaaccctcgtcgtcgacatcttcatctgtacggtaaagacctcgtcgttgtcaaaaaaggataaaccctcgtcgttgccaaaatcatagagacattgtcaatttcataccagatggaaggtatgtttatcataaaacgctttaaagtttttgaatttttgctgtcagccaactaataactttgactctgttttcgttttttttcaggggacgaatcatgcgtctccatggtcggccgctggatttgctactcgaatggttggtgggacttcaaaattgataaaactaggccaggaaaggggaaaatgcttaattatttcctaaaatatccaaaatgcgcagattaattccccaattacctcagacgcataataaactcccaattatactttgacgtagcaaagttagacttcattattgtcaacgttaaatattaaacatgtcgttaaatatgtcgattctcatcttcttcttctccaaatcaaaaaccctaaattcctaaagctttatctttaaactcgaaacaatcaactgtaaatctactttccaaacttatcttccctaaatcaaacatcaaaacctaatccgattggcaaaacgaaagttttaattttgcaaactgaacc

SEQ ID NO: 14416 - DNA, 3000 bp, Unknown
  misc_feature (1)..( 3000): cDNA_ID_3016984_gDNA_ID_2684117_Annot_ID_190829 3000 nt of promoter + ATG
tctaatgcctcggaaacttttaatccttccgggattttcgtatatatatcattatcaagagatccatataaataagtcgtcactacattcataaggtacatatctaaaatattagaagccgaaaggctcattaagtatctgaatataattgcatccatgaccggagaaaatgtttcttcataatcaactcctggtctttgagagaaaccttttgcaacaagtcgggctttatatcgtgtgatctcatctttctcatttcatttcttcacgaatacccacttgtgcccaacaagttttatattctcagatgcagtaacaataggtccaaagacatttcttttatttaaggagtgtaactcaacttgcatggcatttttccatttctcccaatccagcatttttctggcactcggataatgtctttggatccggatcatcattctcatgatcgatctgtttagagaaagaaaaggagaatattccattttcatcatcaatatcatctctatcccatatgataccatcatgggtatagttaatggaaatctcataattttctctatcgtcccgagaaaatggttcttgttgaagaaccttttcatttttttctctcattttctttttctttcggggatttttatcttttgagccaataggcctcccacgctttaattgaaccttagattcattaattttgctccaatctaattccagcttactaggaattttaactcttgatatgacatttgcagcggggatatatgactttgtcacctttcttgtataggtgaacgaatctggtaattgatttgttattttttgtaaatgtactttcagctcacgttgcttcgtggggagggggggctaaagctgggaattcatcttcattaaaatggcaatcggcaaaacgtgccgtaaacaactcaccagtttgtggttcaagataccttattatacccagtgatacataaccgacatatactctcaatctcttttggggccccatttttgttctttgtggcggtgctataggcatatataccgcacatcaaaaactacggagatgggataaatttggtacttgacaataagtcatttgtaaaggagaatattcattatctgcgcttggtataatctgaaccaaatctgcaacagacaatatagcatgaccccatataaaaattggaagttttgttctcaatattaacagtcttgcaatgagttgcaaccgtttaattaatgattcggccatgccatttgtgtatgaatatgagggagcgaatgctttacatcgattctcaacgatacacaataatcattaaagacttgcaaagtaaattccccagcattatcaagtctgactttatttatgccataatcaggaaattgtgtctttaacctgattattagggcaatgaatcttgcgaaagccgtgtttcgtgtagtcaaaagacatacatgtgaccatctattagatgcgtcaattaataccataaaatgtcgaaacggcccgcatggtgggtagattggtccacatatatcaccatgaattctcaacaagaattcaggtctttttttcccaattttagttggcgatggccttattatgagttttcattgagaacatgctttacatgaaactcaccagatttaaatattttatggtttttcaatgaatggccattaaaattttgcacaatttttcgcatcatgacttaaatgtactagtaaactcactcgagggattatcactcgagtttactgtaacattcgatgcgattatatttatttttgtgcaatataattgatgtaagaatgggagctgacgtaccggctgatgcacttgttgacagattgcttgttagacttcttgatggactttctgacggactacctgaagtacttcttgtatcaaaccagcttgtgcgaactaaggaaagctatcctttccttcccttttgtgcgtcccagagccacatatggaagcctggagatcctctacgccaccaagaaccattcacacttaatccttggtgcatctttccttatgtgaacccgctgagccaagactttccttttttggagctaaatgagatcaaatcacaacgactctattttgatcatcttttgggaattaagaagcctcctacaatgactctagacgtcccaaaatcacatcacttccagcccaagttgtcaagactcaagacacatcacaactttccttatttggccgatttcatcattaaagttccaacggccatattttcatttattgttgcgatttctttacttttttagagcatatgaatgttgtataagcctctatacaagctcaccttagttttcatttgtattcaagccttttacgaaataaacaagtatttttttcaaagtgtgtctttgagttttatgcattagaagttagtgtggattcactaaagtcttgtgtgtttgcggatcaattatcttgtggcttcaagttaatttgttcgtggtttgattgtggattcaatcaagcacgttgagtgtggattcattcaataaaacctccatctttcatctctaccatcattcatcgaatcattcaagctttaggtcgagaaatagagaagcgtaaaccctatgtagattccgaggtttgcatcattggtatcagagctaaaagctcctatcccacaaggtgaactcgttcccttttatccctttcaatttctgtttttgttattttcaaatttaaatcgaaaaaccaaaataaaacttgtttcttgcaatttgttttgttttgattccgcaaccttaatagaaaaacaaaataaaatttttccttgtttagtttgttatttgtttcatttttgctattttcgttaaaataaataaatcaaatgttgttatttttgacttatttgttgacttacttcctgagttaagttatgattcattgtcttctttgttttactctcttttacgaggtaccacaaataaaatttgagaacgatg

SEQ ID NO: 14417 - DNA, 3000 bp, Unknown
  misc_feature (1)..( 3000): cDNA_ID_3016953_gDNA_ID_2684117_Annot_ID_190839 3000 nt of promoter + ATG
gtgggttttcaatcattggctcgtagcgtttcaacgttgtaaggagaattgttgagtccttgggtcaagtgattgaaatagatttctaggatacaatcactaatcatattaggttcatcagagttcgagttaagtttggcatcactaatagtcttaggttcttcagaagactcaggtttcaatatggtgaaagagcaatggtgagttttcaatatgagcggttgagaagaatttgtagccactacctcagattcactcatcatagtagttattgtccttactttcatactccacgaaactgtcttgaagctcctgatatgtctgtcaatggtagaaatgaagatgtggatcagatgaatagaggcagatctgaagtttttacagtcactggtctttgatcgttttcaagaagaagacatctcggatcctttagtgggttttactaactttgagaatggtgaatcctccaaagggaagagttcaagttcctcatactgacaacttcccccaacgaaaagataaatctctttagtagagatgatgatttcactcaacaaaatttttgtcacactttttggtccctacaatctacattgcagtaggaagtttcagtttactagctctttaactttgaaaacagtttgatgggtgatgtgtataacataattggtgatgggaaaacagtttgctgactggtattttggacgaagaccatacgcaagtgcttaagtgtgatttttttgtattactaaggtttaatctccttgtaaaattgatgtaagtattttgataagcttgtggtttctgcaactattgtaacatgaagttaaatgtaattttttttacaacaaaacttatatagaagcccaaatactataccaaagaagaaggtaaacttcaaggacgtgtcttacgataaagatgagtcaatggacatgtgttgttccaacaaccttcgccgcataagagctcaattcaggtgaattgatagtcgacgggataccaatcctaacaacaaagtttgtttgctcaccggtgatgactaaaacgggtgaaaaggacattcaattgaattgaagtgtccatgaccgtttacctagcatattgaagctctcaatacaaaggaatagcaacaaaaagagattaagatcaacataggaaaagaagctataatcattactcaaaggtataatcacaaccatgaaccgtttgagtgacatagccgcagattcaacagatcaaggcatagaaaaaagtgcagcagaagcataaatattaaaaagacaaaaagaaacggcaaaagagccgataacaaacaattgaagagagctgataacgaagccgacaatcgctgttgtgtaaaaagaacgatgccggatgagagctaacgaagcacaactttgggtggatattagatagtagccggatttgacataacccggacgacaaagttgaaatacatcgacgagatcttaacagaaagaaaagagtttctctttctaaaaaatttgagagagataagagagagactctcactttcctataagttgaatgtaataaaatgggaaattagcaaaactaacaaaaaaaaactatatatttaagaaactatatttaagaaagtaacaaaaaaaaaagatgatatcctatatattttgtgaattaatcctaattttgccttgtgtgatttacactctctttctccctctccctctgtctctctctccctccctttgtctctctctccctctctctttccctctctttttcgtgcgtcactgtaactcgagtcttttatctttttcctaccaacttatattactcactagtagttgggtacccatttatttgtgtgaaatcccatttaataaatggatttagttgggctaacctatttaacctcatttaacttttttaaaaaaattagtttaaatggatcaatttctcttagacatactcgttaattaaacatactcattaattatatgaagtttgcatacccatattaacattattactcactacattggacaatgatctcaaaagctctctactctccaaaaatgagtctaaatactctcatataatctgacatactcttatactcttaatgaattttaaaaatccttgtctacccttacccaacgaaccggaaccggacgaaccaaaccaaccaattacggtttagtctccaaaccaataccatttaattcataaaataaaattaacctatcagaaattcccaaatcttcttttcctccctcacaaaatcaaaattgacgactgcagccatcatcgaatcctccgacgtggaatccaatcgaccaagctcgccgtcgttttgcttctgttattcaaagtgacctttaccattttttcttatactttggacatcttaattcatcaagtcttgtgttgttgtgtttgtactttgtagatttcaattagatttgatagatttgaaattggtgttggaaattaatggacattatgttggtaactatatattttgggtctattaagacattttaatgtactgtaatggttgattcgtagttaatcttaggcagattaatgtttttggtccgaaaatctttgctagaacagaataatctaggtataactaagaaacgtggtatagctgtttgaagtactatttatagtataactggtatttctgaaaatgagcgtggtatagctgtttgaattactatttatggtataactggtatttctgaaaatgagtgtggtatacctgtttgaagtactatttatggtataactggtatttctgaaaatgagcgtggtatagctgttcgaagtacaatttgctagaacaggaaaatctaggtatagctaacgtttttttttgttttttccaggagaatgggcataatcatatattttgattatgatggatattattcaaaaaccggagaagcatatcaatggaatccaaaagtagttggtttgtatggtatgttgtttaggacatcatca

SEQ ID NO: 14418 - DNA, 3000 bp, Unknown
  misc_feature (1)..( 3000): cDNA_ID_3016968_gDNA_ID_2684117_Annot_ID_190834 3000 nt of promoter + ATG
gttcttaattgactaaacccaataagcttgaagaacgaaataaaccctttaagaaaaggaggagcaaagaactacccacccagatctaaggatctaatcaaagcaatcaagcacaagaaaactgaaactaaatagaaacaaaggaacgaaaaatgaaaaaacaaatccagataaaagccgatacctaagccatccgaatcgagagcgaattgatggaaatagagctatttgacattgctaagagagtcaacgacactagacgaaagccgaccaacaccactaaaaaactgatcgttgccgaaaccaaatcggaacatcggacaagactttctctctctcaaagattaagagagaaaagagagagaaagtcttttcaatcttttctatatttttacgtgaatcaaaaaattaaatatattttttttgtctcactctttaaatttggtactttggttccacgagtttgaagattttcgggaataatttgagtttttagattctgaccacagagctaaatccataaagtcctttagaacgttttggtgctagttttcttatggttcagacaaaacaaagtagcaaagctgctttatacaccgtgaaacacacacataaagaaagaaaaaggtcagagacaagacacttttgtaacagactcgagagtgtttgctactgcttagtggaggctgcgcatgataccgtgtatgtatcctccggtcataatgaaagacatgatcgacacaactccagcaggaaatatcttcttcgaacgcatgtatcgggttcccattacgtacattaacgcacccgccatcacttttttaacaacacaaaacaatgcagatgtttagacgccacatcatcagacttacaaaaataaaagctagtatcaccgccgttcaggaatccagcttttgaaactagtaaattggacacaactactctgttattaacaattgtttttccttacctacaccaacggttgatgcaagaacaggttttgttgggagctgactgaagacatacagcagaacagcagctgacagtccacctgcaagcaacgatttctggctaccgctcttcagataacccatcagcccaccaactacatcaaaaccatctaacagttcatgagcatttgagtatcgctttataggcaagcataacatcactgttcttcgatacgtttcaatatatctgtgagtccattaataaaatgagaactcaacttcacctaataagcatacacatatacagactgaactaacctggactctccgatctcaatcacattagtaacatcaactcataaaaagaatcttaaaggcatcaacaagaacaaggaacctccatgtttaacctaaagctatgacagtcagatccagaaaccaagttttgcagaattcaagtaacatctccatctctaggaaatatgcaaataggaattaaccctctatgaacctttttcttctcacaaatactaatgagtgtgcttctaatccctaatccaattcttaaaaccccccaagataaaatcatccaaaatatagattccccaagaacattagagttcaagaacactgatcaaattctcatccacgataaagaactgtgatgattttgctatccctaacacatcacgttagatcttcaaattcaaaatttcaaagtataaatgaagaagcaggtaaaccctaaaccctagaagttcatcacattcacaaaattgaatctcacctactacacaagaaactggataatcttagctttataccgaagttctaaatcaatttcacaatgaagaatcaagtataaaccctagagttacaatgaatctcacctccgacgagaaaagcgtaaccaagagtcaacttctgcgacatagacagaggcgtgctcttcttcccgtcactctcctccttatcgtcttcccctccgtcgtcatttccatcgccgcctccaccaccgccgccaaatttatcacctccaattccaccaccacctccgtaatcgatcgtaggctcgacttcaacagctttgactcccgaatcaacgcagttagcagtaatcgtactggtgatcgtcttagtggagtcagagggaactactgcaccgagaggaagtcgtcggtgaccagatgcgaacgccagaggatgaaaaccgttggaattttggaatctgacacttcggatcggtgaagcagtggaggtattgagtagatagtgattaggtctgacgtgaaggagagaggattgtgcagaggaggaactcaaaatcaaatccgccattttcttcgtcttcttcttcgcaagctttttgtttaacgactaattttagtgattgattgattttggagaaaatcaacaacaaaaaacgttaatcaaataatgaaccttaaccggctaaattggtcttatctgcaaaccggttttcattagatcttactttattaggcattgcaatcggtacttcggtccgggtcagttcggaatttcggtttgtttgattaataaaaaatctaaccaaattaaccgaatttgaactacggttttcctcagttctgaagtgatatatttcggttctgaagtgttctgaattgaaacaacaataattaatacggtttgctcagtttaaattccgattggtccaataatttcggcatatttttcaatatttcggaacatttcaaacaattttgccatcgatttatagcaaaaattggacaatttaaagaatattttggtaaccgattggtgcacctcctcatatcaccgaaccggtcactgatttcaaaaacaagtttctgaacggttttaagaatacccaaattaccaaaattttcggatgggtccggtacatctgcccaggtcttcgcattagtaaacgacgtcgtttttggtctttcatcccaatatgtatgtgtagtctcccaataaatcaacgcagaaaaccaaaaccctcctcaccggagatccaccgtctaaatcgtctctaaaaatg

SEQ ID NO: 14419 - DNA, 37 bp, Unknown
  misc_feature (1)..( 37): cDNA_ID_3016924_gDNA_ID_2684117_Annot_ID_190847 3000 nt of promoter + ATG
ctttagttttgatttatgaaagtttagcttcaccatg

SEQ ID NO: 14420 - DNA, 3000 bp, Unknown
  misc_feature (1)..( 3000): cDNA_ID_3016939_gDNA_ID_2684117_Annot_ID_190843 3000 nt of promoter + ATG
gaaaaattaaacaagtaggggaagaaggtttgtccttgaaaaggaaagaagttgaggaaggagtatcatcaccaaagattgctaagcggtctgaattagaggtggttccgcgtgaggaaccgcccaattagttatgagtataatgagctagaattgtcagggattgaggagcttactggcaattccaattctataggaaatgaggcgtgatcatttcccggatattatgttcctcctggagaccaagaactccagtaatcgagttttggaagttaagaagtggatgggttatgataatgcccacctcgttgatcctgaaggtttgagtggtggactagctttattttggaaatcgtcatacgacatagaagtgttacactcagataagagaatcatcgacacgaagatcaagttttggtccttggaatttatgcgtcatttgtctatggagatggtgcttggaacttaagacaagaagtctgggataacttaaccaacataggacttacaagaaatgaaccttggtttgttatgggggatctgaacgagatatgggagaactccgagaaacttggaggtccagcgcaagaagaatcatctttcttgccttttcgtaccatggtacatgattgtaggctgcaggaaattccattttctgggaataaattctcatgggcgggtaaacgcaatggtatgtggattcagattcggcttgatagagctcttggtaatgctgattggttccgtttattcccacgagtgagttctgaatatttggagcgagtaggatctgatcatcgtccagtgttaactcggtttgttaatgaaaaacaataatttagagggcggttcatgtttgatcgaagatgggtatccaaattagaaatcaaagagattgtaaaacaaggttggacttgtaatactttaaatggtcctacaagtctttttgatatacttgcatcatgtcgtcgatccttgtctcgctggaaacgttcttcttctcaattgaatgctaaaaccaagattaagaagttacgtgaacagctagtggaggaagggagtaaacaatttcccagatttttccttctaattaagtggaaaagagaattagctgatgcatatcgcgaagaggaagtatattggaaacaaaagagctcggagaaatggcttgatgatggtgaacgaaatactaaatattttcatggctgtgttaaaggcagacgggctcagaataaagtcttctccttgtttgatgagaatgacgtcgaacaatttgatgatgggtccaaaggtaatatagcagtggtttattttcagaagctttttacttcttcccagcctaatgatgctgcagaccttctagctgggatgaactacacggttattgctgagatgaatgcaactttaacaaaacgggtcacgaatgaagaaataagacaagccgccttcagtataaagagtagcagtgcaccaggcgctgatggcatgacgggcttattttttcagtcgtattggtcagttgtgggtcagcaagttcgtgaagaggtgaaggaggatcaaaaggaggaagttcatcatcaacattcacattttccatattagatggatttgacatgttctcatgagactcattcacattattatctaaattttcatttgaatgatcatgaggatttaaactaggtgctacactaggaccagcctcactagaattcacactagctgcagatctttttttaacaaacttttccatagatcctccttgagattctataaattgtttttcagtttttttctctttttttttgtcattcccacacaacaccatgattaaatataaaaaagaacaatatcacctgtgaattgagaaatgcacgttttaaaaaaatcgactgtgtgacgttctgcgtccaagatccaaccactataaaaatccaaaaatgaaaaataatattagatatggctatgagaattttttccattgtgttcagtagattggtaagtaaaagaagattactagaatcaagaaaagtttacctaaaatataaaatcaaaactgcagtttgcttgaaatagataaattgatgaataagaaaagatgattagttgttttgtgaatcgtgaggtgagacttgagagggtttcagattttgatcataatctgagagtgagtcacaaaaaccaacgacgttttgatttcctctcttactaattaagtaggttaactttttttgggccttttgttcttaaacgtttttttataatgagcctatttgttctaatttttttttcccaaatcttacaacaaaaaaaaaaatttggaccttttttattttggaccttaggcatttgaccatgctgccctgggtcagagacgggcatgctgctgagctgaatgcaacctcaacaaaacgggtcacgaatgaagaaacagtacatcaggcgctgatggcatgacggacctatttttttagtcgtattggtcagttgtggggcagcaagtttgtgaagagatgaaggatttttttgagtctggttctttcccttcgaccaagaagcttatgttccgtatcttataagataatttcaaagattctgtgtttcaggctaaaggctatacttccggagattgtgtgagatacgcaaggtgcctttgtggcgggaagattaatatcagataatatgcttttggcacatgaaatgatacatgcgttaaatactaatcctgcgtgtaatgaagattttatggcgatcaaaactgatatatccaaagcatatgaccgtgtggagtggaattttttggaagtgatgttcacacgtcttggatttcataggaaatgggttgcttggataattatatgtgtgacattggttacatactcggtgctgctgaatgggaattcttatggttttattaaaccagaacggggtctacgctaaggtgaccccctttcgccattcctttttctcctatttgcggaggctcttgttcacatcatg

SEQ ID NO: 14421 - DNA, 3000 bp, Unknown
  misc_feature (1)..( 3000): cDNA_ID_3016949_gDNA_ID_2684117_Annot_ID_190840 3000 nt of promoter + ATG
taaatcttaacattgatttcaacattacatgagacagctcaattctcaaaccgtctaaaccagtcaacgatcgtcctggaaagaactcgagtttcgctaagaggaatggtctttagcgcctgagccacagcgtctgctggcgtgtacacagtcccaatttgccactttggatcctttaagatacataatcaagttcaattaacaggatgtagaaatgatagagcaaagttgttaactgcagaactactagagtctctagtgttgcttggttattacctgtatgcaaggtgtaagatggtttccgttcagccgaaccttttcaagtgtaccaccaatagattctatccgaggcctaagagtttcttcgagcaaatcagtctcgtcgattgcatcggagttgaattgtacctgagacaaatgttgcagcagacaaagatcaaatatttgtattatttgctggttctaatcagacagatactgttcacttctatgcttcttagatcaaccaatatggattagtaatgagtacacaaacagtctctatgtccaagaaatcatctcagacatgtataacagtttgcttagcagttgttcactctttgaaccgtcaagttcatataactataaatgaacttgtaatgtgtgcattaccagtagagtgtgtggaacgctgtaggagcacttgaagcaattgcgattctcaagtggtgacggtctgaattctgacactccttgtcctacctgcatagaacaacgaaacaaagaacgaaaagttcaattgtttttaaggctaggccaattacaagggacttacataaaaaaagctcaatcttcgatacgaagtcaagaagtcccttactgaagaaatacctcaccaaatactgatggcaattgatccaccaatttagtaaatgacttaagagcttcttgatcgttgtttagaatcgttgtcccagctgtgtcaagtaagagtttcaaaacatcacctgtaagtgagcacaattgcaaagataattagctacttttgattctcaagaattataaaagtctcaactaataatctacattgtttgacagactatttgaataagactttgtagcgtaagtagtatcacctgaagcatttcgagccatttcatatactggagaagcttccaccattggcagcatctgctggatgagaggaccaagctgcagagaaacataggcaatctaagatacaagcgatcataatctcatcaatcaatcttgtgaagataatagtaccagccctaagatcgcaagtaagaacgttgagctacttttttgtagcctagactctgataatataagctacaggttgctaacatcaagtacataccctgtgatctctattggagtcatatagtgaaggttttaaataggacaatataagagaacaatgacaagaacttatcactaatacactctaaaccaagcaaagcttaagagactaatgataatatttacctgctcaaaatatggaaccgcctctgtcgctgatttgttattgaatgaaataatggcattaacctttcacaagagagagattacatttttgtcacacttgcttagaattaagacaaagagaagattagaatcaacctaacctttggtatcttctcagcaaaataacttccggtcaaaacttggagcagtgcaccattactgtatagaaagttgaaaacttgacactagtcagaattcaggacacagagaattcataaggtttaaggaaggagagaaaagttgaacacctgtgaccaactgagaaaagaggaaggtcagctaaatctccaggcttcaagtttgaatttggaattccagatgagacaatcgtgtccaagcatgaattaaacctctcataaacttgcttagcagcttgttcatgatcaaatgtaacattgtacggcacagatactatcaaatacccttcctttgccagtagctccttaaggtaactacaaatcacacagagacaaaggaacaacatcttttaggttatgtgaaatttgatgaactcggagaatcaaagtacctgtaagtgagttcaggaacagctccgacgaaggcacctcccaagaatttaacaatagcacgcggtttcttgaatttaggaggaggaggaatcactagacaagaatcaagcctcgtgtaaaccttattgtttctgctgccaccggtcgctgtgacggtgagagacaaagctcgagctcgtttgctaaacagagtggccgggattagttgagtacccagaaaactcgaagtggctaatccaaactccattattccttttcttccctacagttttgtgtgaagaagaagaagcaaacgtttagtcagacttttttttttttaacaagttttttttttttttcacagaaagttatttttattagggtgaattgcaaaaataacagttttcaaaaaattattaaatatgtggttttataatgtggataatgtagtggaaagaaattttcagggctcctttttagtggagagtaatcttatatacttatattataaaaaaagaaaaaaaaatgattttcttttatccgtaaaagaagtaaatgacatagaaaaccttaaaaatattgattatttacgacccaaccaatataaatggattccaaaattatccaagctcattgtatttgggtcatatccaataaaaccctagtaaaacactaggttttccaaattctctgcggtaaaatcgattcacgatctctttcttctctttcttttctgtttttttttcttatttcttcactgtaaatctaaatccagtaaaacaattctcaattctcgtcaacgacaacgacagatctgttcgtcgatcttggtatatctgtagaaaactaagaaattgggtaagttaaaatcggatccgagttatttcagattgggttttgtgatcgaaattgattgaagagtagtactaatccaaatgattttgtttgtaggtttggagaaatg

SEQ ID NO: 14422 - DNA, 3000 bp, Unknown
  misc_feature (1)..( 3000): cDNA_ID_3016988_gDNA_ID_2684117_Annot_ID_190828 3000 nt of promoter + ATG
ttgttttgattccgcaaccttaatagaaaaacaaaataaaatttttccttgtttagtttgttatttgtttcatttttgctattttcgttaaaataaataaatcaaatgttgttatttttgacttatttgttgacttacttcctgagttaagttatgattcattgtcttctttgttttactctcttttacgaggtaccacaaataaaatttgagaacgatggagacaatagagtactccagctctgatgaagaggactcatatggatatagtcaagactcgtactacaatgagactagatttgttgagtcatggcatgatgatggctactcatcaggctcggattttgaggaagaaccatatggtggagcacctgaaccagagccaccagatcgttatagtagcagctacaccacaccgagttatccgaagtcatggatctcatggaaccccataccaaacaccaattcctatcccactttctaccccactcgcaaagttatatacaaattatttgtgcataatggtagtaaaacttatggacccgaattctttttgttttcaggattgggctatctacagtgggaaagtaatataaattactatttcgagtaccattccacaccacaagaagataagctttcgattgccctagggcaactcaagagtagtgttttgaggtggtcggatcaagatgagtacaaccgttgaggtgatgggagaccaaagatcagaatgtgggagaacctaaagtggattatgtacgaaaagtattgcccacaatgtctgaatcaagggaggaaaacaactttccctccaaagcaagccatccaaggagacaagatgcctaaaacaaccttaaatctgactgaaaaatcatggtaagttttctgaacttgaatgttctatggaactaacttgctacaggtgcaaaggacaaggacacatagcaaaggattgtcccaccaaaaaaagttcaccaagacaagaaccaactctttgtcttcatccacaagtactccaaaaacaagtggacgtttccactcttcaacatgatcaggttcaaactgaagcttgtcaaattgattataatgttcctatgactcttttaatgcacttgtctagtgccaaaagcattgagaaagtttcaggtacaaaagagatcattaaggatcaaggaaaagtttcaacaatggagaaagtgttcacgaaagaaactcaaaaccaaggagaactgacattgaaaaaagttgttgtcaacaaagatgagagtgtcaaagacattataccgatcaaagaagaaccaccgaatgctcaacaatttctccaaactcaatgtaagcttctaaacccttatacacttcaatggagtaacttgacttatctatgtgtaggtaaacaagttttgaggacaaaacctcttgaagaaggaggggataatgtaagaatgggagctgacgtaccggctgatgcacttgttgacagattgcttgttagacttcttgatggactttctgacggactacctgaagtacttcatgtatcaaatcagcttgtgcgaactaaggaaagctatcctttccttcccttttgtgcgtcccagagccacatatggaagcctggagatcctctacgccacccagaaccattcacacttaatccttggtgcatctttccttatgtgaacccgctgagcgaagactttccttttccggatctaaatgagatcaaatcacaacgactctattttgatcatcttttgggaattaagaagcctcctacaatgactctagatgtcccaaaatcacatcacttccagcccaagttgtcaagactcaagacacatcacaagtttccttatttggccgatttcgtcactaaagttccaacggccatattttcatttattgttgcgatttctttacttctttagagcacatgaacgttgtatgagcctctatataagctcaccttagttttcatttgtattcaagtcttttacgaaataaacaagtattttctttaaagagtgtctttgagttttatgcattagaagttagtgtggattcactaaagtcttgtgtgtttgcagatcaattatcttgtggattcaagttaatttgttcgtggtttgattgtggattcaatcaagcacgttgagagtggattcattcaataaaacctccatctttcatctctaccatcattcatcgaatcattcaagctttaggtcgagaaaccaagaagcgtaaaccctaggtggatttcgaggtttgcatcaataatccagatgatagcattggcaattcttctaatatatattgcctctcgaattttatgcaaagatattcaatgtcatctctatatgatatccattacttcagatatctttaaaacttatcaattttctatgagacttgggggaatataatgcatcatttactttaaaatgagtttcccttgggattgtaaaattggtttcgctaaagcctaatattatctttgcatggtcatatatagtactcacgtttctagcgaagtcttttataatcgagagaggagaagtatttttatctttaaagattgtgtgcatagaaccctgtcagctgatatatatgttcatcctcaatctcatattttgacatttttctataataaaatatttattcattaaaacatcgacataaactattcatatgtcataatatattacaataaaaacattatcccataaaaacaaaagcatcaataatgcttgtcatacataacatgattatacatatagctataatatattacattaattttctcgttgtcatgatcaatcgagagaatctgtcatatcaagatgagtatcatcatgttggcctttaaaggaaggtcccggctcatcacagaagagattagtttcaacatccctttctttcgccttttacgaagattggtacatatcggctaaattgtttggtatacgacacgtctagtactagtgtcctttcatg

SEQ ID NO: 14423 - DNA, 3000 bp, Unknown
  misc_feature (1)..( 3000): cDNA_ID_2730102_gDNA_ID_2684118_Annot_ID_137155 3000 nt of promoter + ATG
acttctttgaggtattaatggttttgttttccgcatttgcagtgaagcatactggacctggaatcttgagcatggcaaacgctggtcctaatactaatggaagccagtttttcatttgtaccgtcaaggtaaagattctcaattcttcacatcatctatagagttatcgatctttcatatgtttgccttcccattttgattaatatttatttcacaaatttgtttttttgtgcagacttcatggttagataacaagcatgtcgtgtttggacaagtaattgaaggtatgaagcttgttaggactcttgagtctcaagagactcgcgctttcgatgttcccaagaaaggttgtagaatctatgcctgcggagagctcccgttagatgcttgataatcactattgaccgatgcattgtctttgccatctttgttctgttttttgctattatgactattgaggaatccaaaccatcaaaaagccaaagattttcaaattctggtcttttatttattatatatttcggatacatgagttataagttcttttaatcgatgtgggattcttattagaatgtctctctaagcattgaccatggttgcaaccgcggcttgctgaacaattggctcgagcttctcatctttgttgtcttcccataaatcaggtattgcttcctttatgttatgaatgctgcttagtgcatagtcagcacctggaactagcactgattcccccacaaacacggtttttagccctgttgctttagcactagcgatgttacgaatactgtcatcgaagaatatctgaaaagaaaaagatatagacttttaagtttggtatctgaaactgtgaaagatcatagtgacttttctattaccgttttgcgtggatcaacaatgtctgcaatgcgaattgcagcttcaaatgcttcaacagagggtttacagaggatttgagtgtttgaatcagaagaagggtttagtgtttcgaagcaaatgattccttcaaagcagtcctcaagacccaatctgttgagagctcgtgttgcgtgagctttgtctgcgttagtaaagatctgttcgaagggaaaatgaaaaaacagaggatgagaaaaaaagattcagtggagaattcgagtacaaagcttgaagaaggaagaaacttacgattttacggtgaggcatagagaggagaaggttacggaggagtggatcaggttttagtttctcgtagggaagtcttccatggacatattcatggaattcatcgttgtcgaattcgtaacccataacctataagtacgcctctgttttggttatttcagtttcctcagtgaatgtttaagatcaagaattttgaaataagttaccttgagaccagccatggtggttccatattctttgtaaagatccaaacacaactttggaacttcactctcttcgattccgagttggttaagcatgaactctgcaaataacgaaaacaaagggatacaaaattcagttatatggccgttaatgattaagtaaagacaagcatcttgaaatgttaagtctcttttccttggatgttgtttcgacaagctaagttgattccgatgctcaaagggtataaagtatcgtccatatctgcaacaacagataagagttttaattcctttacaaaaaaaaaattgcacaagggaaataagattgaagatgattggtttatagtttatatgtgtattatttaccaaagaacaaacactcgtagttagctccaaatccatccattttacgaatccaacgaagaagaagctgctaacgagaattaatgaattatagacgggaagattaataatgaaaagagagagagagcttatgaacaatgtgaaggagttggttgtatttatatacacaattcaaaaaaggtagtggattttgttaggacacatagaatatttggttactagtctttatctaatatcgttttgaaacatatgatatcattctagttttttttttgcatgcattagggtttgtatcataaataccctttaacttccggtttttggatccataattttctattgcggctagaactagctaataataatatcacgtttaatgcataaatcatttgtcccaagaaatgaaactagttaggttggtgtgttgctctaaaattcacaaaaagcaccatgcatccacttgattgtacaaaataaattcagaaagcatgattgttgaaggtgacttgacgatcatgataattatccaccatgttgcatctatgctgatgcgggcaataagatgaggtgtttagcatctactatcatttatttttatcattcttttaatttctttgtcatttcccacactttccgtcgtgacctgccattttcattttctataaataatgctaaaacaaagggtgaaaataaaggtgaactctcaaatattctgaaatgtcaaaagtgtagacagaacgaaaaaaatttgtcaaggatcaaaagcagcagaataaagtttaatcgtgaagaacatattattttttattttttttgaaaatctgtctaaaactattttgattataaatcacaaacaagttgcatgtttaccaaataattaatataaattatgatttttgtccaccatcaagacacagatgaaactgaatcaaatctgcatataatatataaacggattcgaatgaatggttagctgatgcatagagcactctctttattataatagcaaaaaggtgtaaagcctaaacctaaaagttaggttaatgacatagattatgtgttcattttctggttccgtaaaaaagaattcatcatttacaaagtttaataatttgtataggcatgtttgatttggaatttttgttgttttctgagtggatttaaaattacaatgaaacaggcctgttaagtgttaactccacctaaaatggcccaaagtatatctcccattttagataaccggccaatttctctgtgttacagagtgacgaca

SEQ ID NO: 14424 - DNA, 3000 bp, Unknown
  misc_feature (1)..( 3000): cDNA_ID_2730095_gDNA_ID_2684118_Annot_ID_137157 3000 nt of promoter + ATG
gacactatgcataggtcatggcctgaactgagtctaactttctaaatttgtcaaattggcctctttctttttatttttcactggaattttgagtgcttatcaaaattcaagcaagatatttttacatgcatttattgaccagatatactaacagactaacaaatctctccatcagagagctgagacaagaccaaaaaaagatggataaataaccaaacctcaatcagttctccccgattgatagagattttatgcgcttttccacaccctgacaagtgactcaaaacagctgaagcctcattcgaaccgttgcacaaattccgaaacttcttcagcgtgacaacacaagtagaagtccagtgtccctcagataatatcttcaccacgtcagccgccttctcctagacatcacatagacttatttcaatcagccacatacttatataataaactgagaattcttctcctagatatagatggttaaaagtgagaacaaacagaagcaccttcaagagtggaacaagaacaagtgtattttccagaatctcttcctgcttcactggctgttgaaccattaagttcttcactgtcctcaataaacgagcaatacgaccactaccgggatcatcgagatcactaatccgcacaacatcaccttcactatgcatcaataactggaaacacgagccacttatataatcgatcttaaagaagataaatcctctttggccactaaatgcagcagaaactcaccacaacatcatcaatgcataaaggcgtcattcctcctcgatcaaaccacgccttcttcaccttttagaaacaagtgaacaaatcaacgttacataatcagttcttcctactagttactaatttcatctagaaccaaaagcaattgaccagacctggacaggatcaatgatgaacaacccaaactgacgcgaaaccttgatgatcaaatcacgccaaaactgaaatttaagttcccaatcggacctctgaccactaaacgccttgaatctagccatcgccaccacctcatcgtcccaatctggaacttcccttcgtataaactccttcacagcttcaggatccatttccttcactcagatgaaagaattagggaaaaattaacagagatggtgaagaagaatcttgtagactcgcaactatacaagaatatcgacagaatcctgcgaatttgaaagtcgatttcccgccggactaagttttatacgaagatcgtcggagagataagccaagtctcggagatgttctcgattcgacatgctctgccgtttgtcctatgaaatttagcactgtatgacgtttttaagaattcggccaggcccattaactagagagtactaggctttgactttcaaaattaggcccggcccattaattagagtgtactaggctttgactctcaaaacgagactggtcaaaactcaaaagatcccagggtcaacgtcgctccggtggttttaacaacaaatccaccatcaaataatgtacctaaacaacctcttataataatgttttattttacaaaatcagtgtacttactattcaattaaactagaaagcgaccaaatttatttttaaaaacttagttcttaaggataagtaaaacgtcccacgggaccggccataagatgacccaatgcaagttacacgttgatagttttttcatgaattagaaagaaaaaaacaattgaaaatgggaaagtcaagtagtaaaatagtaattgttttttgtttgttgggtgatgaaaagctaaaattaatttttaaaaagtgagaaactagataagaaaagtgtaaaagacacaaaggagacaagaaggaccgtccatgattatagtaaatgcgtaatattaattacgataatgatatgttttatatataaacaccacacaatacacctgaggcaagccaattccatacacatatagatgtttatctacacaaaatagagacgttataacggctttaactcatcctggtctgggatatttatagcatatcacgtgattttgcatattagatgttgatatccatatctgtttcagtccagctttatggtctatctatactataagttatagaatgcgtttagcattgtatatccagaatcaatgccaaacttacatagttacattttcaaaggataaactgattatttatagcaaaccagctccatttttggtcgttgaagcaagattataggtggcatttattaagtgggctaatacttttaagttcctgaattggtttatcagtctcaactcttagccgattccgcgttaatggataaaatatggtttaatatgttagcgattagtgatgtaataaacggtcgattagttaaagcttcccatattggattatgggctatggcgtttataaacaagttataagggtgaacatgtgtcactttttaatgcttgagagcgacaacaaatttggaaattgtaggaataatcaatctcgtattaagacaatggcgaaaaaaaggtcactaactacgtgaataccttgttttaacattgaatttaatgagaattaaatctactttccggtggattttttttgtaataaaaaaaaccagagtcgttctatctccgcgttaaagtaggacccaggggaaaaaagtaacgtttctattgaaaatagtaaaaaaatcgaccaaggtttttcaaataaatgcagtgattagtagtaatccgaagctattttagtaatgatagaatcaaacaaagtgagttagatatttacccccaaaaaaggattaaagtagaaataaaaattgctgttttcaaacaaaaagagggctaaaaacgtaaatagcacaaaacccgagactcgggtataaatgaaagtgatcaaagggagttaaagcacgagttgactcagttaagtttcaccattataacgatatagtggagactccaaacgtcagtctcttcactttcctacttcttcttctctttcatg

SEQ ID NO: 14425 - DNA, 3000 bp, Unknown
  misc_feature (1)..( 3000): cDNA_ID_2995974_gDNA_ID_2684118_Annot_ID_137158 3000 nt of promoter + ATG
acgcgtggtaacatagtgtaggttcgatttagtgcataaagtgttagctataaggaaaaaaattatacttcgattaacaagttcgatagaatttcgcaaaaaaattaatccctctaagaacggctctcactactgactgaaacaatctcatcatccatgaaaacaactactgtttatcgtatttacaaacgcaagaaaaggaactaaatccaactctaaaaactcgtccccataaagcataacttaaaaaaaacatcaaaaacgctaagtctataacttcaacaaaaagaagaaggaaaaaactaaaacagagaagtagatatatgactaagaagcttgacgtgtcgcagaagctaaagctaccgcttgtgcccacactttcaacctcgccttgacctcctttggatcatcacctaatttaataacataaatttattcagagacaaattcaaacataaataaaacataagtaaacatatttgactattactttacttaccaggactggagatacgccaggtggcgatgggtgagtcgccgccgctactagtctgagtatcgaaattcgacccggttgttgacacagatatccgacccggaaccggaacctctaattcgaacccgagatctctacaagctttcacttcttgtaaccccatcctcaacgacctatctccacctcttgctctcgtcaacaccgttaagccttctcttccaccgacgtcacactctccgttaactccctttttcttcttttccctcctttgcctccgtaaactacacttactgccatttttgttactctcattcgcatctaactcgccggaaactgtaagttttcttctccggcgagatggagtcaccggaagagagtaaaacccacgtgtctctttgtcggaatctgactctcgaacgttctcttttccttctccatcatcggaaacttccccatccgcctctgctccgtcgaaattctccagagatgtggaaacacacgaatctggttgattcttcgtggctgcttcgtcgtaagcagagctcgtacatatagacaatctcgacaaagaagaaaccattactaagctctcttcgaacgccatgaaagagaagaagaagtaggaaagtgaagagactgacgtttggagtctccactatatcgttataatggtgaaacttaactgagtcaactcgtgctttaactccctttgatcactttcatttatacccgagtctcgggttttgtgctatttacgtttttagccctctttttgtttgaaaacagcaatttttatttctactttaatccttttttgggggtaaatatctaactcactttgtttgattctatcattactaaaatagcttcggattactactaatcactgcatttatttgaaaaaccttggtcgatttttttactattttcaatagaaacgttacttttttcccctgggtcctactttaacgcggagatagaacgactctggttttttttattacaaaaaaaatccaccggaaagtagatttaattctcattaaattcaatgttaaaacaaggtattcacgtagttagtgacctttttttcgccattgtcttaatacgagattgattattcctacaatttccaaatttgttgtcgctctcaagcattaaaaagtgacacatgttcacccttataacttgtttataaacgccatagcccataatccaatatgggaagctttaactaatcgaccgtttattacatcactaatcgctaacatattaaaccatattttatccattaacgcggaatcggctaagagttgagactgataaaccaattcaggaacttaaaagtattagcccacttaataaatgccacctataatcttgcttcaacgaccaaaaatggagctggtttgctataaataatcagtttatcctttgaaaatgtaactatgtaagtttggcattgattctggatatacaatgctaaacgcattctataacttatagtatagatagaccataaagctggactgaaacagatatggatatcaacatctaatatgcaaaatcacgtgatatgctataaatatcccagaccaggatgagttaaagccgttataacgtctctattttgtgtagataaacatctatatgtgtatggaattggcttgcctcaggtgtattgtgtggtgtttatatataaaacatatcattatcgtaattaatattacgcatttactataatcatggacggtccttcttgtctcctttgtgtcttttacacttttcttatctagtttctcactttttaaaaattaattttagcttttcatcacccaacaaacaaaaaacaattactattttactacttgactttcccattttcaattgtttttttctttctaattcatgaaaaaactatcaacgtgtaacttgcattgggtcatcttatggccggtcccgtgggacgttttacttatccttaagaactaagtttttaaaaataaatttggtcgctttctagtttaattgaatagtaagtacactgattttgtaaaataaaacattattataagaggttgtttaggtacattatttgatggtggatttgttgttaaaaccaccggagcgacgttgaccctgggatcttttgagttttgaccagtctcgttttgagagtcaaagcctagtacactctaattaatgggccgggcctaattttgaaagtcaaagcctagtactctctagttaatgggcctggccgaattcttaaaaacgtcatacagtgctaaatttcataggacaaacggcagagcatgtcgaatcgagaacatctccgagacttggcttatctctccgacgatcttcgtataaaacttagtccggcgggaaatcgactttcaaattcgcaggattctgtcgatattcttgtatagttgcgagtctacaagattcttcttcaccatctctgttaatttttccctaattctttcatctgagtgaaggaa

SEQ ID NO: 14426 - DNA, 3000 bp, Unknown
  misc_feature (1)..( 3000): cDNA_ID_2730091_gDNA_ID_2684118_Annot_ID_137159 3000 nt of promoter + ATG
attctttgtcccctttgttttttttttttgtatcttgtactcgtcttttgtttctagataaccaatatgttattacatgtatttggtcaagtattttctttgaataacgtataaaattctggaaagcgaacatagatagtaaaaacaagaaaaaaatagagtcaattctaagtaaattaaatcctatttgtgaaagtataaaaacaatactaaaagaaaattggagaattgagatttcaccatatgtacatagaaatgaaattcaaaagaaaaacagtgattctcagattttcaaggcactcatagttttttagtttcaagatttaatgataatgtctcgtccttttacaaatcattaagttgtaagagagttttgcttctttttgaaagaaaaaaaatactactcataatttactttatgtttatcataaattatgataactcgactttactgcaatgtgtttgcttgtcagtaaaaacatgggctggcttcaaatccggatgattgcatgtctcgtgactcttttgtagcctctcttgttggccaactcattccattttctcgttttaggctctttcttttttttagtcacaaagttgaccataccaacatgcaagaccaattattatatctctttttgacataaaccaattattatatcttcaaaattagaggtttttgaccaccactctgatatatttttggcttcgaaaccaaccaacaaaaaacatagcggtttaaaaattaaaaaaccgtctttatcataaaccaaaccataaaatgcagtgattcaccttctaatcttctgtttgacgtacaagtgataaatgacttcaaagctactcccgtttctttacgagtgatttcatttcatcataaagaaatatgtgttgctcttgttcttagaaaattatttctcccagtcctttacaataatgtagatttcttctgttagtatgataaatatatatatgattgaatgtatatatttaacatgttttacgaaaaaagtcagtgtatactatttatgggaaaagtatcactaacttcgaaatatagttgatatttgttagttttatgtctactttaatttaagtcatttaatcaaaaattataatgttgaggtccataaactttaaaagtcccaataatgtgtaattaagttttagaaagaatacttattggattttcatctatgactctatttagaaaagttgtgtctacagtgactagctgcaaaaaaaaggttatgtatagtatcgattgccccttaaaacggagtgaaaacatgttttcttgaatcaaatccaaagtttacaaaatagaggaagatttagatatggtctctaaagtctaaagtagtctaggactaggagggcaatcttgtgaggtattagtgatgttcttttcatgtatttaatatataaatgtaagtttgctgaagcttaatacattaatgaatatgaatgcatgaaaactcgataaagcaagatacgtgcgtgttactactatttgaggtttcgttcgtgccttttagaatagacctattgatactatattttatttcaataatttgggttagattacgcgctaaccccgtgattgatttgttttttttttgtctttaataataataattaccgaatcttaaaacatgataatgatacgtgtgggtgtgtgacattatgttctcttttaagattctatatgacgtcatttcccttccaaatgacatttgatttgcccttgtgccgatgcatagttttaggctctatctctttccttttttcgtgatgacaaggttaaagccttataacctcttggcccaataaatttgtatttgtatatgtaatatgttagatcaaaatgttttactgtgcaatgttattttacttggtttaatatttcaaacgacaatgttaccctgaaatagtataatagctagagatccctacttgtaaatatcaaaacattgaaaactatttttctgaatcatttggtgtaaccggctaagttatattattggtcggacaccaaatattatagaatagaaaaataaaataaaataaaaggatgcatgagtgagtcatttgttatggaagagtagtgaggacaagtgtctaatacactgcatacgggtacccccaaaaaaaaaaacacaaaggtacattgaatcacgtggctttcacgtgaacttcacgctctgctttttttacttcttccattgtttggtctactttttcctttcaagagaatgctgccaaacaccttgtaggtcctatcaatattttttgtgggcccagcccattccttattgttcttgtactgtgaatgttcttcccacaaccacgtgggctttttggcccgttctctctctctctcctccccaacacttttttttttgtcgtactatcggtttgtgaaacagagatttgttgtttcactgatgtttacaaaagatatttgtctatgttgtggcaatctgatattctgacggatgtctattattatatttttaagtcctttctatttgtattttatgtgatttcgtttttggaaacgacatcccttgcatttaaataatctttttataatttataaaggcacaataaagtatcaaaaaaaaaatctcaaagatgctaagattcgacttatataaacagtggtactgtacaacaggaaattcattgcacctgaaaaaataattaaaaacaggtgaaagagataataataccaaaaaaatgaaaaggaaagaaaagcgaaatataaaataagagcaaaagagtctgaagttgatcaacaaaagaaagattagctttcacttacttccactgaagaaataacttttggaacattcaacaagacaacaaaatatgacttccccatcatccaccttcagaccaaattaagttcttcaatcttgtttccctgtttcacacacatatatatatatatatatatatatatatatatatgtgtgtgtttgtgtgcagacgatg

SEQ ID NO: 14427 - DNA, 3000 bp, Unknown
  misc_feature (1)..( 3000): cDNA_ID_2730084_gDNA_ID_2684118_Annot_ID_137161 3000 nt of promoter + ATG
ggtatgtaatctttttgttctgagacttaaccttttttcttgtgggtttactctctgtgaagttgaactttgattttataggctttcattccaaacactggtcgtggtgtacaaggtgcaacctctcattgtttgggacaaaactttgcgaagatgtttgagatcaactttgagaatgagaaagcagagacagaaatggtgtggcagaattcttgggcctacagtaccaggacggtaaatacttggaagtacttagattatttttctcatgtgctctacaactgttaacttatcattttcaaaccttttatagattggagtgatgattatgactcatggagatgacaaaggcctggtactccctcctaaagtcgcatctgtgcaagttgttgtgattcctgttccctacaaagatgctaatacccaaggaatttatgatgcttgtactgctactgcatctgccttgtgtgaagccggtatccgtgctgaagaagatttaagggacaactactctcctggatggaagtattcagactgggaaatgaagggtgttccattgaggattgagattggtcccagagacctagaaaatgatcaggtcagtccgtttaatatctcatcaattccttcgacatataatattgaagtaagtgcctggtttaaatatgtaacttgtaatgtagctaaacggatttcatttatcccataggtcagaactgtgagacgtgacaacggagttaaggaagatatcccaagaggtagcttagtcgaacatgttaaggaactgcttgaaaagatccagcaaaacatgtatgaagttgctaagcaaaagagggaagcatgtgttcaagaggtaaagacttgggatgagtttatcaaagctcttaacgaaaagaaactcattttggctccctggtgtgatgaagaggtatgttacagcaaaaacttcttattccagcttatagaattaaaactcaagaagataacaattttaagttccttaaacttaaattctttgtaggaagtggaaagagatgttaaggcacgtacgaaaggtgaaacaggagcagctaaaaccctttgttctccatttgatcagcctgaactccctgaaggtcagagaccctctaaatttagaatctgtttgagaaatttggctcataaatttagtccatccattgacacgaagcttcaatgttttcgatgcaggcactctctgctttgcttcaggaaaacctgcaaagaaatggacctattggggcaggagttactaagtgttcatcatgttttgattcaattcatgaaaatttacttttggcttgtaaagactctctcaagtgcattgtgctttgatctgatattttgaccaaaagctatttgagttattttgactgtgattgcactaagaattataaagagttgtttgattcaaagatattgatggaaaacggtaccgaattcgttttagcataaatttcagaccaatattacgtaaaccggaaagtggcctggtttactatttgttaacggaagagaaccccataatcatatcccaaatgtcgttgttaagattaattaatcacattatgttttgttgcattcagggaagcctgcaaagaaagtggacttattgggggcaggactgcaggagttacaaagttgatgaaaattgcttcttcttgtgtttctcttgtttactttggtttagactcgttttcggtttggttttgttttcaggcgtagatttgatctattgactattgattgatagattaactgatgatattcaatagtatttaatctatggatctcaccattaagctctgtttttacagaaaaaaattgatttgtcttagtcaatagtgaatatttgaaataattgtttatatagggtattttgaccagataatccggtccatgatggtggtatgtttgctgaataattaaagggggggtaattaagtatagtaattatggatgttgtattgttttatttatagacaacaacaagtctgtctcattactatgcctgtcttattaattcttctctctaatttcggaatataatttcaaaaaatcccttcaccaattctagctctttttctggtgtccatttatctttttttaactgaaattatgaaaacgtataattagcagagtcagtcaactctcactacgttacgacttacgagaccaaacgccacgtgtcacgtgatccgttatcttcttccaactaaacgacagcgtttcgtctcattagtaaaaaaaaaagaattacagagcttttcaaaaaacccttttttgcttcaatagaatcaatcaatcttcgatgtaagaagaatttgaaggtcacaattttctctttatcctttttataataatattcttttagttcggatcacatgaaatacgctgattccttcccaacaaaagaaacaattgatttataagtgttgttcatattaatacagactgggtttctctttctctctgggtttctctcagtgaccctctttgtctctttgtaacagaacatcaaataaggtatctccagacatcttagatatcatcgaatcgaatgttcttcttcttctttaattatggtttaaagtctctaattatatcttggttttcgtaggaggaagatattaaaaaattggtaatggcgatgatcatgggtacggagaaggtagaagatggacctactgcttgaattttggcgggcagaaacggtctctttcaatgatttttatgtccattgtgggttccccagtttcctctcaccactgacccatctaatcaatctttgcaacttgctactactatccatccatccatgagagagaaattttttgtgattcaaagttttgatttttagctaccaatctatgagtgagtgactgagaaacagagaaggattccaagctgctaaagattttttgtcaagatttttaatttaagtttcctggaggaggagatcacagatcttcttttcatatg

SEQ ID NO: 14428 - DNA, 3000 bp, Unknown
  misc_feature (1)..( 3000): cDNA_ID_2685791_gDNA_ID_2684118_Annot_ID_137162 3000 nt of promoter + ATG
cagaatgtttgaggaagataagattagacgcacatgattttatttgcaataatcatacaaagccgttaaacgttataaaagactaataaaaagagagggcctctcaaggttagcttcttcttccattgcaagccgctcctccacaagctcatcaatacatgttacctccggaatctttgcccgtggctcttccatcgccttattgttacaccggcagttgatctatgaaagagtctcaatgaggctcttgtggattatcaaagtatatctgccaccaaaaccaaaacatatgtttagaagaacaataccttaattggtttggttcatatacgatcaagcaatcatcacctagagcatggaaaaaagatctaaagttgtctgcttttttacagtccaccattttgaaggcagagaagccaacagatgttaagcatggcaatcaactctagatggtaagcaagattgtgaatctgaagcatacctggttactacaatgcaggaaggttttgacaagtcatctgatccttgactaactctgttattgcgtctctcaatctctcataatcctcagttttgttatagacctgatgagagatccgaacatacgcagtaattagtccactgtctttgtctttcactccttcctctccatccctcaatccgagataaaaaactggaacctcaactgagtaatgaacccgcagatatgaccgcaacttaatagcatcttcatcacttccaacacagagttttgaaggtaaaccgatcataaccatcccaacacacatttctggaggtgaccctagattcgttccccaagcatcagccagcattaaacccattctaacagcttcatcatggttcttcatcattatcccttccatccctccctcgaacctgtttacaaactccatcacagatggaaccacaagctgtgaactgtaatccctagtcccaatccaggcactttctataggcaaaccatttccaaactcatgagacaccacagggtgatgaacatcagactcagaaccacgtttcttacaatagaaaaacgcgatagacggtggacaaaagaaccatttatgcagattactcacatagtaatcagctccgatttctttcacatcaactttaacactaccaatggcatgagctgcatcaacaaaaacctgctccacaccttcctctctgcagatcttaaccaattctcgtaccggcatcaaaacacacggcatcgacgttatatgatcaatgatagctaacctaaccgttctaccattcgctctacctttctctagtccttctctaaacttggagataatctcttcgttcgaatttacagggaaaggtaacctaacctcaacagtagaacctcccacacgagagacataagcctgaatcgacttcttcacactctgaaacgcacagtgaaacatcactacagtatcttccttcttatacttcccttccgagaaacaccttccaactttctgaagaacaatagcagcagcagtggtggcgttatcaacgagagagacctcatcaacatcatcggcgttgattaggtcactgatcacagttcgagaagcgagaagtccacgacggagaccgttgaagtagaactcatcaggctgacggagataacgaagctgccactcgcgttgcgcctcgagaacggagccaggacagcacccgaagctaccgttgttgattctggcaacaccggtctggtggtgagcgaactcagagtcgatatctgactcggttaataacccagcgagacgtggcttcttcggtgcgcggtgattgtgactcatcgaatcgccattgcgccgctctcccgcctccatcggaattgaaaaaaatcagagctagggtttcgtctcgaatcccaaattgagagagagagagagagactgtgtgggtttttgggggtcaaatcattcactgttggtacgtcatcgttgatttttgtggtgcggtaacacttttccgcttcccgacaattcataaaaaaaaattcaaaattttagtgaaattaataattatatcattttatatgcgttacacaacgttaaataaattttaattgacatgtgatgatcgatgatcatttgcatccttgttagatttgagtttaatcatatactactaatttatcatttgttaacttaaatgttaagatttgaccgttatttcaaatttgggctttagtgggccattaaggtgggctgttactaggtcgagttataatgacatgtgaggattgattttactcatgagtaataaaatacagcttttttattccatgacctaaccattattcaagttgcaaatggatcgactgcgaaactggattagaatataaatccatcttttctccacaactatagtataaataattaatgcatcgatcgttgacttattgggcttggcccatgtaaactaagcatttaggcaaaaaccagatccaaccctaacacgtggccgtatataattggaagttcagtaacaaagctcgtcaagcgagtcaaacgttcgcaacttgtaacgctattttgctctctcgattcctttctctcttctcttatctttgctgcttcttttgctccgccgtcttcagctcagtcctgcttcagctctccggcgaaattggtaagttcttcttccctttacctcaaacgtttcttattgttccgtgaatctattgtgattttggtaattcgctaggatgtctttagtgtaatccattgtcgtgtttcttaggttccttagctttttagttttcgccggattttgtttttgtgtgagtggacagtaactcgattttggttgagaaattgacggaaatctcaaacgattcgcagatcccgaagtagcttgccattgattttactaatccattagcttggtagtgataaaccttgattttcataactttgattgtaattggatttcgttattggtaatgcatttcagaagaagaaggttgcaatg

SEQ ID NO: 14429 - DNA, 3000 bp, Unknown
  misc_feature (1)..( 3000): cDNA_ID_2730077_gDNA_ID_2684118_Annot_ID_137164 3000 nt of promoter + ATG
agagagcaaaatagcgttacaagttgcgaacgtttgactcgcttgacgagctttgttactgaacttccaattatatacggccacgtgttagggttggatctggtttttgcctaaatgcttagtttacatgggccaagcccaataagtcaacgatcgatgcattaattatttatactatagttgtggagaaaagatggatttatattctaatccagtttcgcagtcgatccatttgcaacttgaataatggttaggtcatggaataaaaaagctgtattttattactcatgagtaaaatcaatcctcacatgtcattataactcgacctagtaacagcccaccttaatggcccactaaagcccaaatttgaaataacggtcaaatcttaacatttaagttaacaaatgataaattagtagtatatgattaaactcaaatctaacaaggatgcaaatgatcatcgatcatcacatgtcaattaaaatttatttaacgttgtgtaacgcatataaaatgatataattattaatttcactaaaattttgaatttttttttatgaattgtcgggaagcggaaaagtgttaccgcaccacaaaaatcaacgatgacgtaccaacagtgaatgatttgacccccaaaaacccacacagtctctctctctctctctcaatttgggattcgagacgaaaccctagctctgatttttttcaattccgatggaggcgggagagcggcgcaatggcgattcgatgagtcacaatcaccgcgcaccgaagaagccacgtctcgctgggttattaaccgagtcagatatcgactctgagttcgctcaccaccagaccggtgttgccagaatcaacaacggtagcttcgggtgctgtcctggctccgttctcgaggcgcaacgcgagtggcagcttcgttatctccgtcagcctgatgagttctacttcaacggtctccgtcgtggacttctcgcttctcgaactgtgatcagtgacctaatcaacgccgatgatgttgatgaggtctctctcgttgataacgccaccactgctgctgctattgttcttcagaaagttggaaggtgtttctcggaagggaagtataagaaggaagatactgtagtgatgtttcactgtgcgtttcagagtgtgaagaagtcgattcaggcttatgtctctcgtgtgggaggttctactgttgaggttaggttacctttccctgtaaattcgaacgaagagattatctccaagtttagagaaggactagagaaaggtagagcgaatggtagaacggttaggttagctatcattgatcatataacgtcgatgccgtgtgttttgatgccggtacgagaattggttaagatctgcagagaggaaggtgtggagcaggtttttgttgatgcagctcatgccattggtagtgttaaagttgatgtgaaagaaatcggagctgattactatgtgagtaatctgcataaatggttcttttgtccaccgtctatcgcgtttttctattgtaagaaacgtggttctgagtctgatgttcatcaccctgtggtgtctcatgagtttggaaatggtttgcctatagaaagtgcctggattgggactagggattacagttcacagcttgtggttccatctgtgatggagtttgtaaacaggttcgagggagggatggaagggataatgatgaagaaccatgatgaagctgttagaatgggtttaatgctggctgatgcttggggaacgaatctagggtcacctccagaaatgtgtgttgggatggttatgatcggtttaccttcaaaactctgtgttggaagtgatgaagatgctattaagttgcggtcatatctgcgggttcattactcagttgaggttccagttttttatctcggattgagggatggagaggaaggagtgaaagacaaagacagtggactaattactgcgtatgttcggatctctcatcaggtctataacaaaactgaggattatgagagattgagagacgcaataacagagttagtcaaggatcagatgacttgtcaaaaccttcctgcattgtagtaaccaggtatgcttcagattcacaatcttgcttaccatctagagttgattgccatgcttaacatctgttggcttctctgccttcaaaatggtggactgtaaaaaagcagacaactttagatcttttttccatgctctaggtgatgattgcttgatcgtatatgaaccaaaccaattaaggtattgttcttctaaacatatgttttggttttggtggcagatatactttgataatccacaagagcctcattgagactctttcatagatcaactgccggtgtaacaataaggcgatggaagagccacgggcaaagattccggaggtaacatgtattgatgagcttgtggaggagcggcttgcaatggaagaagaagctaaccttgagaggccctctctttttattagtcttttataacgtttaacggctttgtatgattattgcaaataaaatcatgtgcgtctaatcttatcttcctcaaacattctgcttgcgaatctcctgtcgcagttccaataatttttccttattgaaaactttttccctcacattgaaagcatattcatagatatgtaatgacacctaatttatcattgttttgtatgattctggttcgttttcacatctatgtctattatgtctatttaccaacttcaaagttcaattaaaaaagggtcaaaagtactaaattgattccgatgaaacctgtcaggtcaaatcctactaaataataaccaatgggtattcctggagaatttgaaactcttgagatttgagttaacttgataccacgtgtcatccatcaggcggtttatcggagaagaagagtcttaaatccggcgagtaagaaactccgactgttttttgattcagagctaagcaaaaaaagcgtgattgtgttgtggagtagaggaagaag

SEQ ID NO: 14430 - DNA, 3000 bp, Unknown
  misc_feature (1)..( 3000): cDNA_ID_2730073_gDNA_ID_2684118_Annot_ID_137165 3000 nt of promoter + ATG
tgaaacttacaccgtggctaactgggttggtccagctaactggatccaagaagccaacgtgcccgtccaactaggattgtaagaggacaacacaaaaaagttaagaataaaacagtatgtgataatgttaaggtaacgatacgacgtcgtctctggggatcagaactcttttttggatactatatacaaagatagggttctagacgtgttgagatgatgtttgtataagattgctttcgtttcacgtgcaaaagaggaaaaaaaattgttttgttattttttttgtagtacaaataattaatttttttttatcacatgttgtatccttaagaaaattgatacacaaaatattttaaataccatcatttgctaaagtttaccatattccactttcatgattattcttacaactacaaaaataaaaataaaaaaatctagtaaaaataaacaaaccaaagatatttatttcacatacgtgttaacagacatgtactagttttgacttttgacaaatattcacagattttaattattttgcattgctattgtttaagtctagatagatatattttttatgagaagtgtaaaatgttagcaaaagcgagccctacatcacctaattatagtccacttcaaagcgaagctgtcccatagataagacttcaccaatatctcacacaatatataagtatagcagtcttctaccaccagaaatgtcacacaactcctaagccaatcttttctttaatcaagtcaatcttttcttcaatggctttttcattaaccagagtaaaccgagttcttattcaagcatgtgaaacgaccccatcagtagtgttggatctgtccttaatcgataatattccggttctacgatgtttcgctagaacaatacatgtgtttactcatggacctgatgcagctagagccatacaagaggcattggctaaagcacttgtctcttactatcccttgtccggtagattgaaagagttaaaccaaggtaaacttcagatcgattgtaccgggaaaactggaatttggttcgttgatgcggttactgatgttaagctagagagtgttggttatttcgacaatctaatggaaataccttacgatgatctccttcctgatcaaatccctaaagatgatgatgcagaaccgcttgtccaaatgcaggtaagtatttaatctacaatccgctagaaccggtttgtttgacaattagtaccgatcttgaattatgaacggtagttttcaaaatccggttcaacggttaataaaaagcagttataaattaaaccgattagcttgacgactgtattcgactgaagttaaactgaaccggattttataatgttactgcaggtgacccaattctcttgcggcggtttcgtaatgggccttagattttgccacgcaatttgtgacggccttggagcggcccaattccttaccgcggtcggagaaatcgcctgcggccaaacgaatctcggcgtctctcccgtctggcatagagatttcattccacagcagcaccgtgcgaatgatgtcatatctccggcaatccctccgccgtttccaccggcgtttccagaatacaagctagagcacttaagctttgatatcccatcagatttgatcgaacggttcaaacgtgagtttcgtgcgtcgaccggagagatttgttcagccttcgaggtcatcgccgcttgtttctggaaacttcgtacggaagcgataaatctgagagaggatacagaagtgaagctcgtattcttcgctaactgtcgtcatcttgttaatccgccgctcccgattggtttctacggcaactgcttcttcccggtgaaaatctccgccgaaagccacgaaatctcgaaggagaaatcagtgttcgatgtggtgaaattgatcaaacaagcgaaaacgaagctaccggaggaatttgaaaagttcgtcagcggcgacggagacgatccgtttgcgccggcggtgggatataatacgctgtttttatcggagtggggaaaattaggattcaatcaggtggattatggatggggtccaccattacacgtggcaccaatccaagggttgagtattgtccctgctggcatcgtaggatctgtgccgttgccgaagaaaggtgtacgtttgatgacgtggtgcgtcgaggagactcattgccaattgttcgatgatttgatgacaaataaattgacatctaacaaaaccgaataatcactaatccagtttattaaaatattgtatagtggaatttgggaaaacgagtaagaaaattcattggctgcttgaaagttgattcgttacgtactgaagtgtaatgtgcacataataataataataaaaattgtaaagaaaaagttatgagtcattcatttgccagctaaaacaaatgcaagttgcatataagaaaatcaatctgaatttgatattttgtctgcatacaatagaaatgcggttaatggcaattgttttatactgtatgaacaaagcaaagtaaatgttgattagtcacactaaagtttgaaagaaaactcgttttttggtactcttttctttgtgaaagaaaaagttaggtgctaataagactatccgcagaacagagaccagaccacttggcgtctgacctgtcacgtcataacaaggtcgtttttgacgactctagtccttgtttctggaagtaggtcctgaacttccacttgaatcaattcaatagacgtaaacgtcttaagagaagttcttgaaatcgaaaatccactgcttcttcttcaagtaatgaattagagtatattatatattcaaccctccacgatccttgtttcctcggctactaagaaaaggaagtgtatctgtgtttttcaggtacatgcttctctgttttttgttgtccaataaagtttaaggtttcagttttctagattttaaagtttggatttttagctttggttttcttgataggatcaaagaacaatg

SEQ ID NO: 14431 - DNA, 3000 bp, Unknown
  misc_feature (1)..( 3000): cDNA_ID_2114026_gDNA_ID_2684118_Annot_ID_137167 3000 nt of promoter + ATG
tttcagctctcaaattcaaaagacagatagattcaaaaaccctaattgatcgaattcagtgatcgaaaatctcgcggagaaactcacaaacgaccgtaatcgaaaaagaagagaagaagaaacctgagaaggatcgggacgagaattaggaggaaagccgagcaagatcttggcttcctccacctccattttccaaaaagcttcccgcgtctacggtttcgcttcagagagtcggtccttcatatattaatctcatttttagcttcagaatcatacgtgtacctctcacaaccactgccctacatttcattttctttcgtaaatatatagttttgaactggaccaatatatactttttaaaaataaaattttgtagaaattgttggaaaatgattaaaaaaatgttcaattatcacaagaaaattaaaatttagtaaacagagagtttcaaaatatatatctacaaaaattcttatcaaaatgttcgaatttcaaatataccacaaaatcttattttagaaataaaaagttcataaaatgtcgtaaatgatttgagaactttcttctaaactctaaatatcattttctttttaatctaaaaaatgtaatatcattttgtcatcatcaactaaaatattacacaaccgtttaacccgaaaattaacgcgcaattcactccctaccatatgtaattattaacaaaaaaaaaaactaaaagctagctgccaaatatagacgaactataaatatatacaaaacatgcattatctttctagctatatcaaaaaacctctcttcttcctccgagatccgttcctttccgatccctttctccgttcatacgaaaacacaatcatgaacactccaatcaaactcttctttctcttcatattcgttgccgcaaccgcaacggctaaaccagtcaaacgaacgaactaccttttcacaccgcacgccaaagcagtcgcgggaatctgcaccgttatcccaacggacacaagtctatgttgcaaaacccttaaacacgttcctaccaatgaccccatcgaactaatccgagcattagtggctgccgctgaaacatccgtcaaacaaagtgtgactttcctctctggaatcaaaccaaaacacatgtcagacgcaaccgcaaccgcagtggtcaacagctgcgagaaaaacttgaattacgcgttggaagatttcgccgatttttggaaagctacggggaaagatgtaacgacgttggctcataattattttacgtgtaaaaaagagttaatgtcaatcatggggtatcattcgacttgtttggacgatattgaagacaagattttgttgaaggaagtggggattgggattggagttgggaagaatctaacaagtgattcttttgatgtgtttaataacttgaatactattttcaagacttttggtattaaggtgaagcttaacgaggaagacacttcgccccgaccgccacccttgtctgattattattactgatgatcgtattaagggattggatgtaataattaattatatcgtgtaaggcctagagcaatcgcgaatggaatcatagatggttggttctgtcatgtatgattatgcgtcgtttgtgatgtaatgttgtaggttttatacatgtacggacggatttcgtgatgattggaaaggatatattaattaatgaaatgttattattttttgtctctatttcaacatttttcttttaaatacatatcgttaatgataacaaaagtattagaatgatgatttagacatttagcctcaggaaattttgaaatctgcaaaaaagttatattatctgctaatctcatttgaacatatccacagtccatcgtgtattcgagttacaagttttttttctctctatataaatgagagtggtttaattatgcagttacggttgttgacaattgacaattaaccggttgttaactgttaaccactgcgaattaacaaggctaactacacaattaaatctctctaatatcgtgatatctatgatgcaaattttctctctcttttttattatcatcattccgtaatcgttattgctattttagtattttttaccgttttgcgtcatcaataatataattcgagcgtaacgacagtttaccgtatacaatagctcatttggttgaccaaagtctaggaagaggttgaatcatatttgtttgatttattgagtatcatatgatttcggttttttctgtttttctattgaataaaagcttacgaattcggtttttctattcaaacactttaatcaaaactaattttgaatctttaagctcataatcctttcgttataagacataaattagtataccattcatgcaatgataccgtcatagagaagacataatttcttactagctaccaagttttattgtagtgtaccaactagttttaaccttaaaaggatgagagcaaactctcaataagaagttttcgaatactttactttcggataaataactaaacttaggaatgaataatccaaaatatattcacaagattagaattagaggatatgttatatgtataagtaaactagagttactgccacatacattttttttggttggatctacgttttatatttttagtaatcgaactcttgatcaggacataatcaaatcatcttgtggtgaccaatttttagtctcatagccaatatttgattagagaatttttagccattcaacgaccttaaatctctccctagctccatgcaaaccctaattttagaaactacaaatcctataagaatgtctccacaatgcaccacaatctctaccagccccattaataaaccaccgggctctgtttcaataaaaaaaatcccctccctctcatatttacctcccgaataaaaccggagggagagaaaaaacataaaaagcaaaaaaaaaggtaaaatcaaaaaggggaaaaatatataacaacaaaaaaaaaaagttagaaaaaatg

SEQ ID NO: 14432 - DNA, 3000 bp, Unknown
  misc_feature (1)..( 3000): cDNA_ID_2730060_gDNA_ID_2684118_Annot_ID_137170 3000 nt of promoter + ATG
tttcttagaaatttgttttttctttattattagataaatagtataatatttatattccctattgatcaactgttacgtttattgactattttatcaaacataccaaaaaaaacatgaatatctcgtaaaaatttgtggaaaattgaatgtgcaatgaagaaatgagtttgaaaaggtcgtgtgacataagtataatacaaattactcgataagaaaacggaaggaagtttcgtcgggctaacaagcattgcttcgtgctcacttagaaagctcttgttgagctaatgatgagtttcaaattcccttttttttttttgtctgtgcctagtaaacaaacatttctctgtaaagaagtactagttgatgtaatatatttaaccttttacgtaaaataaaataaagtttcatcgtggaaagtggaaacactgacgagtgaggagtcttggtcgtcaactaggagattgagattcctttgaagaagattgaagagaaagaagtggttttcgttgataacagaaagtccttcaaaacaaaaattccttttcgcgatcggcgatgaatacggcggggaaagaagatttgggaacggcggatacggctgaggctcagtacgtgatggcgaagacctcagtatggtgggatatagagaattgtcaagtccctaagggtcttgatgcacatgggattgctcagaatattagttcggcgcttaagaaaatgaactattgtggtcgggtctcaatctccgcttatggtgatacgagtggtatccctcatgtcatccaacatgctcttaattccaccggaatcgagctccaccatgtcccggccggtgaattccttaaacccttttatggttttctaaatctagatctactctctttttcctttctttttatttgtttttttttttctgataataaagatctgctagtgagcttgaatgttgttgatcgttgatgtatgccttatgtttcttttcattcttgttttttgttaacaactaacgttgtaggcatttataatcattggttgtattatttcacttctcaatcgaaatcgttttagggttttatactgtttggtttgctgttgattttgactacctcgatcgttgttattgatcaaagagtgttaataaccaaagtgtttcgttttccttttttttttgtgtgtgtgtcgatgtgttatttcaggggtgaaagatgcgagtgacaagaagattctagtggacatgttgttttgggcatttgacaatcctgcgccttcaaatattatgttaatttcaggagatagagacttttccaatgctcttcacaaattgagtctgagacggtacaatattctcttagcacaccctcctaaagcatcagcgccgctaagtcaagctgcaacaacagtatggctttggacaagtctattagccggaggaaaccctctcatacgaggcaaagttaaaacctcacaacttgttgccaatgcgtcaacttctagtaatgtcatgagtagtcctcctcacaatcagtttcctgatcctcctagatcaggtcctttgcatgctcgtcagccttacctaaaccctgatccttttgtgaataacagagatcccaatgctgccagaccaggaccttctaatatgcggccactttgtcctaatgctatccgtcgtcatcgccaagagaagctggaacgcgctctccctctactgattttattggtctttatgtttatgatacttgcaactgtgaactcaaattaaatgctgcatgcaccattttcataataatgagctgtttttggctgttgccgtgaagatgatttgcttggagctgcagactacggagaacttaatcaactcagaagttaaatgctgcagccactatgtctttctctttattgattcttttctttctcagcttgtgttttcgagcttagttgtgtgagtatttaccctgatgtgattatacgcaattacgcattgttttatctccatgggagaaatcacgattttgaattccgacgaatgattttattgttatatatttttatataatttgtttaatatttataaccatccatatatttttcttgtaaatcctaattcatcatcgacaagtttagcacaagggaacttcttttaagttttagctacaaacattcatattcgataatgccagaagtaatgtacattgtcactcaaagaacaagaagtgggtacattagtgttatgcgtattatataatacttttaaacaacataatgccacaatcaatgattaaagtagaaaattttgctagaattatctcatttattaaaaaggacggctttccgaaatattaattttaaccaactattaagatgtcgacaataatcatttgttttatcaacttgtttcttgttttcatactaccacgttaataaataggcttagcttaggaaatttgaaaaacaaaattcaccattttcaaatatttatatgtaaaatttgaatcaaacaaaaagtatatagaaaaaacattgactactgtattagataaaaaaaaaaaagatttcaagggaagttaggacgtaaacgtcgtgacagatggaaaacagagagaagttttcttcgtgaaaaacaaaaacggtgagtctttttcgttgaagttgaagtagaagtcatcatggtcaacgtcaactacaagagaacggacgtaaacgaaacggtgcacgagagcgtccactaaaccaaccacagtatcacaccactactcaaccgatgccaacaaggcataaaccacgactctccaccaatcaaaacgcttcactttttctttcctaaactacccttcccctcgccgatactgtagggacaaaattgtcaaagaacactcgcttcatcatcagggaaatataaagggaagaacagaaaaaccttttcggctaataattgaaaaatcccttattcgaagattcctttggcgattcgtagtagtagcttacggcggcggaagatcgatg

SEQ ID NO: 14433 - DNA, 3000 bp, Unknown
  misc_feature (1)..( 3000): cDNA_ID_2730052_gDNA_ID_2684118_Annot_ID_137172 3000 nt of promoter + ATG
aatacctatagatcagacaaaggcaaatcacaagtagtaggaacggattcttcttccacaggaagcaaacagcaacgtaagaaaacttctaagtttcacagagtacggcttggagatggatcaatggctgccttgctggatcttaacaattctactcgcgagtctgaacaagaatctaaggatagtaattccaacagtaaccaaaatcagaccggtggtttaccggttcgtggggtttggcgtaaaggaggtgctaaccttttctcgtaaagaactaattctctctctctctctctatgttattttggcttatgagtaaagtgtgcgattagatgtttactctctcatttttttgtcagagtgatagagagctttttgagcaaaatttaatttgatataatatggtgtttttgctttttctatatttcatctatttctgacttaattaaattagtctttatttggcattaaaaaaggaattagaatcgtaagaaataatctaaacgcaatttttaaaaatattttgtttgaagtaatttatttctttaatgttacaaaagagggttgattgagcaaattttattggtatagtaagttgtgtaaatattgtgtttatcatcagaaaaatttctactatatttttttattttgtttttttttcacagtgttaaatataaaagttttaatacatattagcataataaagtaatggaaaaaaaataaaattacaattaaagttttaatactttttattattaagttttaaaagggaaatacaaatgtgtgattacaaatccaggaaccacaattgaagtttataactgaaaaacaacataagataggtaatacacccaaatttatccatccttagatcccttaaaggtttcttagtaaaaagtaacgaccaaattctccgaacgagcctcgaactctcccaccctatcagctgcagcacgtatcggaagcagttgaatatcatccaatccaattggctgatacagatccaccctctccaacatacgaccataacgaatcagatactcgagaacacgtaactcgtgcgtaccaccataaaagctccacacctccactttcttaagtgttttcttcaaacattcatgactggtattctgcccccaataagcctctggatcgatctgaggcaccatctcttcgatgggccgaggacccaccatctggaatgagagtgtctccagatacggagaactgttaagcatgaatctgattccaacaaactcattaggttcaaaatttgtcttcagaaccaactgtcttgtctccatcggtgctttcagtcgcaccgggtcttcacactcttggatcaattgaaggacatacggacagattgtgaatgtcttagcagacaacatactgtagagaaatccactgattattgctcctgcactcacgttgtaacggctctcttcacggtagtccagatatgcctcctccattaacttgttcgcactcgcgaactcaaagcgatagactttcccaaagtacttgaagatctgaatattgggcacgtccagtgtggtttgctgcgcggagaaggaacaatacttgaaaaccaacttcattaaccggtcgttatatccggttatcgcatcaagaccaatctcccaacagtttttgatgttcaagatctcgagaagaggtgtctttgctatcaaagccgataacatctcgagacggatccagcggaagaacatggttttcaccatacccggtttcgcgagcctcgatggttcaaaccggcaaccgaataacttcaacgtcacgagactggtaatcttgtaaaaactctccggtaatttgatcaaacccggttctaattgtgcagcgtcgttattggtaacccaacgaggttctgagaggtcaagaaaaagatgcttgacattcttggagacagcgaattcgatcagtgtggtgaccccttcttcaaaagcatacgaattagagagacgaagctcgaagctttcaacaactccaccggtaaaattgttaacccaaccaaccatataggcaactaatgcagccctttggtaatagcgagcaacggaatcatcagcgaatgtcacgatctcgtcctctctgaaagagatgtttctcgtttcgcgacatatgtgtctccagcgggtggaaaggcgactggtgctcaaagcctccttgaaggaaaggttcgaaatgatcaggacgagcaggaagtctgaaagcgtcgaaatgatgtccactgcacttcctgagtccattgttaatgattttggagtaaaagtaatggattcaggaagagaataatgtgtgtggcgtgagggaaaacagtgctcttccttgtctttatatatatttttgaaaggttgcgactttttgttcgtttggcggttctcgtttctctaaccgctctttttacagaggttagggtttgtccgttactcattgaagaattgcaacgatacgcattttctaattaattcacaaaagccatatttaattaataatcgaacccgactgggccgataataaatttacttataataggctttatttttacgacccaattaattaggcccactaattattgcggttaaggaacgttgactttaagtcaaattagagagagcacagtccagggactaaagtgggtcccttggatttcttcctctcttcaccgatttcttagatcttcgaaacctctctctctctctctctctctctctctctctctctctctctctctctctctctctctctctcgttcgtttggtttttggatcagtgtaagcttctccattattttcggattcgcttccttcgtagtttgttcgtttgctctgatttgtaatcgtagcttagtttccgtagattctcaaatgataacgcgctttacgagttttgggtgtgactaggggtttctctctgtgttttcttattcctcaatgttatttcgaaattgaatgctacagatacagagattcaatg

SEQ ID NO: 14434 - DNA, 3000 bp, Unknown
  misc_feature (1)..( 3000): cDNA_ID_2730044_gDNA_ID_2684118_Annot_ID_137174 3000 nt of promoter + ATG
atcgttgcttccttataatctgatgctcttttaagtatacattctgacttgactttcctctgcttaggtttttgacgggcatggaggaccagaagcagcagcatacgtacgggaaaatgccattaggtttttctttgaagatgagcagtttccacagacatcggaagtgagtagtgtttatgtggaagaagttgagacttcattgagaaatgcgtttcttcaagctgatctagctttggcagaggattgcagtatcagcgattcttgtggtaccaccgctctgactgctcttatttgtggaaggtacgtgtttcattcagttttgtttagttctcaatctatctttagaatcttaagagatctcttgcgcatatacgaagatgtgcacaaaggtaaataaatctattgttaggatcttaagagagctcttacatatactagattgtaagtatataacctgtgacatgagcaatattggctatggttttatacttttggttactctttctgttgttgtctttggggtttaactgtgattttctcatgggatacttatgttcttgtcttttgcagactcttaatggttgcaaatgccggagactgcagagcggttctatgcaggaaaggcagagcgatagacatgtctgaagaccataaaccgattaatctacttgagagaagaagagtggaggaatccggcggtttcatcactaatgacggttacctaaatgaagtcctagctgtaacccgagctctgggcgactgggatttaaaactgccacacggctctcaatctccactgatctcggaaccagaaatcaagcagataactctaactgaagacgatgagtttcttgtgattgggtgcgatgggatttgggatgtcttgacgagccaagaagcggttagcattgttaggcgtggcttaaaccggcacaacgatccaacaagatgtgcgcgagagctagtgatggaggctctggggcggaactcatttgataatttaactgcggtggtggtatgtttcatgacaatggacagaggggacaagccggtggtgccattggagaagagaaggtgttttagtctttcgcctgaagctttctgtagcttgaggaatctgttggatggctgaaactagtgtgttttctggtgaaaaccgatgattatataattgatgatgacgaataatctctcccacggctgcttttgtatttagagattttacgcagctgagagaactcttttgagatatacttgtgtattaagtgtgtttgttgtgtgcacagtatgcgattacagttttgtgtacatacatactgttagttgtctatgaataacgaaaaagaaaagattaagtgatcgccactttgtcaagataaaattgcatctttatttttttgatcaagataaaactccattcaacacgaccatttaaaactaggaatgtatcatcatttcgagactaactttcgttcttcgcttaataagatttacaaattcatgcagcagaaactatttttgaacaacttcagtttaaagataaatcaaacttattcaaaaatcattagcaacacgtttagaaaccaaaaagacaaggctactactacgcatgagagcagccttaagaatcaaagcgtagaaactaatcactcatcacaaaactaaaatcctagatcgaatattattcgagaattaatcacttgactaaaaagaatacaagacaaatcataaattccgctacgttgccattgcaaatcatctataaatctgcaaacaaatgatttgaaatgctctcacaactacgttataggatgattcaagaagtagcaaccaatgaatatcaaagtatagaacgaacaacataatgaatatccataaaatcctaaaaccttccataatttataatccagaacgaaagatgttcaacatagaatccatgataactcaaattaaagagcttacaaaattcccaaatagaaatgcagtttttaaaagataagagagaaagagaaggatcgatctaccgctacaacagatcaagcttcaactccttctttctggtaaacgtaggtgagtccacacttaccacagtaatggcgatcaaaatgactcgccatgaaagtcccagctccacaggttgcgttagggcactccttcctcaaacgctgaacctttccagatccatcgattttgtaaaactgaagaacagcgagcttaaccttcttatgcttgtgcttgatcttcttcggcttggtgtaagtcttcttcttcctcttcttagcaccaccacggagacggaggacgagatgaagcgtcgattccttctggatgttgtagtcggcgagggtacggccgtcttcaagctgtttcccggcgaaaatcaatcgctgctggtccggtgggattccttccttgtcttggatcttcgccttcacattgtcgatggtgtcggatgattcaacctcaagggttatggtcttccccgttagggttttcacgaagatctgcatcttttgaggcaacggctgctgaagattatcaaaatggggattttgtaggcgaaggagacctctagggtttcttagctcaattacgttactacccttattttatttgggcttagttttgggctttcacagagcagtctattgggccattaagctcaccaaaagttataaaaaaaagaaaataaaaatggagatgcagggaatcgaaccctgtgcctctcgcatgcaaagcgagcgctctaccatatgagctacatccccgaatgattctcaacacttttttaactaaatagtatcaacgattaatttatttatgtatttgtttgactggccttgatgattaggagacctttgatattcttcttcatctagcccttttatttagcgagccctctttcgagaaccctagatctctcttgctcatcaatctctattgttgtcgtttcgaaacaatttccttatctcgatctcaaattcaggaagagacatg

SEQ ID NO: 14435 - DNA, 3000 bp, Unknown
  misc_feature (1)..( 3000): cDNA_ID_1026676_gDNA_ID_2684118_Annot_ID_137176 3000 nt of promoter + ATG
agcagtaatggttggagggtgtgttgcagctatgcctctccttaaaatgatccctacatcagtcctttggggctactttgccttcatggcaatcgaaagcttacccggaaaccaattctgggaaagaatcttacttctcttcacagctcctagtcgtcgattcaagtaaagtctcaatcattttcatcttcttttactctttcaagaatcattactcaattactcaacaaatttgcagggtccttgaagataaccacgcgacattcgtggaaaccgttccattcaaaacgatcgcaatgttcacaattttccaaacaacttatctcttaacttgctttggtctcacgtggataccaatcgctggagttatgttccctctactgatcatgtttctgatacccgtaaggcaatatatcctcccaagattcttcaaaagtgctcatcttcaggacttagacgcagcagagtacgaagaagcacccgctttaccgttccatctcgcagtaccggtaaacgactccattactaattcgaatcaaaatccacttttttagcttcttgaaaaatcttattaaccgattttggattttgcaggaagctgagatgggatcaactgcttcgtatccatgtgattctgagattcttgatgagtttattacaagaagcagaggagagtttagacacacatgtagtcctaaagttactagttcgacttcaacaccggtttataatcggaatctctctcaagtgtttagtcctagagtgattgatttaagaggtgagatgagtccaaggctctccgggaaaggccaaaatagtccaaagccgagtcctttaaacccatcatcatcgtcgaaatgagtttaccgatgatggaggcttgataaaaccggaggagattatgtttaaaattagttaattaattgatgttgtatcttatgcattcttgagttttttttttctttttacctatgtttaaaattatgtttgcatttctgttcttgatttagaatcattgtaaaatctctctaaataccatgtcaaatgtcggtaaaacattatactatgtaataataaagccatgaaacatcagcttataatatagacgttcacgataaaagaaagttcgagagaaaaaatctaacggaaacatgaaaataaagaacaacaagaaaagttagtggcttttgccttttggttatgtggttgtcttaaactgtgtttgttgcgtctcgatttttattgtcggatcagagattagattaagacattctcattgaccatttttccacgcgtaggtacagtaacttaacctgattaaaaccattctagtttgactaatataatgttttaaagatccttcgcagaatttaaatacaaaaaagggctaaaagttgcacctttttcttattaatattatagtcgaaatcttaaggccaactattcccttaaaatccaacaaggaagaaaaccttactgaatccaatgggcttaatactttcagacagtttaaagatttatggctttcctcgaaattatgatccattaaatgcgtgtctcctcattgatgatcatcagcaaatcgtgtgtcatattatattaaccctaatcataatatattaatactataacaccagcaacattatgctgagtcatacatatatatgctaataagtactagtagttgttaatttttattggtaagataccataacactagttttatattagactttacacgaacaagtttcaaaattttagcaacgcattagatcttgagcatcttggtttcgtctaaagaaacattatttagttgaatgtcttacatagtaagacaaatatttttgggtaatatataaaaaatgtgataatttttaacttttaaattagtatttaggttaaattagatcatacattcttaatatgataacaaagtgtattaccgccttaatagacagtttttttataaagaatggttttgcacctactctatacaaataacatgtcttattatattttcgaaatgttaaacttactcatattgcttaggacaaaatttttaagtaataaataaaacgtgtggtaattcttaaatttggattactatgtcagtttagatattttaattaatttttccaatagtcaaattgagaaggaaaaaacaaccacataaaataataaattaggtaatggctttggatcatagagagcacttaacttgttgatctacgcaatgtgtaaagcttgataccactaaactattattcgtgacaaaaattaaaaagaaagaaaagactgctgacctggcatgacagatagttaaaccttgggaggcaagttcatcctggtgattttaacggtccagattcatctagatgcaacgccattgtgtgattaaagatcgtcacttgcaggtgtgtacacggacaaacctttagagattctggtcgagaaagttctgtacttcctaaagtacccctaaacatttaatcctattacagaaatatccccgttatttccaaagaaagtcctcggaagttggtaaaagtttaaaaaggagtggttcagaatccgacgtcgttcgagggtacgcgcgtcaaagctcgaatgacacgtgtcataattagggcttagtcttagccgtgtgtaatccacaaactaaacagagatcataatctacataagcaaccgactcgccacagatgatggccacgtgtcaactgaattttaccggttacccagtcacccataatcgagtctttttcttcttatatataatcagagagaaaaagcccacgcggctcagaaatttcgtccacgagaggaataaattcacacgcgaacttcgatagttgttaattttcgttgaacacaagtgacgaatttgagagagaaaaaaaaagaaaatcagagataaagaatttgagtttcttggaattaaaggatcgattttgttgaagtgaaattgaaattgattgtgaaaagagaaagagactgatg

SEQ ID NO: 14436 - DNA, 3000 bp, Unknown
  misc_feature (1)..( 3000): cDNA_ID_2730040_gDNA_ID_2684118_Annot_ID_137177 3000 nt of promoter + ATG
ctttgtgaaaaaaaacaaaagacatgaaatgagtgaaatgcatgattgaatctttaataatgtagcaaataatatgtacactgtagtgttgaataaattagacgatactattcattcaaaaaaaaaaaaaaaactagacaatactcaaaaaagaattgatatgtgtgagtttggtggacaacttttacaaaatctagatgaataattaatatgaaagttgatcaaactattaaaaacaaataagcagttttgctgttagagcagtgtatagagtgtgttaccctcacttggctcgacaaactgtaccagaccggtgaaaagagtctcgatgtcaaattagatgcatggctaaaatacaaattaatagagcaccgattacttggttagtcacagtcttcgattattgtcaaacatataacaactcttaaacagttaaacctgtcccaaataagtattcacttgattaattgatattttaaaatttttacaagtaaccaatccactgaaacaattacgccccgttaagatgtataaagaactcaacgtcataggcaggcgatataatacttcatataaatgagtcgttgactgcctttttcatcgtgtcgtatagagacaaaatcgaactcaatgtcatagactcgtaggcgtgtgatttgtggttaatcggttacatgataatttaaacaaaattcgtgtaatatatataactaaatgttacgtcatgtcccgtcctcgatctcaataatttaatccgggaaatatctatggagtatacacatagtagttgaccttttctcgaattaagtatagagacaaaattaaacaaaaacttatttaagatgagaagcatataaaccagaaagtgacattcattgtttatatagaaaaggttttaaagtaacaatcgttaggagtaaatgatagaaatatcttttttaagcatgcttttatttaggtccaaccatcaatccagacttatgattgaataaacctctctaacgaggaaaaacaagttcaaattaagtttttttttttaacgtaaaatagtaacttaatagtaatgaaacaaaattagacggtggattcaaattcaaactcatttttttcctaataactttcattgtgattgtctactcatttttatttttaagaaagtaaagccactatatatacaaagaaacaaggactacaaaaggcatactcacatgtgcagaccaaatgcgtacgtgtatttacatgatcttcattcgcaagtcagtcaataactttctaataattacgtagctatgagttataactcgaattctaaatgaaatcgaataggctggtttctcgtgatgaagagcctcaagtggctgcagtgttttcaagaattcttgttatgtatcttatcatacaaccaaaaaaaacaaaccaacgcatgtaatgatgatttctgatatgtttccatagaaacttcaagaggtttcatcataaacttcaagtggcatgaactagaaataaattagatgtcatcatgatattgtttattagaaaaaggtagttgggaaatatatggctgtgaattccaatattgtatgttgtggttgcgtcgaatgctaagaaatgagttgtccagagcacatggccttcaacctctcttcatacatacatttacgtatgttaaaacaaagaacatgtagtttatatttattgtgtaagtagaagatatatggtgatggtggttacatttttataatgaagcagttaatacacggtgtaagtacaatctgcagcagaatgttggaaggacaacttaacgtgttaaaatccaattcctaaagtaagtgacaaaaaaagaaggtaatgaaacgaatggtgattggatcatttaattaggtcaaactctgctttattcaagtttattaaaagatgttcgtatttgttaggttgagttcttactattacaacgtcagtgtatggattagatgtatattatctcgccaccaccccttccaaaagtgacccttttttcttcttctttttttgcctttacacaaaacatcgtacagttgcctttttaagaaagcaggtaatgaatgtttaagtcgtttcctcacgtagaagatttgatttttactcaataatactataacttttagtataaattttgaaaaaaaaattggacgtcttcgatcgaaggttttttctttttcttttcttgggaacaatgtggacattacttagaaacatttttaataacgtaaactgaactaaacttttcaaagatagagatttgaatacacaatctataactctaattttttagtttttctctcattataaatcatgtaactatgtgatgaataatgatttttacaataaaaaggtcaaaggtaacggtggtggctggctacattataaatgattatagtaatttttttataagcttaccgtcgaaaaacttgacgcgcttcgttaatccttcctaatgatttgttaataatgtccgtcattattagtattatatatagggatgcttcggcttcatctttcttgccaccaaagacatatactttgcaatttgcacagctgaaaccactcttcgtcactttcttgtcatccaaacaatacacagtcccctttttctccattattacttctcaaaaaaaatcatgtaaatttgttccatgaatcattcccaatcttcttcaacgagattcattgttattacgagctccttaatatttggttttttgcttttagctcttattgtctggatttttgtgcatttttcttctatcccctaaacttgtagtattgagaatgttctctaatatgggtttcaagtagtctccttttcgtgtctccctcatatcgggtttaaactcatcttctaactcttcttcgcgagtgtctaaccaaagaagctctccaagtgttcgacgatttgtctgatagaaaacgaaaaacagagtaacttaaaaacagagtaatttacagagagaagccaccatg

SEQ ID NO: 14437 - DNA, 3000 bp, Unknown
  misc_feature (1)..( 3000): cDNA_ID_1557475_gDNA_ID_2684118_Annot_ID_190881 3000 nt of promoter + ATG
cacattcacttgatagcgtaaccattagtcattttagtaccatcaatagttggactgattagtgagattaatgaacggctaagatccttacatgtatataacacacattggtcgtttttttattttatttttctgattatatcgaaaacaaacactttattaaccaaaccagtcaaatagattgatttgttctagatctaccaaaaccggtcaagggaattttttgggtaagagtaccgattcgtcaaaacagcatcaacgacaaaccggttagcagcttcagtatagtgaaccccatcccatacaattgctttggttacatcacgacaaatagttgaaccgggttgaccacacgttgcttttcgatcatagttgttaggtcttcctccataaccgcaacaagccatcaacgggtccacaaatcctgaaacctcataaaccaaataaaccaatcaaaaccggttaactaattaaaataggacttttatagatgcggtcgatacgcaccgtatagtttgaaatcggcggagagtttatatttgatggagtaaatatcaacgtagacgagagtggcgtctttgaattgggatctcagttcgttgcagagactaaggagtcctttgttgaaggctttggcgacttcattgtgaacccggaaacaaccaatcgggtcaagatccgaatcgttatgcaggtgaatcgccaattcttttggtgcacagcccaatgggcctgtgttgtgtacccaaaactttctccctccgtataaatatacagtcttcagtacaacataccaaatcacaaatcagccgtattaggtatggtttaatagtcaactagaaagttttaaacaattgcccatttgccccaagaaagttggaaaatcaaatatgggtagagttttttagttttacttaaataatgtccctgaagtttttagttaccgatttaccaccctaataagtttatgaaaaaataagttttggggctaacagtttacgtatatgtaaaaataaaaaaaaattgtggaagaaatgaagtacctgtatggctttctttatctcaagaagcatggaaggaattttttcgacaacgggtgcataggttaaattcgaatcatatagagcaagtaaaagatcgttttgtccaatatcgatcatgtacaacgcgtttctaaatccattatcatcaataaggtctcttctacctatcaacaaggaaacatattttgtaagtaattaagacgagatatgtataaattgtttgggacaaaagtaattaccggaagagataagttcttgagaacggtttttgaaatggacgaattgacgaatttgaatggcaagagggaaggaaaagatcggaagagcggtggcgcccgagactgcgaaattgactcctcttttgaaatttggtgaaagtgaatccaaatatggactcaaatatgtcatctttaaatgttcacctgatcatatatcaaaaggtttaatcaaatatataacattacatgtacataaaacatatatttaaagaattgaaactcttgttgaaaaaaaagagaaagaattgggactcacagtagaagtcaacgatgagtcgaccgtcaccgagacgaccagtgcctctatggaagaaggtaatgccatgagggagtccgataggaagtccaactccagcaagaactcctccggtgtcggagttagagtcgccgaagtttatcaatataggtttcttgtttgacttgtaactagtttcagagttagagcaaaccaaaagagagagacataaaactaagaagaagcattgtagagaggaaacagtgtaatccatttcttttgaattcttgctactcagataattttaatcaagattcacgatctgaagcttttacatatagtaatgtctttggcttagaaagtcaaattttttgaatgtaagtcaataagtactattgcaagtcgcattatataaatctctaaataatctcaaagtaaaagcaatcaatcaacctatagatccgatcggccatgttctataaggattgtcagaacttgttgagctattaaaatactccgtacaacttatttgattaatatgggccaaatccgaaaataaatggaccttatcgaatattttgttcgaagtccaggcccactaatcgagtgcgaaaaaacaaaaacaaatgcggtgagcgtggatcgaacacgcgaccttcagatcttcagtctgacgctctcccaactgagctatccccgctacttgttatcgaagctaaaataataaaataaatacaaatatttgtaaaagcgagaatttgtgattttttttggcaataagtagagaatagttgtgttccacgattcctcctctcacgttcgaagaccatttcttgttctttggacgaccatcggcgacagtgttaagtctagagtcttcttcttcttcggcgtagttttttccccggtaagtctccgttcatcgccgaatctgtatccctctttctctttttgtttacttgatcgtctctttcgattatgtatatcgcgatcggagtccgtcatctccagatctgtgtgtatgcgcttaatttcgttatggatgtgacatgatttcttgtgattcgtttccttagggttgatagatctgtatcctgcatgatcgttatagatagtgatctagatttgtcttttttcagatcgaaatttagatctcttattgttaatcatgttgattttattgaaacttgctcatacgaatgagatccgagagcatttggaaacataggattgctttgcgttgtaattgttttctcaagtgatggatattgaatctatgtgattgatgcaaaatgagttccagagaatttataatcctaggattgcatgataacttctttgctttgtgattgttttctaaagtatttattccatatgaatgctgcaattgagtatgcgtttagactgaaggtgttatttgaaaactctgaaacaggcttgaaaa

SEQ ID NO: 14438 - DNA, 3000 bp, Unknown; identical to SEQ ID NO: 14435
  misc_feature (1)..( 3000): cDNA_ID_1026676_gDNA_ID_2684118_Annot_ID_190878 3000 nt of promoter + ATG

SEQ ID NO: 14439 - DNA, 3000 bp, Unknown
  misc_feature (1)..( 3000): cDNA_ID_2730052_gDNA_ID_2684118_Annot_ID_190873 3000 nt of promoter + ATG
aaacagcaacgtaagaaaacttctaagtttcacagagtacggcttggagatggatcaatggctgccttgctggatcttaacaattctactcgcgagtctgaacaagaatctaaggatagtaattccaacagtaaccaaaatcagaccggtggtttaccggttcgtggggtttggcgtaaaggaggtgctaaccttttctcgtaaagaactaattctctctctctctctctatgttattttggcttatgagtaaagtgtgcgattagatgtttactctctcatttttttgtcagagtgatagagagctttttgagcaaaatttaatttgatataatatggtgtttttgctttttctatatttcatctatttctgacttaattaaattagtctttatttggcattaaaaaaggaattagaatcgtaagaaataatctaaacgcaatttttaaaaatattttgtttgaagtaatttatttctttaatgttacaaaagagggttgattgagcaaattttattggtatagtaagttgtgtaaatattgtgtttatcatcagaaaaatttctactatatttttttattttgtttttttttcacagtgttaaatataaaagttttaatacatattagcataataaagtaatggaaaaaaaataaaattacaattaaagttttaatactttttattattaagttttaaaagggaaatacaaatgtgtgattacaaatccaggaaccacaattgaagtttataactgaaaaacaacataagataggtaatacacccaaatttatccatccttagatcccttaaaggtttcttagtaaaaagtaacgaccaaattctccgaacgagcctcgaactctcccaccctatcagctgcagcacgtatcggaagcagttgaatatcatccaatccaattggctgatacagatccaccctctccaacatacgaccataacgaatcagatactcgagaacacgtaactcgtgcgtaccaccataaaagctccacacctccactttcttaagtgttttcttcaaacattcatgactggtattctgcccccaataagcctctggatcgatctgaggcaccatctcttcgatgggccgaggacccaccatctggaatgagagtgtctccagatacggagaactgttaagcatgaatctgattccaacaaactcattaggttcaaaatttgtcttcagaaccaactgtcttgtctccatcggtgctttcagtcgcaccgggtcttcacactcttggatcaattgaaggacatacggacagattgtgaatgtcttagcagacaacatactgtagagaaatccactgattattgctcctgcactcacgttgtaacggctctcttcacggtagtccagatatgcctcctccattaacttgttcgcactcgcgaactcaaagcgatagactttcccaaagtacttgaagatctgaatattgggcacgtccagtgtggtttgctgcgcggagaaggaacaatacttgaaaaccaacttcattaaccggtcgttatatccggttatcgcatcaagaccaatctcccaacagtttttgatgttcaagatctcgagaagaggtgtctttgctatcaaagccgataacatctcgagacggatccagcggaagaacatggttttcaccatacccggtttcgcgagcctcgatggttcaaaccggcaaccgaataacttcaacgtcacgagactggtaatcttgtaaaaactctccggtaatttgatcaaacccggttctaattgtgcagcgtcgttattggtaacccaacgaggttctgagaggtcaagaaaaagatgcttgacattcttggagacagcgaattcgatcagtgtggtgaccccttcttcaaaagcatacgaattagagagacgaagctcgaagctttcaacaactccaccggtaaaattgttaacccaaccaaccatataggcaactaatgcagccctttggtaatagcgagcaacggaatcatcagcgaatgtcacgatctcgtcctctctgaaagagatgtttctcgtttcgcgacatatgtgtctccagcgggtggaaaggcgactggtgctcaaagcctccttgaaggaaaggttcgaaatgatcaggacgagcaggaagtctgaaagcgtcgaaatgatgtccactgcacttcctgagtccattgttaatgattttggagtaaaagtaatggattcaggaagagaataatgtgtgtggcgtgagggaaaacagtgctcttccttgtctttatatatatttttgaaaggttgcgactttttgttcgtttggcggttctcgtttctctaaccgctctttttacagaggttagggtttgtccgttactcattgaagaattgcaacgatacgcattttctaattaattcacaaaagccatatttaattaataatcgaacccgactgggccgataataaatttacttataataggctttatttttacgacccaattaattaggcccactaattattgcggttaaggaacgttgactttaagtcaaattagagagagcacagtccagggactaaagtgggtcccttggatttcttcctctcttcaccgatttcttagatcttcgaaacctctctctctctctctctctctctctctctctctctctctctctctctctctctctctctctcgttcgtttggtttttggatcagtgtaagcttctccattattttcggattcgcttccttcgtagtttgttcgtttgctctgatttgtaatcgtagcttagtttccgtagattctcaaatgataacgcgctttacgagttttgggtgtgactaggggtttctctctgtgttttcttattcctcaatgttatttcgaaattgaatgctacagatacagagattcaatgagctgttttggctgttgccgtgaagatgatttgcctggagctaatgattatggaggtcacaatatg

SEQ ID NO: 14440 - DNA, 3000 bp, Unknown; identical to SEQ ID NO: 14432
  misc_feature (1)..( 3000): cDNA_ID_3017058_gDNA_ID_2684118_Annot_ID_190871 3000 nt of promoter + ATG

SEQ ID NO: 14441 - DNA, 3000 bp, Unknown; identical to SEQ ID NO: 14431
  misc_feature (1)..( 3000): cDNA_ID_2114026_gDNA_ID_2684118_Annot_ID_190868 3000 nt of promoter + ATG

SEQ ID NO: 14442 - DNA, 3000 bp, Unknown; identical to SEQ ID NO: 14430
  misc_feature (1)..( 3000): cDNA_ID_2730073_gDNA_ID_2684118_Annot_ID_190866 3000 nt of promoter + ATG

SEQ ID NO: 14443 - DNA, 3000 bp, Unknown; identical to SEQ ID NO: 14428
  misc_feature (1)..( 3000): cDNA_ID_3017066_gDNA_ID_2684118_Annot_ID_190863 3000 nt of

SEQ ID NO: 14444 - DNA, 3000 bp, Unknown
  misc_feature (1)..( 3000): cDNA_ID_2995974_gDNA_ID_2684118_Annot_ID_190859 3000 nt of promoter + ATG
tcacgcttgttagctatcatcactctctccactttatgttgagtctgcacaatgttgatggtttccatgtcattttttctttgcttacaccaaatagaattcaggaatcaaatgctgtttgctgtaaactcattctcaaactctgaccagaacggtctttatataaactcttgcttcgcgcattgtcagactgaaagacaggacacttggtttgctcaagattctcctcaactaaacggaaaggtaacattactcgtccaaaactgttcatgcggtttctatctcattaaacattaatatagcaatcacaagtttgttaaaactctctgtccataattgtctattatcagagagtcgcagagtctgtaggtgactggtacttcgaccgagcaaaaaatgtcaaagctatcgattgtccttacccttgtgacacaacatgtcacaatctgattttcgagtgagtaaatcgttgaaccccatttctctgattctttcaaacttataagttataccattattgccttaaattccttccatatttatcctaacttccaaatgtgcaacatttgtgtatctcaaatgagaatcatttagtttgtcgattcagatcataatttatatttgcatgaccttgatttttcgattgaaataagctttctttcgatgtttatttttatcgatttttttcatatatattctttgtgcagttttgatcaatcagctatagagatctcagcttcttcaaggttttgttttcctgtcattagagcctctctggtctccctaatgttgataaaattcatcctccaattcttagtttagtaggtatagtgaaaaagccttattctttcatacctcatttttaaataaccatttgattcaaatgtcgaatctagttagtgacaaaatccatgtcattacatagaatagtatatcaaaaagagaacaaaaaaaggaaaaagaacatattcctttattcattggactctaacacaaaacgtccgaatatcaaaaaccgatcatgaactcttcttttgagatgtccctttttttgaaattccaattgttaatcgctttaattttcacctttttctaccaaattgaagcgcacgcgtggtaacatagtgtaggttcgatttagtgcataaagtgttagctataaggaaaaaaattatacttcgattaacaagttcgatagaatttcgcaaaaaaattaatccctctaagaacggctctcactactgactgaaacaatctcatcatccatgaaaacaactactgtttatcgtatttacaaacgcaagaaaaggaactaaatccaactctaaaaactcgtccccataaagcataacttaaaaaaaacatcaaaaacgctaagtctataacttcaacaaaaagaagaaggaaaaaactaaaacagagaagtagatatatgactaagaagcttgacgtgtcgcagaagctaaagctaccgcttgtgcccacactttcaacctcgccttgacctcctttggatcatcacctaatttaataacataaatttattcagagacaaattcaaacataaataaaacataagtaaacatatttgactattactttacttaccaggactggagatacgccaggtggcgatgggtgagtcgccgccgctactagtctgagtatcgaaattcgacccggttgttgacacagatatccgacccggaaccggaacctctaattcgaacccgagatctctacaagctttcacttcttgtaaccccatcctcaacgacctatctccacctcttgctctcgtcaacaccgttaagccttctcttccaccgacgtcacactctccgttaactccctttttcttcttttccctcctttgcctccgtaaactacacttactgccatttttgttactctcattcgcatctaactcgccggaaactgtaagttttcttctccggcgagatggagtcaccggaagagagtaaaacccacgtgtctctttgtcggaatctgactctcgaacgttctcttttccttctccatcatcggaaacttccccatccgcctctgctccgtcgaaattctccagagatgtggaaacacacgaatctggttgattcttcgtggctgcttcgtcgtaagcagagctcgtacatatagacaatctcgacaaagaagaaaccattactaagctctcttcgaacgccatgaaagagaagaagaagtaggaaagtgaagagactgacgtttggagtctccactatatcgttataatggtgaaacttaactgagtcaactcgtgctttaactccctttgatcactttcatttatacccgagtctcgggttttgtgctatttacgtttttagccctctttttgtttgaaaacagcaatttttatttctactttaatccttttttgggggtaaatatctaactcactttgtttgattctatcattactaaaatagcttcggattactactaatcactgcatttatttgaaaaaccttggtcgatttttttactattttcaatagaaacgttacttttttcccctgggtcctactttaacgcggagatagaacgactctggttttttttattacaaaaaaaatccaccggaaagtagatttaattctcattaaattcaatgttaaaacaaggtattcacgtagttagtgacctttttttcgccattgtcttaatacgagattgattattcctacaatttccaaatttgttgtcgctctcaagcattaaaaagtgacacatgttcacccttataacttgtttataaacgccatagcccataatccaatatgggaagctttaactaatcgaccgtttattacatcactaatcgctaacatattaaaccatattttatccattaacgcggaatcggctaagagttgagactgataaaccaattcaggaacttaaaagtattagcccacttaataaatgccacctataatcttgcttcaacgaccaaaa

SEQ ID NO: 14445 - DNA, 3000 bp, Unknown; identical to SEQ ID NO: 14424
  misc_feature (1)..( 3000): cDNA_ID_2730095_gDNA_ID_2684118_Annot_ID_190858 3000 nt of promoter + ATG

SEQ ID NO: 14446 - DNA, 3000 bp, Unknown; identical to SEQ ID NO: 14437
  misc_feature (1)..( 3000): cDNA_ID_1557475_gDNA_ID_2684118_Annot_ID_137179 3000 nt of promoter + ATG

SEQ ID NO: 14447 - DNA, 3000 bp, Unknown
  misc_feature (1)..( 3000): cDNA_ID_2730032_gDNA_ID_2684118_Annot_ID_137180 3000 nt of promoter + ATG
gcattatataaatctctaaataatctcaaagtaaaagcaatcaatcaacctatagatccgatcggccatgttctataaggattgtcagaacttgttgagctattaaaatactccgtacaacttatttgattaatatgggccaaatccgaaaataaatggaccttatcgaatattttgttcgaagtccaggcccactaatcgagtgcgaaaaaacaaaaacaaatgcggtgagcgtggatcgaacacgcgaccttcagatcttcagtctgacgctctcccaactgagctatccccgctacttgttatcgaagctaaaataataaaataaatacaaatatttgtaaaagcgagaatttgtgattttttttggcaataagtagagaatagttgtgttccacgattcctcctctcacgttcgaagaccatttcttgttctttggacgaccatcggcgacagtgttaagtctagagtcttcttcttcttcggcgtagttttttccccggtaagtctccgttcatcgccgaatctgtatccctctttctctttttgtttacttgatcgtctctttcgattatgtatatcgcgatcggagtccgtcatctccagatctgtgtgtatgcgcttaatttcgttatggatgtgacatgatttcttgtgattcgtttccttagggttgatagatctgtatcctgcatgatcgttatagatagtgatctagatttgtcttttttcagatcgaaatttagatctcttattgttaatcatgttgattttattgaaacttgctcatacgaatgagatccgagagcatttggaaacataggattgctttgcgttgtaattgttttctcaagtgatggatattgaatctatgtgattgatgcaaaatgagttccagagaatttataatcctaggattgcatgataacttctttgctttgtgattgttttctaaagtatttattccatatgaatgctgcaattgagtatgcgtttagactgaaggtgttatttgaaaactctgaaacaggcttgaaaaatgggtctatccttcggaaagttgttcagcaagctctttgcaaagaaagagatgcgtatcctcatggtgggtctcgatgcagctggtaagactacgatcttgtacaagctcaagcttggagagatcgtgactacgattccaaccattggtgagtttctaactttgcatactctttctttcatctaattattattcatctctaaacttagtatgtgaaattgacacattgttatgcaatcatctcaagggcttaggttgaatttttcgtatcatggttggattcctagattagattggaacttgaatatatagttgcaagttttttcatttggtttgcatgcggtgtacttctacttgctcaagggcattcatctttgattcatggtttgtgtatgattcatagaatgagtgcttgaattttttagatctgtcgtattgacaatacctgttcttgctaggtttcaatgtggagactgtggaatacaagaacattagctttaccgtgtgggatgtcgggggtcaagacaaggtattgtgattacagtcctttaccagcattcgacaattactatagctaaatccttgattctccatgagctgtcctattttactgaatggcactttcactattccaatataaccttttttgtttgcttgctcatccagattcgtccattgtggaggcactacttccagaacactcagggacttatctttgtggtggacagcaatgatcgtgaccgtgttgtggaagccagagatgagcttcacagaatgttgaacgaagtaaaactcaaacaaaaatctccttctctaatgttacattatgaagcagttggcatcattttgtttcctttttgactgttgcaggatgagttgagagatgctgtgcttctcgtttttgctaacaagcaagatcttccaaatgcgatgaacgccgctgagataaccgataagcttggacttcactctctccgtcaacgacactggtgagccaaagaaaaccaaaccaaatctctttatttaccagatacctatatcgtaacatgaaaagctgatgtaaatcgttggtggggtttgttgaacaggtacatacagagcacatgtgctacctccggagaagggctttatgagggacttgactggctctctaacaacatcgcaaacaaggtatacaactttacaatttttgaaatcgtattagtaagaaattgattgttaaagacttactcaaatgtgtgattaacttgcaggcttaggagaacaacgtgtggtttggtttttaatcgaggagagtcttgtcttcttccttctatcttttgttctttcgtctcaaactcttatcatttcatactctttgttcttcgctctaataatttacaagtttttttttttgttgcttttatcctataattcagactcttataaaatggggcccaatttcggcggatattccaattttttttttttttttgccggcatccaatttctttaggcttctgcatttaccgaatatatttctttgagatggcccaaattcgtgagatgaacttgaaaaatgttggaacagaatccaaacagtattcaaacggtataactaagagaaatcaaaatcaacgtattttgattcctatatgtcatcaagtatactaataaaaaaaaaaactgaatttagaactaatccgcaaatctgattggatgggggcagcaccagtacaaagagctacagttcccgatttaatcataattaaatacgttgtaagaaaaatgaagaagaagttaattaatagtagatctccactacacttttaacaattacatacactcaaaatcttagcggcattttttctaaaggtttcccaaagaaggagagctcactttatctttcgtctctcttcttaggtctagggttctggtggagaagattgtggttgtttcttagggttttctgagagaaagc

SEQ ID NO: 14448 - DNA, 3000 bp, Unknown
  misc_feature (1)..( 3000): cDNA_ID_3017172_gDNA_ID_2684119_Annot_ID_190896 3000 nt of promoter + ATG
attgaacaagtaaatacatacatatatatgagataatttatggttctgccactgcatatcagactcttgccaacttatttggcaccattattaatctaatttgcttttattgactaccatgtttgtggtcaaatatttgactaattttgtttaggaatgaacctattaaatctcttactttgacgggatattttaaggaatgtaatatattgaccaagagattagggtatgcattttaaccggagtgaacataaaccgattcaaatcgaactttcatcaatgtttttccttcaactgaacggtttgatttaattttaaatcgaataaaactgataaaccatttttatttacgtatttctagttaaaatagtattataaatccaaacacgtttgattaatgtaaaataaaatttatttagtttaatttttcctaactctaagagccctaaatctatagggaaaacatacaaaatcacattgaattacttttccttttctaatagtcttactgtaatatttaagtaactagatattaacctccggtataccgcaagtaggcttatattttagttaaactaaaattttttattgtaaagatgatttataaatatatgatattattttatttgattttaaatgtatagtaaactgcgagttgtatatgttttgttgatattatttatattgtttagtgtttaagattatatacttgtattttaatttttaattttagagtttcacctgtagtataccatcttctattataattaatatcgatctaaaccagtcaattctaggattttccagcttgtattaaaaattgaatcacatcatacacataaaaaaatctaatacgttactaattattgtaatatataagattttaaatttttaaaataagatgtatgaaattgaatataaatattcaaattatgacccgttactcagtagaaagttttcttaaatctatttttgactcgttataatatattttcatgtattgaatagtttatatttatttttaaaaattcaaattatggcatatgcaaaacaaactctaattatttttttataacgatgatattatttttttgcaaaaatagaatcatatgaactataataattaataaaaaaataatttgataatttagatatcaaatctaatttgttgattttaattggttagttttttggaaattaataatgtatttcgtttttctaattaaattaaattaattaaaatttagataatttatggttctaccactgcatatcagactcctgccaactttatttggtactattattaatctaatatgctttctattgactaccatgtttgtgatcaaatatttgaccaattttgcttaaaatgaacctattaaatctcttactttgacgggatattttaaggaatgtaatatattgacattagggtatgcattttaaccggagtgaacataaaccgattcaaatcgaaccttcatcaatgtttttccctcaactgaacggtttgattcaattttaaatcgattaaaactgataaaccatttgtatttacgtatttctagttaaaatagtattataaatccaaacacgtttgattatggtaaaataaaatttatttagttcactttttcctaactctaagtgtaacaccccaaatccaatcccttgaatccaccctatttgttttgttaaaacaaatgtccatggatcccattgaagcccaagtgaagcaagtcacaaaataattagggttttgttacatgtgtatgtatatatgcttatatcgtcatcttcccgcatccttctcacgtcatcatctccagcaactcgttactaacttaagaacatcaaatcaacttgatcccaagccaccatcaccattgacgttgagatcggagttgttggagcgtgtggttttgtttttaatcacctacaagtgtggagtgaaagcgaatgtcacggatcatcaccattaaacaacggcttgattgggtaaggaaaacctaatctatttagaaagaattgtctctcctagccattgaatttgtggcagatatatcaagttagcttttgggtttttgtgtgaatatgtgaatgaaggaagcagttcaaatggtaaaattggtgatccgtttcccgtcacgtctgaaggagtttgggcgatttcttaacggttctgaatagatctcgttcccaagttttcagaacagttttccgatccaaaatcagaggtaagatcaatcgggaaatcgcgtttaaagttggtcaatagtcacaattttcagagcgcagttttttctaaagtatctaagaaacattgtagtttcacgtagaggttttcaggatcaatttcccgttgaatcagagagaatcaagcgtggcgtgaggtgtcattgcaataatcataatgtcaagaatccatagccgctgaaagagatagaatcgagattatattcaagaagttatgagtgtttccttctgggcaagtaactgcagaatgtatccacatctgtgctaagtataaatccagaacagtgtgtaactactggttttgcgatgtgttttcccgatggaccaaaaggaattagatcacgatcaagatgtctatggaaagatcttgcttcaaggaacttagagtagctgacatcttgtccatcggatttaagctccatccgtatttgactttgaaaggttgcccagaatcatctcaagttgcagaaacctagatatcagttctgatgcaacgtgggagattcatgtgagatctgatcgagatgaaacttcgtggacttattcatgatactactggctacatattaaacggtgggatcacgtttctaacggttagttctcgacttatgagtatgttactgagacagttttgtatgaagtaaaccatgacaagtttttattgtttgaatgggaaacgggttcggttggagctgaagctttgcagaagcctttaggactcatggagtaaggtttttgttg

SEQ ID NO: 14449 - DNA, 3000 bp, Unknown
  misc_feature (1)..( 3000): cDNA_ID_3017159_gDNA_ID_2684119_Annot_ID_190900 3000 nt of promoter + ATG
ttaaaaactatatattataaataaatcgccactttatagttttaattaataactaaattacactttctagtcccttttcatgtggcgtatatagacttttctagtctatctaaaaatacactacactatcgtgcacatcaatcaataaaaacatatattccaataacaaatctggaaaaattcatttcaattatataagttaaggttactgaaaactgccaaaaattcagaagaaattacggaaactaaatctcgttactataattacgatgtaattaccgttaaaaaggcaataaatctagtactagtgattaattaacggtgccattaaattcagttatgtgtgttttaagtgttaactacgagacaattcgccagctggcgagtcccacttccctgatttcatcaggcttttatatttattcactgcttcatagtaataattacttcccaaaagatttttttttgaattagaaactgaatatttaaaaaaataaataacttaacggaaactgttacctgacggcggattcatggaaacgtttatgagtctgtttttgacggagaacgtgaaggtcaccgccgggacaaaactccgttaataaacagagccatttcggagaatcaatggcggcgtaaagcgtcggaagaaacggatgatcaagagattcgagaatctctctctccgtcttagctctaccttctttgcttctgctcgcgagctcctttttatccataactttcgctgctaacagaggtaatttaacggcggtggtttctgttacggcggttagggatttgaattcggctaagaaaacagagccgatgtcgccggaaccgagacggagacggaatctgagatcggagagtgagagagatgatcggagtgaaggagggagtttcgaagatgagaatgaaccgtgagctgatggtgctggtgttaaagctgcggcggaggaggaagagcgagaaccggagcttgtgcttcgattcacggtggttccggctgatgtaaagcttacactctgtaagtcgtcggttaattcgtcaatccatggctccattttccgatctactgagagtgacgacgagagagagaagaagaagaagaagaagagagggagagaaagagagaagtaactgtgagattttgcctttttggggaagagaaaaaatagaatcaaaagaagatggcaaagttgtaatttaagggttgagatatggtgcgtttcgtaatttaaggtaatagttcgattgttaaggagatgatgatacagtattctataattgagatgttttatttatgtaaatagacaataattagggaattatttgagagggatttttgatttctctatgaatttttaagatctttggtataggatttgtttcaaaagagagaaacaaagagacatataaatctaggcccctacagaattaagataatgacatatacatatcttgtgtttgttctatttcagttgtgattactagtattttcttcgtatggtacaattataaataaatatctaatcactgtcttttgaatattatgtcaccaagtacaaggatggtgttattggtgaacaatttgtatcgtgaactcaaatccctattgcacgaacctcaggttagtggtcgactggtcgctcggcctcgttttcatttcctttgaaaccattatggtttagatattggtttaactcaattgcatatacctaaccggtttgactcgggtgaatatgttagataaggaaagtgtatataacccttgtattttctcattaatgaaatcagcagaaacattttaggttggataaggaaagtgtctataaccatatcattgaaagacaaattgcttgggtcgaaaccggttttgttaagtccggccctggatatattaccaatttgtaacactcgtcttaaaccggatattttctagtcagaccgaaaaaatacaagtgaaagaggttcaaataaattgataacttagaacattcataacaatgaccaaaacaaatcttttcaatgaggtttgtaaattgtaactatatatccgaattaaaaaataatcgtcataagtactaactgtttttcggagaatgaaatgggctatctgttgaaaaccttaggcctgagtttaaagaccatctgtacaattgggccaataagtaacgcattatccatcaacaaagtactgaaacatgagacacttagaccatctccatcgggggtttcttgtaagaatttctcacaattaaaaaaaaaaaataataaaaatgaaggaaaaagagtgtagaaagtttctcacttgagaaactctgagatactctttacaacccatcatgataattctcttctcattattggttcaactttttaacaaaaatatttttttaatcaaaaaatcaaattataatataatattaattttttgtttgtttgagaaactttgtgggtttctcatggataaaaaggcccttaacttgtcatagaagttacaacacaacatgaaagttaaacatcgccggccaaaacaaaaatatttctgtgaatttacacaaaattatttgcattaccgaccataatgttctcctcagtaccttcaacacaatacaacaatacattaacaaaattggtcttctagcattagcctcgtctctaaaatctaacatcttcttctactcctaatccaacaattgtttatgtatattcccaattatacccctctattactttgcttattacggaaaaggagttcaaagagcagaagaagaaaactcgtatatcccaaatctccaacttttcaggggaatgatgatgtactgtcccaacctcacggcttctctaacaatcccttcatatttaccattttgccactacactagacaatttcgtccttctcatttccgatcatctgataaaaacccgaatctcgtttctatcatccgagcaaaacccagaatttctcattcgcttaggtgctttgtatcatcttca

SEQ ID NO: 14450 - DNA, 3000 bp, Unknown
  misc_feature (1)..( 3000): cDNA_ID_3017119_gDNA_ID_2684119_Annot_ID_190912 3000 nt of promoter + ATG
atggattttaacggctaaaggagtgacctactacttttggagaatcaggttcctttctttcttcttcaaactatttatgacaaatcgaagattgggacgtcaagagggctagttgagataacaattagtttcttcgagggttctatttccatagatataccatattgtttagaagaccatcaattagaggcaaaacatcttcttgatctgattcgaataattaccatgcctcttattcctaaaaaagaaaaacaagaactgggtcttcctcgctaccttcgtcgcggccgcccttttctaaaactgatcccctcagcaacaaatcttcggtttagggggataaagttcgaactgaggaacaatgcaaaaacgctattggatataagacacaaaagaaatcttcttgagattccaccaatgatctttgatgaatttctcatcttgttcttctttaattgtgttgcctttgaagatttttatgcttattgtaccaagcacataacaagctacgtttttttcatgggatgtcttctcgaaaacgaggacgatgcgagattgctttgccgcaaaggaattataacaaactgtatcggatcagtgaatgagatctctcaattctataaggtcatcggtacagatagccacttttatctcaacgcgagttacttagctgatgttttcgaaggagttaatgaatatagttcacgaggatggcatgcatattggtcggtattcaagaatacccagcttacttacgatactcctcgcacatgtctttcatgttgcactggtttgacgattctccttctcacgacattacaagccgtctttgcagtgtatgcctattatcgtcctccgaagtgactggtgaggtctatacagagtagagatccaataaattcattcttggtaatatgtagtttcttgtttcgttatttcctcgtagttagtagactcgcatctttttacatatttttaaagataattgttttgtctttgcttctttttttttatttttttttattttaagtcgtttcttgtctctcgatattccctctatattattatcggacttgggaaagcaccaattgtaacaccccgattcctaaaatttaccaagagcgagacaaacttgcataactactcaaaaatctcatcttgacctggagaacaaaagaaaagaaaagatgaagggtgagtagcgaatttctcattaatttccaagtattgtgtgctacgatgataagatgcatgatagttatgtctcatgcctatagaagcatttcatgtacaaatatgcagagaaagtaaccattatgtttcgacaaatcccatccttatctcaattggctagaaatggcaatacaatacttgctattggttataatacatgtatcactttttttaaaggaaaatcatacatattaagaaaacatattaaaagttgattagaaatgtattattttttgtgatttataattttctatatttctaaatctctatatatacatttttgcagccattttgtgaaataaatcctgtagttgagacttatttacaatgacagaatatttgacaatcttcccaaaatctctccacattaaccacacgattggttactacagtaaaacctctataaattaataatgttgggaccataaatttctattaatttatagaggtattaatttatcaataaattaataattattaatttatagagagtttagactaattttgtaatttttaaaaaatattatgtttaaaataatttgtttttatttataatcattatttttctagaagtaattgcaaataagactaaattatcgtgtctataaaataacaaaaaagtgttttcgatgtagtaaaattattaaaattgaacattactaagaattagtataataaaaataaaaataatagcagattcatatattactaatatttctaacatataacttatatatatatatattttaagaagtttttacaactattaatttatgttattaatgggacaatatatttacatagggattttaaaataattattatcttattaatttatcgatttgtgtcattttttacactggtcccaactcaggaccgcatttttttattagtttatagaggttattaatttatcgagtattaatttatagaggttatactgtaaaataaaactttcaaaatatttaatatcatttaactactacaaaattatcatttttatattgtttttctacataactataacaattatattataatcatcaaaccgcagagatatttgatagcatttaattactacaaaattacaaaatatttagacaatgattcataaatatatcataaataagatcgataagttttttttacggaacgagttggcgggacgggtttgacaggacgttacttaataacaattgtaaactataaaacaaaaatattttataaatagatagatagaatttgcaaaattttataaatactaactttaaaaaataaattgtccctgcggtataccgcgggttaaaatctagtttagtagtatattataatacctaaatttttatttttttattttcatatgttgcttttttcaaaagtttattttctcttcttgtcacatatattgtgtttttctcctttttatgaatatcttagtatagaaaatgttatatttttaaaatgttaattataatgtgatggctaaaagttttaattagtgagatggtcgttaaaatctatcgtagtttataagataaaatctttattcaaattaaacactaaacaaaaaaattcaagaggacgaactattttacatgcacaagcctaatgttgtaaaacggctcttgggcccaggcccaggaccagaccagcctatatttttgtccctagttcttcttcttcctcgacggttagctttttttaagggttcaggttctctagcgatctgtcaactttttccgattgcaatctctggttatgttaatg

SEQ ID NO: 14451 - DNA, 3000 bp, Unknown
  misc_feature (1)..( 3000): cDNA_ID_3017103_gDNA_ID_2684119_Annot_ID_190917 3000 nt of promoter + ATG
ctacaactataccaccattgtcttcatcattgtttcctctctttgcttcttcacgagggttcattatattattctctaaatcttttgttgaggaagacgactaaatttggtttgagcaaatttggaattccggcgtgtaccgtagcatgaaaagaataaggcaatctaaaatataaaactaaatattaatattacagtaaaaacctctataaatttaatattgacatcaatgtattatagtgtacatgaaataagatctcatcaactaagatgaatattaacggtttagataagacattgacctttaaaattagtaacgaaagaccactgactaatgatgaaactaattaatagtcattataaaataataagtgcttctcgtttccctgatcgaagttccgcattgaatagtttaatagcacaaattggtatttctttatattttcttgacaatatcaaccgttagatattaacgttaacttcagagaaatcttgtcttcttattctaacgttaacttttattttaccaaatatctttttacagtattctcaatcaagatcaactgataaaaataaattactcacttttgacttaaatgcagaaaatatattaaggttttgaatggtgacagtgatttagatagtgtgggacaaatagttataacaacaatgtgatgcgataaaaaaaacgtatgcagaacaaatactgttaatatagaagaagcagtgtaaaacatttagtgtaggtttttattgtaaacacttaaactttataaaatgtggttcttactttgtgataaaagtctgactagttgtaaaaattgtgactgtttgaattcctctaattcatttgtctgcaattctaataatttattataactgtgaagaaaaaaagagaaccattaatacatcatgcatccaatttcctagatagataaatttattttactagttgatataaaatatgcatttgctggtaattagactatttttgtagtaatttttttttaaaaaacttgtctatatatatatatatcagatttttggcgcttatataagagattaaacaacaattttaattaagatgaatactaacggtttaaataagactattgacgttttcttaaaaaataaaataaaacaaaaaccattgacgttggaatatagattgttagaattcaattttacatatgtggctccggccaactttccggcgacttttccggtgatgtatgtcaccggaatcacccgattatggagtctttgaatttcttgtaatgagttttgaccagaagaataaagaccactgcataatatactactccataaaattaccctcagatccagctagtaaaaattatttttcgttatcaaggatgtgacaaagcttgcttaatcaagacccattttacatgacatataaacatgtttcagtggacggacctgaatcttgaggttgcgattgtaaaactaatatttagggttggtgtttttagagttgcaatccttagaacaacaaaatataagaaataagctgcgataatatttagaaacataaattgattggagaaaatgttgtacttaaaagttaaaacgttaaaaaaaactacagcttgtaaagtctaaataaactaatcatccccttaatcttgttatagttatggatttgtttaaacgaatttgtccactttgattataacactaagcttgggctaaaaaaccggattcgatacccaaactaataatcagacaaaaaaaactggattagagcgggttaagattttaggaattttattgggtagaattttaataaactcatgggtatctggtcgatccggagtttacccgttattcaaataggctacatgaaaaccaatcatataatttaatatcccaaatattaattatatttaatcttagtataataaaaattatctaaaattataatcataaatctacatatgtcaattaattttagacctaaatatccaaaacaactaaattattccaaaattatttgttatatttatcaaaatttaataaaatatattcaaatgtaactaaatttatttaaaattaacaaattttgtaagagtttatttgggaacccgatatttacatacaaaatacccgtttttattttttgagtatttatagggtttgaaactttttatccaaactgacttgagcccgattgaacccgatccgaaccggaaccgtatatttagatctactctagtggtaggatattagatacccattaaatccgaactcgaactgttttatttgattctgcaaaaaaaattattactggttgaattaactttaaataataaatagttttaatataatatataatttatgtcgtttattaatctgtgtgtaaatatcataaacatcatctatattaagtactatatatctaaacacgaaaatcagattatttttttgtttgctaaacttattagcagagtgaactagcattaccagaacttataccagatattatagagaataaatagcatctcatccaaaccacatgtaacaagaaaaaatatcgctggcttctcaactaatatagagaaaactaagacgttcaataggttaaccttagatccgattaccaataaattaataaaattaccactcgtcaattttaaattgatcttgtttcttgtaccattgacattgagaacgtacttcattaaacttatgttttatataaacaaagaccagagattaaataaatgaacaaaaactgtcacatgcacgtcaataacatgtatagttctactctaatgtgtatcgtatacgtagtgggtagtaattaaaccagattgtaagacttaattaattaatgaatgaagaagtgtcaagtcgttgagatcaacatcatacatccataatccattacttctacagttgtattacttatatatataaacaaaaattcacgttagcctaaacacaccaaattaacgaactacctcacacaactca

SEQ ID NO: 14452 - DNA, 3000 bp, Unknown
  misc_feature (1)..( 3000): cDNA_ID_3017099_gDNA_ID_2684119_Annot_ID_190918 3000 nt of promoter + ATG
agcattagtggcattttttgcgagagaggtatctccaaaatactcacgaggtatataaatagacactaatacttttgcatattatttattcttgttttgccgacgatgcatgacacatatatactatgttcattgagttgtgtaattctgaaaaaataatatcgcaacttatagattttattgtgtttttctttctgatttgcgtaaatgagtagagacgatacctcctctccctcccatgcccatgtccatcatgcccactccaagcgcgcccatgtcctcggaaacgctggtgaacaaattgatttatggcaaaaaaattaaaataaaacagataacatccaaagtgtgctttcttgtatttgctgtcttatgtgtctgttatggagtttagaaagggacattgtttacgactgagatgtatacgtccatcgtttttacgtatgaactattcgtaaacaatattttctttgttttgatctattcatgtaagactttgccaatattagaactctttatggaacacaatgttacatatctacacgaaactgaatacccagtttttttaagaaatacaattcagacagacacagtgaataaaactaagtaaatgatgtaatagctaggcgatgactggtcattgagagcttaccgcactaaactattgtttatataaacaaagaccagtaaaaaaacattcatgtgcatgcacgtcaataacatgtgtctacttctaatttactgtgaagcgtattgatgattaaatgaatgtaggaaaatatcaatcgatatgcatagaagatgtgaaaattagatttttactattaataattcaatattagatatgtatgaaagaaaaaaaaattaaagtcataactgtcattcttactttgttaatttaccaaatatgtcatgtatcaactattttatagtttcactatatatcaaatatcttaccatatttatgtaaatattatttagatatttaatatgttagcacgatatattcagtataacatgttattataattttaaattgatgatttcatattaatttgtatgatatggtaaatggtttaatatgatatatataaatttatcgtgatactatactagttaacatgttaatcaaatagttatctgtatttagcgcgatattatatacttgttaacattttaatcaaatagttatctacataaatcataaatgttttatgcaatccaatgataaatagtgttgtaaattttggatgaatagtgtcgtcaggtgtaagatgaacaatatcatgcttacagtatccggtaataaataatgttgtgagacaatggcatattaggtaaattaaatagaatataaaagatatttatgcctttaattttattctctttcatacttacttaatattaaactatttataataaataactaatttttaagttttccatacatatacattaatataacccttaaatgtaaagtctcgcgttgagattaaacatatcatacatccatcacccattacttctagagaaatatcaatggatatgcatagaagattcaaaaattaagaatctatgcatgatttttttttatttagttctctttcatctgactcaatttaataacaaaatatcctttgttacatatccacgcgcgataacaacaaaattatcagataaaagtttaggaataatatgctcattaatttatctttttaggtttaattttggtgtcattcttttttctcatcactagattacatgatcttttatctcttatttgttttctggtaacaaaacatcatatttgatgtaaatctgattttcaaagctttgaaatcgacatatttacttaacaaaaattttatgctaacaaaacaaaactgtgagatattttgctaaatgaaacattagtacgttacaattatttttaccgtacttttatgtcataatgaatgaaagaaaaagaaatattgaaaagtttatatgatatattgtataacttagcatattaaaaataaatctaacacattactaattgtatacctctttaacattttttttatcgcgatatcatatgttttaacatgatatatttctttacttacatgtatatatattattatcacgttaacttaatagataatcatcaatttataatatgttattcctcaagtatttgatgataagaatatcgataactattttattacattgctaaataatttgatatatgtgatgagggcattttcgtccaacttacataaatatagagagagaactaataatacaaaaaacaatgatatattcttaatttttgatttatctgggcatatagattaatatagcccttacttctataaacaacaattcacattagcctttgacgcaccaaattaatggactaacactcggtagtcacaactcgatgatattagacatagaaactactttgagtgttaataagagaggcaatatagccacgaaaatgttgaagaagttgagaagaacctaattatctcttaaagatccctaccattggacatgataattttaaaagcttcaatgaagatcattaactttagaattttcaaaatttaaaattagaaaattggtaagagcccctcatgacctcttaccattgcggattgtgatacgttcatgagaagttggcacgtgtgagaactaaagtgagagattggagtcacgtgtgaagaagcttataaatagtaagagagagtagagagaaaaggatcctgcgtgatcattgatgtgtaaagaggattagagctttatgtgctctgttcttgggagataagattgaagaactgtaactccaagcttatcgatttagggtttgtttcattgtaattgggattttaaggataagaaagagagattcatagtttcattcttatcaaatggtgcgttagtgtgctcggatcgaatcgaacgcaagaagattagggtttcaaaagttggggatttttgtcaatcgca

SEQ ID NO: 14453 - DNA, 3000 bp, Unknown
  misc_feature (1)..( 3000): cDNA_ID_3017111_gDNA_ID_2684119_Annot_ID_190914 3000 nt of promoter + ATG
gagagattttcctaatttggtaacttttaaaaaatttctataagatttctttcattagaaaatatatttctagaatcagttacaagtaaaacataataataatgtctagaaaacaacaccaaaagttttgatacgataaaatatgaaacctatagtcaaacaaagaacaaatatgaatttaagcaaaagtatattataaatatattttaaagaaattttttacttataatatatatatatatatatatatatatatatatttgatacatttatacaattattaatttatgatattgatgggaccatatatttacatagaactttcaaaaaaattattatcttattaatttatcgatttgtgtcactttttatattggtcccaattcgggaccgaaaaaatttattaatttatagaggttattaatttatagagtattaatttatagaggttatactgtagtttttttaaaccacacaatttaaagttttccaaaattttaaattttacaattgaataaaacaaaattaaatatcatttaactcattcctttgcaaaatagtagatgaagggttgaacaatttttctttataatttgggaaaaattacatcatttgccatatttttcaaaatccttatgcaatctgctatatttttcagggtcttacaactcatgccacatttggttggaaaatgtccattttgtcctcatcatttcttctctattttatctctctttcctcgatatccgtgcattttgaccatacaccattatctttccgaagacaaaacgaaacgttttagtctctctatcactttccctgacaacctgcacagattctctacatgtaactttcaattaaatttgtctcccaattttattcatcataaattctctgttgtatctagatcttgtccccgattttatcatctttcaaaattatcatataagatggcaaaaatagatggcaaaaaatagatggtttcagtttcagcatctctgtgaagacaataacgctcaactaatctgtggaccaaaatagatggcgaaaatctaaataaaattctaaattctaaaatgagaacaattgcatataagatgtaggattcataataatagagaaacatgatgaaatcgaggacaaaacgtagatgcaacagagaatttctattcggagacaagatctggagactaaaacaaaagtcttcctccaattgttctcctctaacaggtaatcatgtcccctaatgcattatatattacgttgtcccccaatattaggtaatcatgtctcctaatatattatatattacgttgtcctccgcagaattttggataaccaatttgcttaaataagtcatttttaaatactcaataacaaccgtagaagccacctgttctccaatattctgttccctaatcctttatgcttccatcatgatttttcgtcatgtatcatcacatcagccaaaagttgttatgtcaccatcttcgtcagagcgctgacccaccttaaaggtaattttgtccacgaaattccacgtataattaaatgtggtagattttgtaaggcaactgaaaatatgacatggattataatttttgagtggaatatggcaaattttgcaagattccctataatttattcatttttttcagtttttttggttaaatagttaaaaattgagatgaatagtcatttaacattttcaaccttttattttacagtcacatccaacatctaccgccaaaaatctattgccaaaactataaagcgacaactggaaccaattagcgcagcattttttctttttctttcttttctgaatttatttttaattttcaagtaaaaagaaccacatgtgaatcgaaaagtatccaatataaaaaaaaatcttgacacccggttaaccctagatagatccacaggctaattaatgactaggatactaatttagtaaataaataaatttaccacttgttacttttttaaattgatcttatacagttgaggacgcacctcatgaatgacatgaaacaaagacttgagattataaaaatgtaacctccacgtcaatgtgtgatgtgaaccttacccccaaaaaaaaaaatatatgtgtgctgtgaagcgtagtcgttattaaataagagtatgaagtctttaattaatgaactaaaatgtgaagtgtcggagcacatcatacatgatacatccataagccatgacttctaacgttctatatatatacaacaaacaactcacgttagctaagaaataccaaattaacgaacaaattcacaactcaatggatctatacttaataaccactttgagtgcgagcgtagcaacctttctttttcttcccatactatggataagagtgcagaaatcgaaacggatccacccggaatataaacaaggtttgatctttaatgatatatgtagttctcaacatactaattaaacgtataatataccattcaaactactattcaattactttataaatatctcttctgattttctgagaatttttgttggttttgaatttctctcaagaaagtttctctattctacgtagtagctatggaaacttgcttcggttttgttttttttaactttttaaaaaatttccagttttcaatctcgtaaatgaaatttacatatatattcaagtgaaagaaaactttaaggaccatttttagctaagaggttttcaaattaactttataatttaaagcactttgatacgtacgtttctattctactagaatctgatcctttcagtcgagcggatcatccaatagaaattatttttaaaaaaaagaacaaaaacaattaacatacaagaacataaaaaatagttaaataacctcttttatgaaaaatgcgagtttatgaaaaaaaaaaaaaaaagataaagaagaaagtaaacaaaaagtatataaacaaagaagaagaaaataatactacgtgcatgcttcaccgtaatcgaaagag

SEQ ID NO: 14454 - DNA, 3000 bp, Unknown
  misc_feature (1)..( 3000): cDNA_ID_3017133_gDNA_ID_2684119_Annot_ID_190908 3000 nt of promoter + ATG
aaaaaagaaaccctacctcgtcgcagcccccaataaatacctcagcagaaggaaaacaactcttttcagttccattgcttatcattttctctgtttctttattcatttgtgttttcgttttacattctttctaatgttttttatttaacatcgagtcttatgttgctcgatatatatatatccatctgattgcaaatgatgagttaaatcaccattgataaaagaagctcaattgagcagtgttggaaatctaaaacttccatgactctgatgcaaattttgatcaagaaaaatcatatccttgatcttttttttctgttctttctcagattttgttaataatcactgaattttgcttttcaaatgtatttttctgtttaatcttaataattctctgcgtatttctcactagcgtttttaaatctattttttctattaatctttagtgttttttactaacaaggctgcctaaaaataaaattgaatttgatcaagtgcaaattgtactgtacaatatgtaacgaatttgatcactatataagtcacaatgatgagaaagtgaaccaaaaagcttcattcatatacaccaagacgaaaacatgaagaagatggaatcaatcagaagcggttttggtgccccaatagccgttaaaatgttgatattattacaaatctcataactaaacaaaaaaattaaccaacaatttctaagaatcgatgttttacgacgcatcgttatcgttgtctccatcgaaatattcatcatccctttggatctgcttatcccgtgaacgctctgaaacattccatatataacattagtcactaagaaaacaaagggactaaagtagagccttgaaggtggttatcgatacttacgatccacacgtacatccgggttttgttcgtcttcatcaaaatccggtatgtagaaatccggtggaacctaagaaattcaagtaaaaaaactgatcagtgtaagattgataaaagcatcaatgtgtcctatgatgatctgagtttacctcctgcatctgtacgcttggagcgtgttgaatgtatcgcaaattctccaaaatctgcactttgatcgaactgatgtacgatttggtattaagattctcctgttttcatttcaaacacacaaaatgattctcaatctctctttagattttgttaaagcaatgaggaactataagttacataagagctccttacaatgtgaccacccggtatcttcaaagaaaaatccggcgcaaaatactttatgtagtcgttttcaggaatctctgcagaaacaattaacccctgagccccaaaacattaaactttctctgacaaaatattgaaacaaacttttactaaccattaggaagttctgtatccaaaagaatgccagtctcaacggtccaacaacgagctacattctcctttgtgtatcctccacctcctgtaacctaaacaacaatcggaaaaaaactgacttattcgtagagaaattaaacacattcagcatgtcctgtgaaaagcatagagaaagccatttcaaaacccaattcgcaaagaaattagcaaacgggagattgaaagagagaaagagattttgattacaagaagaaaaagcaccatcaatagagagattaaagcatcctagtcgataatatgagtttgaatgtttgtagaggatatattaaaggcttataatgtgtggaaagccagatgcagataagaaggtaccgttagtgtttttttggtttttgctggactttggaactctttttaggagatttttcagagcattttcattgaatttttaggtctagctaatgtgagtatgaatgtttgatgtttgcagaggatatattgaaggcttataatgtgtggaaagcgagagggaatttcccgcccgatgcagataagaaggtaccgttgttgtttgttgttgtttgctggactttggaactctttttagaacactttcattgagttttcaggttaagcttatgtgttcgtattgcaagaaacacaatgcaagtttgttcctgatccatatgatggtggagctcaaggttttgagaaggtaattaccattagagactaagccagttgtggattagtaactttttggtttaggcagatgctacctataaaatttcagctatgttgtcttttcaaaatggttgatttggtttataagactttactatggcattagcataccattgttgtcactcccaaattgccttccgttcgagaattttgcaagggggaatgcttatatttcctgtttgatctattttgttaggacaaaagtcacttggaaagttgaatcttgatctgttacttgtctagttgtttctttcataggtactggacttgctagaagatgcttgtgagtctttgctggacagtattataacagaaaaatgatgtgaagcttgaaacttgctgatataaatcttgttaaactgaactctttacacgattgaatgatatgaactctttacaagattgaatgatattaactcttttgttttatcattattattattaggagagaaatagaaagaaaaaaatatatattgtgtggacgtaactttgtttgagacagtgaatggtggagcatagggacagtaattttgtcgtttgcaatattttccacaaaatctcactatattttccaggaaacatccatggagtttagagtcgtcaacgatctatatcttcagtcacacaaatcgtttcaactacaaaaattacactaaacccgtgtgattcttcaactctctagagatttctcatcctttcatgtatcggtgagattttccaactatttttaagttttgcttaaggttttatcactgtggaatcgaattgattggactggctcttgatgattatgctgatattgatgctttgattagtgttttgagctcatttcttgattatgtgttcttgattttatattaatttcttgattcatcgataatcaaagttctc

SEQ ID NO: 14455 - DNA, 3000 bp, Unknown
  misc_feature (1)..( 3000): cDNA_ID_1388438_gDNA_ID_2684120_Annot_ID_190920 3000 nt of promoter + ATG
ttggtagcggctaatgcaatatgaaatgaaaataaacatgagaaagatgatatagaataagtttgtactagaaaatattaccggtatggtaaagcaattatatagttacatggaatgatatttgcagtaaattgttcaaatatatgggtgtgtataaagtggctatacatggaatgatatttgcagtaaattgttcaattatgttgatcatttgcttaatgttttcatggtaaaagatgcgattagtggctgtccaatacataaacaatgtttgctacaagcttcaaccctatcctctcttgcggttatctcagaacctgaagatgaaggtgataatacccctatgactaaatatttccctgtcttttttttctattttcgtattgttggtaaacttgaaatgtcataagtcaagtttgtatatttcaggagttggatgttgaatctttatgccatgagtgtggtcttgagacatgtactgatcctgatgggttcactgttttacccgtgaagcagtcaacctttcgtagtccagaggacaagttcaaagtttatgatttgattggaattgaacggattaagatgtcgatttgaacctcttgcatgttgtaatgcttcatactctcttatgataagaagaaattgaatttctaaaacacctaagttatataatcttatatcaatcagatagtatccatatatatatgtaaactacagaacttgaatgggttcaactggttatgacattttggtgactaaaccatttcttagaaaatatccgaccggatacggttaaaggattgattgtttacttttttttttttttcacaaagctaattttattatcagcacaaaccatatcagatacataaacccgagtgaattacgggacgacaaagccggcaggatataatcctccggtacacaagccggcgaggaatgaaaccccgacactaagccccgacatggggaaacgacgtagaaagacaaaataaaacatgattgatgattttacacataaacatagttctctctttaaccaaataaaccaagatcgaaaattaactggcatcggagatttcgtcggagattgagacacccactttaagaaaatttgatcttcttgccttacttgataattaaaaatcttcagaagaaaaaccttgggatactttggatggcagacggtggaaactcagctaaacatgcagagaccgtcgagaacgccgtggccggagatatcgactatgcgacttgaaccggtagaaagaacccaaaatctgggcggatttcgccctagatccgtattgttgaagctgtgtgaggaaacccaaaattaggtcacccaacccgaatcaccacaacaccgacagtgagtggcatagagcgatcgtgattaggccagggagtatttagtcagagaagaaaaccacgctaatttgcaaaatcaccaatcgaaactatagatctaataagagaaattgaggaggaaacgaaatcgaaaccaacccagaaatctccttaaccacaacttaaagagacataactgaacataaaccaaaaagccaaaccgacgtcatgaccgtggtggctcacaacgccggcggaattgaagcggtgcttttgtttttaagagagaaggaagaggatatattttttttttttttttttttttttttgaatattaaaaattgtttacttatgttagctgattaatattagtagtatcaaaaaccgtctgttacaattttccgataaggccgtccaattggttcaattggcttcagcccgacatccaccggcttagtatgcggcgatggtcggctttcgtccagtaaatccggctcccattagcggttttggctggcttggtattttcatctgccgtgaatcgctgccgtgaatcggttttatgccgatttcttttagtcctctttagtttatcttttaaaaatctctctgatctatgtttggtggtgccaacctaacaatttctcgttcaacggtggtctccaactagctccttgagttttgttttgttttatgtttccggtggtttccagtgaggttatgcggatatctaatccgaccagatcgggtggatttgctgctttttctcttggatgttctcaaactggttcttcagatctttggttacaacaaatcttcatcggtaattatgttcaatgtaatgaaagaagacttgtttccagcatattaagattgcctgtagctgtttcaacattctccggtgacaagcaacaacaaaaaacgatgcttaaactttttccggcgtcgattgtgtttacaatagtcggagtaattaacggcgaaggatgacggaaagtttccaagcttttcttgcaacacgtttcatctacgtatctttgtgtttgacacgtgtattgagcaaaattttatctttaagtgatgtagccatttgggccattaatgggttgtaaccattgtgatgtggattttaataaaactaaaccttcagtgaaaaaaaaaaaaaagctgattaatattaaaaatccaaccagtttataatccagaacaacggttttcttaaattgactagtgacccaaattcttaaataggctacaaaaaccgcaggcccatttagtaatatctatttttcgtttgactgagagaaaacaaaacaccatccaattccaacgcacaaaaaaaaaaaaaaaaaaacttatcggaaacagaaaaaagaagagagagagctatcaatcgatcattgattgattgcagagaagcagcgaaagagacatttccaaatctaatctcaatccaatccaattcaggttttttccatctctctctgttgagctacttctgaattagcttcttctatgttcgatttccagctgttgatagtttagctagagaatcaatttcgaatttcatcttgaggaagcaattttagtaatttaggttttgaattttccttttgaggtgttgtagggttgttgctaccttcacgaatg

SEQ ID NO: 14456 - DNA, 3000 bp, Unknown
  misc_feature (1)..( 3000): cDNA_ID_3017265_gDNA_ID_2684120_Annot_ID_190922 3000 nt of promoter + ATG
ttggatgacttgataattaaccaaagattttagtgaacactaacccacaaaatttctgaatgttttgaaagatatacactttcaataagtgaaaaaggaacaaccccgaattagtatctttgcgcaaacatgagagaagaaaaagagtggaacatagaatgggtgagagagtgacaagtgtaaaccccacttccattaggttcattcccatctttgccaaatggattttgcggtttggcttgacatcaacgctaacagccagactcactccaccatacacctaaaaagagaaaaaaagcatacaaaaaggcttttatagctaaatgaataaaagcatttgcatcagaagatttttgaaatcattattgtgaaaaaataaaatcaaaagtaaaaccttttttcaagttgacaaataaaagaaaagaaaccctatttttcaatggtaacccactttctcacatttttctctttattctcctctatagtatgtgtgtgtgacgggttgctccactaacttttgtgaaggtaagtataaagccggtgcaattatgcgtttctctgtttgtatttgtaatctttatacaaaccataaattggaacaaagactaaaatgacagtaacaatataagtgaaaaacataatttcattagctttaagtcacgaggcacgaccattgaacatgcgagaaacgcgtgtacccaaactcattggttagttttgagagcagcagcgtattcttacacagttctcatatgtttaactccattcactctctcaaaaggttcccatctttatcaaaagacttgctaaaatcttctctttctttctcctttcatcacactcttgagtccttgtctctgtttttagtcacctgaagaaaaaatatatggagaacggagaatctaaccaagaaaatctcaaatctctcaaccacgacgaatcgcttaagaagccatctgcttcctccgtcgttgtagataggttaaaacgtgatgaatggagcgaaggagctgtttcgactttactcgaagcttatgagtcaaaatgggttctcagaaacagagccaagcttaagggacaagactgggaagacgtggctaaacacgtgtcctcacgcgccactcacaccaagtcaccaaagactcagactcagtgcaagaacaagatcgagtccatgaagaaacggtaccgttctgagtccgctactgctgatggctcctcttggcctctttatcctcgtcttgatcatctcctacgtggaactcagcctcagcctcagcctcaagctgttctgcctctgaattgctctgttcctctgctcttacttgagccgccgttgcctgcggtggctcatccgccgcagatttcttacggatccaacggcgtcggcaagattcctaaggtctgatcacctaaactaaccaaatttgggagattttctaatgaagttattttgtgtgtaggaagacggattcaagccggagaacaaaccggaaaaagatgcggagatggatacagacagtagtacgcctgtggttaaaacgaaggtgagagggaagaaagtgaagagaagatataaagaagagaaggaagagatcgccggaagtatacggtggttagcggaggtggtgatgagatcagagagagcaagaatggagacgatgaaagagatagagagaatgagagctgaagctgaagctaagagaggagaattggatttgaaacggacggagataatggcgaatactcagctagagattgctagaatctttgctgctgcagcttcttctggacagaacaaaggtgttgattcttcattaaggatcggaagaaattgagttctgctttttatattggagactcaagatgttgtgtgtacataccaagtgttgttttgtcaaaatttctcagagagagaccaataattgtttcctggggtagatggcgatttccacatttctaccagcaaatgtatgcttttgccatatgaatatcatcaatctttagtcaaagagatgctaatactgtctcaaatttgtgtgtgtttaagtgttttaactcttcaggtagagatttacagagaatgcttggtagatagttcggttcgatcagtttggtcgtgttagagattgtagtgaaagagaaaataagtcttagcaaaagaatgcgagacaactgtctagtattagtggagatgaaccagctttttctctttgcatttctaatatggagttttttttggatgggaaattgcactatgatagtatgattagtggttctagtctatgtgttttgaatgttagcagttagattcttgttagggatagttgatgaaaagaaacctaaatttgtagtggtggacacattgttctctgctgtctagagagtggccgtgactactagacccaccaaccggcctaagcttgcctgtataggggtgggaaaaaatagaataacaccaaaaatgaaatgctcaaatgacaaaatcaaaattgatttccttcaaatatatctaactagactattgtttgtaaaaaaacaaaacagaaccgaatcgtaattgcacaaatgactaaaccatatattcttcccaaaaaaaaaagaccaaaccgtatacgaaaggtttgatttggtatcgatttaaaaagaaaatctgcaaaaccggaaagaaaaacaaaacaaaacttaaaatcaaattttccaaaactatatatgtaaattacaaagtgtagggaaatgtgaaatgttctagattcttacttgagttgaattttgaatgctgcatttgtagaaatgcaaatttgtgtacaagtcagaaccggtgtaaattaaattgacccggttgccgccagatttaattcgctgagagtactgtaccggatttggttctcttccggtttattccaaataatagttcggtaacagctttgattggttcgtttcttcagagtctggtttgggacttgggagggaagaagatctcgttccctctaagccatg

SEQ ID NO: 14457 - DNA, 3000 bp, Unknown
  misc_feature (1)..( 3000): cDNA_ID_2998410_gDNA_ID_2684120_Annot_ID_190924 3000 nt of promoter + ATG
acatttttttacgtttgttgatgtaatgtaattatgtaaacacaaacattttacctacattagaatttctatttcaaaagagaagtaaggcaagtcatatttttataagttcaatttaattatgataattcctttattatatcatgcatgtcgtacaaaatacaccaaagtctaaacattacatcttcattaagtcctgacaaatattaaacagttatacaataaactttagaccctaaataaagtcgaaccaaatctaaagtcatttacaaataaactaaatctctaattcaataaagcccttaagtaatgtcaaatctttgcaaactctaacattatactggtgttgacgtggacttggtcagaaatttgtgtaccttggatgctttccaaacacagacgccttcatctcagatccgggttcgaacctcaaggtgactccacagcatgcataactcataactcctaacgtcttttttctgcaatcggtaagagaaaactgcaatccaaaagttacttgcttcttctctttgacatcttccataatgtatgttccaatcgaactaatgttttcgtcggagacaacaacagaaactttaagaagctgaggacagcggtatcggaggttgttaatagtaaacagcttacttttgtggaggtgaggtaaagagagtaacattcttgtaaagaaatgaaacttgaaagtctccttgaagacatatatagtcaccaggaagatctgcagggatccttatggacaaatcccactttgcactaagacgagtctatgtgatattaagcaccatgaagtccatagaagctaattctacttttggcgccggacgtttgcattcgttgatgagtataaaaacgaccaaaccaataatacatgcaatgacacaaacgatcaagaataagctgcagatcctctttcttgtactgggcgtgggtggtgtttcatgtgccattgtgtgctattggtttaaagagagacgagaagattttgttggagtgcaggaggaagatgagagagtttgattaatgttagagatcctcctcaagcctcttcctctcactacttaatctcatcagtcctcaactactagattaaaggctttcaactacttatctgatcttccttaaaagtttaattgttttattttcattttcttttgtaaaggtaaagaaatactccgttttattctcacgtgatttttttatcgtaggtacatttaatacaactccaagttatgactgggaatatataaggaaaaaaaaaaaagagagcgtaatctccattggtgagatatttcaaaaagtttctaaaaaaaataaataatgatattttattatgatttaacttctgtccaattataaacacacatatacacatagtctcttaatcattattctaaagtttctctgcagagaaactattctcaatctctcttctactttattatcattttatattttttagttaatgagaaactatatgagagactactgatggagatgctctaatttccgactactcctactatgtttgggactcttcccattgtacagtgttaaggtcaaggtctgatactaacataaatttagaagtggcgtacacgcaaactagtgggattaaaaaaaaagagtattaaagatttaagaaagagtattatatatttagtcaaatgggttattatatactaaataggaaacaaattaaattatgcaaaccgcacttaaaaagtttttttatgtataagttacttcattatctagactcttgagttatccgatccattgatattaataaacactgaaagaatttgtttccattagtttaaaaggaattaagctttttaagtgcatttcacattttaaaaaatagaaaagaagaaagtaaaacaatgttgttttttaagggaatgttgatcggaaaaataaagtgagtttgtaagcttaagacgtgtaacttttgagtaaatttccgacgagatattcatttttggcttacatttgttaaatcgtgtaactttattaaattttacatttgttatattttcgctgcaaccactttttttcttacaaaacgagtgactaagtggagactaagaacaagcaaagctacttacaactacatacaagggtcaaaattttctttggttcaatccacacaacatgaaaactctatcaaattatatcaaatattttagtatagaggatattgacatatcacattcaactcttaagaaacaaacaacaatgaagatactttacaccattaatttttttaataattgatggacagcactacatagtggagaagaggccaatgtgagatataacccaccacatggtaatgagtattgggtagttttgatacattccataatatgcaacaatacataatgcatttatgtcggtcttccactttctactcctcacgtgaaacctttgatctttctctttgagaaaaaaaaaattcaactcagtttctcggatctcttaaacaataccactccacacgttcctctgctatttcccttatcgttgtataaattggatatttatcaaaactgtaactattttgttagaatgagaatcggttttatcaatataccgatttttttttttttttgctaagagtcaatataccgattaatcagctagacttccagtttgacttgattaccattcgataatgagtctaaaaattacaacaccttgggtaatgagtttttgtggatggagagcaacgcgcatgtcgatagagaagagagccaatattagtgtggacccaaaaaacagatagaaacaacgaaaaaataggagatggaatacagactgttctctctacgatatacaaaaccccactcttcatttttatattcttattactttctacacactcatcgtatatcactcactatataaacacacactcacacattcactctacaaacactagaaaccacaaagacaaaatcaaggtcttaaacaatg

SEQ ID NO: 14458 - DNA, 3000 bp, Unknown
  misc_feature (1)..( 3000): cDNA_ID_3017261_gDNA_ID_2684120_Annot_ID_190928 3000 nt of promoter + ATG
aacattaagatgcatatgatgtgcccacaaaaccagcatgttggaccacttcggatcaagttttatattacaaaaatgatagttgaaattaaggtgatataaaatgtatataaatagaaagtggtgatataaaatgtatattaatagaaagcaagtacctgaattgatttgttctggcaagaagatatacttgattagaatttgttgactccaacttgtgctcatcctcctcctcgtagcagaggccgtagtggtggcgcgtggagctcaatcgccattttttcagagcagccaccatgacctgagcaaccctcgtgaagggacttcccaccggaacttgttttcgatattttggaattcctatcagaaatatcactatagctatcaccacacttcctgctattatgctgaatcctagtgaccaactcactcgttcctgtgaaaaaagaaaaaaaaatagtaatggtttgatttgagatataattaaaaagcgataattttttcacaatgtgagggaaaaaaatgaaaaataaaactgaaaaataatatcatcaaataaattttgtattcctgccaaccatgttagttattatgccaaccaatttttaaatatgaaaaagtttacgtttatatatttctacattatttaggttatctaacgtgaataattactgaaaccagcatatgaatatcttactaaagctaatattcttacaaaaccaaaaatagagttaatgttaagacaattgaaaagtaaaagacctgaatgaagatgagtgcaagaacagctatggaagaagcgaggactatggccatataccaataattgaagaaagatgtctttgctgctttctcttccgcattggcctctccaaactggtcagctgcaaaggtcatgacgcatggtttatgccctccttctccaaccgccatcacatacaatgccataaagaacactttttctctcatccgccgcgccaccaccgtcaccgacaatggcaacatgacaatcccctgaaattcattgatgaacgtgttcatattagtccgagtttgagtttgagatcttgaaaaatgagtcaagggttaggtttggtaacgatatgtagaccaagagatagatgaaagaggtcaagagaacggttttgaagcggcctaggatggagtcagctagaaacgccccgagaatggggaacatgcaagaaacaccgatccatgtgttgatgtttttggctgcggtggccgtggactggccaagttcgtttgttagaaacgttattaggttgcttgcaagaccgtagaacgcaaatctctctgctatctccacaactgcaaaagattaatgaattaccatctcgacaatatgaaattagaaagaaaatatatccaaatccgtgagtgtattcagtataccgatgatgaaaagggcagcgttccagcctcctttggttcgtttattgatgagggaggtcgaatctgccatggctgagcaaattttgctagtggaagcaccttgagattattgtgagtgtatctagacgtttttctacaggtagggagatcgttgtgatcaccgagatgccttttttatatttgaaatttgattctgatctctaggtaagtttttctattgcatgtgtttgtttaatataagcatttattatataagtgtagatgctatgactaaactaatttagatgctgtaaaccaaacaaacaaacaaaaaacgaatgaattacttcctatattattaaaattttatccaaaataatatgttcaaagatcgaaagttttttttttagttattattaatgatgaaattttcattaaaaaaaatataagatatatctcaaattatttaataaaatttaagagtaaatgatcaaattaatccaaaacaaaaataaaacgatgggatatactgaaagagtaaatgaattacttctatgtattatatttccgacgtcttccttgcttctcacaccaaagccactccagtgcctttcaacgtcgcctcaggttttgttcttttcttgttggcttaaaagtttaccaagagttaattactttaagcttgttgttatattgttttattctggccatggactccagaattatgcagacttcgtcccttgacactgccttctcctccaaattcttcaatggacatcgtttctcctccgttgtttcgtccttgaaacctgactcgatcgtctttcctcggaatacgacaagaacaagaagggcatcttggttttatccatgtcaaagaaagatgatgacactcatcatagtctgagctacaaagattctggtgtgaatatcgatgctggggctgaactcattagacgaatcaaggatcggacagtttgaggcagctttgagaatattgggagaagttgagaatggcgactatgttgcataccgcatcggacaagttatcgatggtgaaggcgtgacctacaattaagaacaacatgttacatgttgtgtgtacactttttttttgtttggctttttagtgtgtttttattaagcacttaccactgagattttgaaaattacaatctttatcttcattcaactaaattaaacgtagaaaacaaaaaattaatttcgttttacaacattaaaagaaaaaaaagtaccgagaaaaaagattatatagatatgggcctgtcttgttgggcttaaaagtcactcgtcctttcattaccaacatcatataatgaaaatttgacagatatcgaaagcccaataattcgttgactcaaactcgatcatagacgtaatcatgcgaacacgacaccacgtggcatttgtcgttttgtgaagtagtaggattggatattctcagtgaatttgttctctgttgcttatgttccatcgacaaatgacaaatcacacaaaaatggatcgactttgatccttccttggcaaccttacgcgacgaatcattcattctccttaaattcacagctagtaaagtaagtaagcatg

SEQ ID NO: 14459 - DNA, 3000 bp, Unknown
  misc_feature (1)..( 3000): cDNA_ID_2990899_gDNA_ID_2684120_Annot_ID_190932 3000 nt of promoter + ATG
accttattctctcacgtctcttaacaatctcgacgatggttgccttatgcatatcctcagcttcctatctccaattccaggtaaaattggtttctttttcgcatctattactttggttttctcatacttttatacttctttgttcaattctgcttttaattgtttcgttgtttgtaattcatttagaaaatttgaccaactgtttcacatcttaatgacggttctgtgtctcaaatttactactttgagactttgcagatcctaatcaaatcataattgaattcaattctaatctccatgatgaattatctgtttctcttgacttggtgtgtatgtgatacagctttgtagtaatgtaacagaatcagcaagaaagcttttgactttgtattgaattgctatgttttgatctgtatggtgttgtgtgaagctttgaaaatttcgtattttgtttgtatgattgacttgggcatttgttgcgtactacagtctgtttcaatgctgttttgtgtatctcttgtgagtttgcagataggtataacacagcactcgtttgccacagatggagatatctggcgtgtcaccctcgcttgtggctccgtgttgaccgttttgtcaaggatttatctcagcctggagttttcctcaacattgagtcagctgtatctgcagcaaggtttgtaatattatcagttacgttatttacacttctttgttattcgtaaaagggtccataaatctaaccaaattgtcacctctagacccggcgataccattttaatagtagccggtgggaactatcgcgtttctaatattcagattaaaaagcctctttgcctggtatgtctttcaaagaatatatgtctagtgtaattgcttgatatttctgaaagaatcgtttataactttctctagaaatggcaatgtgaaattggtctactttcacatgtttcttgagtcttgccaaaaaaaattagacttcaaaaatcgcaagtagtgaaaaataatttataggacttagtataaaccatttataccaacatctgtgtagtatccaagaaacatgtgaacatatggtaacatatctattctcatgaggatggagattccattccatgccataggtctcggcatctgagatcagtatgcattgaagagatccagagaaaacaatgccacgtcttaggtaccaaaatagaaatgaaagatatcttaagcttgcacacaattactttcaatgccacaactggaaactaagcacgagctgtttgtgacatggacgttttaacgagtgttaaagaactagaacttgatgactaaaattttctttgactgtcgtgagaactcgaaaaaaagaattcagttcgacttcaaagtcttttatgcacttgccacctacctatcagtaatgttccttttctcatactgggcaacacatggaatgactgtaagctgtaatgaaaactattgaaagtagaccttggtgtatgaattaggatgaaaagatagagttgcagaaatatgagtgatttatcatgaatgtatggatgcacacccctagaatacctcagtgtagattaggggttggcttatcagtgtccctagtttcagttaagtggaagaatgtacgccttgaggttgaaaggagttcctaagctattgaaagtagatgccttgaggatgatgttgatacataagtctcaatgttcgatagtagtctcagttttatattatcttcgctttgttcaggtcggtggaggcgagattcctgatgaaaccaccctcgtctgtgctcgtggttcagacaggtttggaactcatattccctcttaagacatttcctctctacagttgttttcaaaattctttctgggaggttttagcttcttaaaagttgttgaataccgcatttcccattgatgtttaaagaaaaggaaaatactttggtatacggctttttgttgttgggtttattgtgcagtgccctggaactgttatcaacctgcaagcttgcgaatttaacagtaaaagcagagctcgggtgctgtttgcttcataggagtggaaggctaacgattgatggatgtgtgcttcaatgtgagacaaaccctttggatcatctctcatgcccaatcgtgagcactgctggagatgaagacattgaaaatatcttaagccatgtggaagtgaaagaaactgttactggaaagattaaagcaaacagtgtaaccgttttgcagacaagaatcgagggaggtgcaaaggctgtttcaacaaggggagacttggttctgcagcgtgttcgagtcatgtattccaaggcttacctctatttctggtttgatgtagattatgaatgatttttgctggttttatttatttttcttcttctgtctgtaacattagtaatctgtgtgatgatgggaaatgatccatcttcatttgtactttgtgtttccccttaagaccagacaggtcctttgttgtatgcttattatgttcagaaataatgtcctttttaggacgaattgccgaattcatttcaattggatttttataatttctgcttagtgtatcttttgtgataaatggtttctttcttcactgttatcaaaatattagagatttttttctctcaaaaaatattagagagaatttcaaacaatgcaacagaaaacagctttattatagtaaagaaattgcaacaattgttgtagacaatgacttcaacaaaaaaatattctatacaatgaaaaagtatttctaaaatgtaaataaaatgacatattcagagtagattttttaggaaaataaaacgaaaactgaatgcataaaagatgataaatacgaataattttacatattaaaataaataaaaacattgaaacaccaaaaataagacaaaacctaaagtatataaagccaacactctccagtgtgcagtcgttccaagtccgcttatcgaattctccgattccaaaagcagcagaagaaaaaatg

SEQ ID NO: 14460 - DNA, 3000 bp, Unknown
  misc_feature (1)..( 3000): cDNA_ID_3017235_gDNA_ID_2684120_Annot_ID_190936 3000 nt of promoter + ATG
aggtacatactttcattcaatttatcataaacgtgtgagcaataaccagcagtctgctacgcatagtacctggtcctcaactgagggttgacccttatgctcacgatattggtcagccttaagagttacacgtacacttgggacactttgggatgacagaccattggcttttccagtcaatggaaattgctggttctcttgttgctcaaactcagttctaatatccaatcctagatcttgagagtccaacattgatgataatgattttgggctattggatacatctttagaagatgaccataactcatcaccaccgctgagactgccatcaccaaatatagggacatcattgctgcaaaaccatcacttgtgaggatattgtgttagaggccaatgtgcatgaaacaaattggacacaagaaataaggagctagtatttttttcattattacacctttccaccatattcacatctggtatcttatagttctaagacgaaatcaagtcagtaaataacacattttatacatggtagaaaaggagtatgtcattgaaaagttaccgcctagcacagtgaggatgagaagtcgttttacctgaacattcgatcaagatcatcaaaactaccaatgttggcccagctgtagtcatcaaaatcaccttgctctttactctcatcagagctatgaaaaatatcagggcctttcccaagttcagacgttttctctggtaaaaacagagtgagcacacaacttttaaaatgattagattggaaagaacgtacccaagtaaaacatgactgtttcaagagaaacgcaccacctcttgttgaatcatatctgactggctcagctaagcattttgaaagttcagtcgcactcaaatcttgatcaacctttgtagcattagttagcgacgtgtcaggccatgagctcatacagaaatctggctgaggaagcccctcatcaacattatggctcgaactgctccccaaatttttatcatggaggtcaattttagtcccagttatcttttgctcagctgtcttagattcctcaatctgttcctttttgttaagttgttcacttctgactttaaaaggcacaatatggtcgcctgtctcagcatcatcaccccatatcatattagtaagctgaaaagtaggttaagaccataaaacaagtagggatcaggcacaaagcaagtattaacaacaagccaccaaaactaaaatatttaagaaccaatgatactagagactgataaattacaggatgagtgattcaaaacctgatcgttaaccaaatccataagaaaacagaattatactgattccacataaaaattcgtatatatagcaacagaagaaacttacctcttcttcttcccaatcaaacatgactggagaaacaaaatcgaatcacagacccaaaatcaagctccctgattgctccacacatcgccagctccacaacgaaaaaaatccaggaaaaaacaacaagatcaacaaatcggataacgtaaatccacacacaataataaagtggaaaaaacgataaataaaagaatattaaactgaaaaagcaacaagctttgaaaaaccttgattcagcagaatcctccttcgtgctcaaaggatatgggaagagaaaggagttacagtggaaaaaagaaaaaagagtttttttttgtatgaaatggtcacgtgccaaacgagtggctgagagagaacgggttgccacgtcagacgagaaggccgtatctaaacatgtggctgagagtaaacacgacttgattccatgacagctcattttgactttccctggctgtggtcttttgttgacgtttttttaatattttcatgttatatcggattagtgttcgagaaaagaagagacacacaattgggtaaatatgtttttaaaagagtggaaccagtgttcaacttttagatttggtggggtttgagttcatagcgaccacaatttttatcttatatgttttaactaatttagctttcattgatatccactttttcaaaagtatttgcttggatcagtttattgaaaaggaactaatgcgttatcctgaacagttcataacgaaacagtggatataaatggttgcaattgatatatattttttaataagtgtgtttatttttcaattataatgaaatcgttttcgtccttgatgactaggttgaaaattttcagaccttgttaataggctttgtgcctcgattgtttatgcgtttgtttatcttgtgtttgtactttgtatttcgagattaaaacgaattgttggtaggggttactcttgtttcagaaatgatcacgagttacgttagacacatattaagcagtaaacattgttgctagcttgtgatagatcatagatagagtgagtctgagacaaaagcaaattagtgtatatatcaaaaatagaaatgtgctacaaacccgttattgctgacttgataaatttgtacttgttacatgcgcaagattttagtgatctacaatcatgaaagacgctagagaatatgtttctaagaaactggtacaagaaaaaaattatgttgtatacaaaataaaataaaaatattaacataaaaaagagtgatgatcttgtcttttaaatctaccaatttagccactaaacaaattcctttcgttcatcaaagtccacaaattcactgaaagtaatgattccaagcattttttcccaccaattcaacaatttttaagtacaacactttagtgattctaatttacaaaaataacattttgttgtaaaacaaatttagtagtactagaaatttccttttcagggagatgcaaaaattcaattatcacactgctattttggtcgaggtgtaataaaaaaacaaggagacaattgcggcgtggaggctttctgtttacatgcagcacaagaagggccacatgacatgacatcatgtgactctgtttcccatagtcagagaaaagaaaaaat

SEQ ID NO: 14461 - DNA, 3000 bp, Unknown
  misc_feature (1)..( 3000): cDNA_ID_3017239_gDNA_ID_2684120_Annot_ID_190935 3000 nt of promoter + ATG
atttctcgaagtttttcttcagatgtggatatttgcttgtgttcttgtgatccatttgaaagtatttctgtgtgtctcttgtcttctagctctttcttaagcttcttctgcttcccctacataaaggatcctaccatcacgtattgaaggaaaaactgcaaagatgataccaccacaaagtttcaaaccttaccaaaaggtattcaagatctctcccgtcatacaacatctgatgtgaatgataactaaagcgatgatgcttagagaaaaagtgatcaacggcgcagccacgagtgttatgctcagggcagagaggaacttggcggacaagaacagtgaactgatcagcacgatgtctaagttctttcatttgttgaagccttatcacaagaatctccttatattcctagatggagaagatccagtaaataaacctattctataacaaaaaaaaatccgtcactgatagacaagagtaaaagcttaccttatgcaacaaaaacaatgcatagaatgatatgcaccacaagcatgagaaatgcacccataacctaggaaaattaagacaagatatcaagaaacacaactctaagagagatgatgcaaaattaattaagacataaaaaggaaacggcttacttgttagaacctcgtgtgatatttgatattgtgaaagcatccattgaatactctcttcgtgtcggtaaatctgactcattgtaataatcaaccggaagaagtagtgatgctccaagtaacgaacacatcaggaagaatctaattctgcacatagttcaaagaatctgataatcgtgtttatatgcgagataagaccaaatcttccttacccgaatttgaagagcctgatgaggacgagagcatcaaggccgtggcggctgaggatctcgtcctcggggacacggaaggcgcgtgggatccacgcaacggaaggaaggaaacgagggaggcaaagggatgagtgtagagacagaggacggtggtggtggcgatcggagaggcggcgagcatagtatacgacggcgttacggggctgcttcttgaggacggagaagagccagagtgcaacgacggcgagtcctatgttgatcgacgccgacgctaacaagctttctggcgtcatattttttcttttctctgactatgggaaacagagtcacatgatgtcatgtcatgtggcccttcttgtgctgcatgtaaacagaaagcctccacgccgcaattgtctccttgtttttttattacacctcgaccaaaatagcagtgtgataattgaatttttgcatctccctgaaaaggaaatttctagtactactaaatttgttttacaacaaaatgttatttttgtaaattagaatcactaaagtgttgtacttaaaaattgttgaattggtgggaaaaaatgcttggaatcattactttcagtgaatttgtggactttgatgaacgaaaggaatttgtttagtggctaaattggtagatttaaaagacaagatcatcactcttttttatgttaatatttttattttattttgtatacaacataatttttttcttgtaccagtttcttagaaacatattctctagcgtctttcatgattgtagatcactaaaatcttgcgcatgtaacaagtacaaatttatcaagtcagcaataacgggtttgtagcacatttctatttttgatatatacactaatttgcttttgtctcagactcactctatctatgatctatcacaagctagcaacaatgtttactgcttaatatgtgtctaacgtaactcgtgatcatttctgaaacaagagtaacccctaccaacaattcgttttaatctcgaaatacaaagtacaaacacaagataaacaaacgcataaacaatcgaggcacaaagcctattaacaaggtctgaaaattttcaacctagtcatcaaggacgaaaacgatttcattataattgaaaaataaacacacttattaaaaaatatatatcaattgcaaccatttatatccactgtttcgttatgaactgttcaggataacgcattagttccttttcaataaactgatccaagcaaatacttttgaaaaagtggatatcaatgaaagctaaattagttaaaacatataagataaaaattgtggtcgctatgaactcaaaccccaccaaatctaaaagttgaacactggttccactcttttaaaaacatatttacccaattgtgtgtctcttcttttctcgaacactaatccgatataacatgaaaatattaaaaaaacgtcaacaaaagaccacagccagggaaagtcaaaatgagctgtcatggaatcaagtcgtgtttactctcagccacatgtttagatacggccttctcgtctgacgtggcaacccgttctctctcagccactcgtttggcacgtgaccatttcatacaaaaaaaaactcttttttcttttttccactgtaactcctttctcttcccatatcctttgagcacgaaggaggattctgctgaatcaaggtttttcaaagcttgttgctttttcagtttaatattcttttatttatcgttttttccactttattattgtgtgtggatttacgttatccgatttgttgatcttgttgttttttcctggatttttttcgttgtggagctggcgatgtgtggagcaatcagggagcttgattttgggtctgtgattcgattttgtttctccagtcatgtttgattgggaagaagaagaggtaagtttcttctgttgctatatatacgaatttttatgtggaatcagtataattctgttttcttatggatttggttaacgatcaggttttgaatcactcatcctgtaatttatcagtctctagtatcattggttcttaaatattttagttttggtggcttgttgttaatacttgctttgtgcctgatccctacttgttttatggtcttaacctacttttcagcttactaatatg

SEQ ID NO: 14462 - DNA, 880 bp, Unknown
  misc_feature (1)..( 880): cDNA_ID_3017198_gDNA_ID_2684120_Annot_ID_190949 3000 nt of promoter + ATG
ctttaccttcattataccaagaagtgagttttagttttagttttttgagagagaattaagaaagcaagaaagatatgtatctgaaagttttttcatattttgcagacaagggaagatggtatttatgcagggaagagaaggaagttggagaaagaaatgtgtaccattatacattaataatccttttattggactcgtcacaattttcgtctaccatatttatatttactgtactgtgtacatcagattatgttggatcacgttctcttctgttgtttcacttatcaactttacatgtttatcattgttctccaattgcttcgaataaattgtatgataacattctgtatttgtttaaattatatactactagagtactaggggtattttctttgatttcagacttttgtttatgatttgttacttgtttcacataagaataattggtcaaatttatttggtctctctttctcgcaaatcatatacaatatacaactctaatcttctccaccaaactctaatcttgttcatctttttttattcaaatagtttagaaagttcaaatatactaatctttatcaaagaataatctttagtcaaattttaataatgaaatcaaatatcttacaaaatggaaaaacaaaaatatgggtgtttgatttttacaaaacaaagatggaagagcaagtcagaagtcaaaatagctcgaagatgtaagtgacggcgcctgaatactcttggctggtagatttcacctacctcatttttttcatatatctcaaacgtggaatcgctgttactcagtttttatatataaaaataaacactcgctcttcttcaaccaaactcatttccaaaattccacaaagtttttcaaatg

SEQ ID NO: 14463 - DNA, 3000 bp, Unknown
  misc_feature (1)..( 3000): cDNA_ID_3017202_gDNA_ID_2684120_Annot_ID_190948 3000 nt of promoter + ATG
ttctttgaaacacaaacatttgcagacaacatctttagattgtgtttttgattattatcggtgtgtgacaatgatgtctcaatcttttgatacatttcaagtatgattaataagttactgtgactcaagccacacaaccagttgctcggtttacacagaataataaaaacgttatgactcaaattgttttccaatttggttcgataaatttgcgacccggtttgatattatggttcgattaaaccagaacaaaacaaccctatatataatttcttttgaaatgaatgagaaataaaaaaacaaagaaattcgaagaggtttttttaggttttcgaaaattcaaattacaaaagtaatccatcccgctgctctatagaaatatatttcccgatccagttccagtgtcagttgctttatctgtaaaaagcaaaaaagagatgagaggcggagccgcgggaaagagaagaacgacggtgggtttcggcggagcgccgccgccacctccaccatcaatcgagcaacaacgtcacctctttaactcaagagactccgacgccagtttcgccagcagccgtccttcatcaatcggtttaggcggccgaggagcctccgatgacagatcttcgatgattcgattcattaacgccttcctctccacacataacttcccgatctctatccgcggtaatcctgttccttctgtcaaagacatctccgaaaccctaaaattcttgctctcagctttagattacccttgcgattccatcaaatgggacgaggatctcgtcttctttctcaaatcgcagaaatgtccttttaagatcaccaaatctagcctcaaagctccaaatacgcctcacaattggcctactgttctcgccgttgttcactggttagctgagcttgctcgtttccatcaacatctagtatctaattccacctccgtacccgaagataactccatgaatttcttcgcgattcaaagctttggtcacttcattcgcggcgaggatgataaggttaacgatttagattctcaatttttgggtaaattggaagcggagaagactagcgtcgctgaaactatctctggttgtgagaaaatctccggtgaattggaggctaaacttgagtcactgaggaaaggtccttcgaagaaagagtctctggagaaagttaaagccgatttggagaatgacgtaaacaagttccgaactattgttgtggagtatactgataggaatccagcgatggagaaagttgtggaggagaaagctaaggagctcaaagctaaggaagaagagagagagcgaatctctgtagagaataaggagttgaagaagagtgtggagcttcagaactttagcgcggcggatgtaaataggatgagaagagagttacaagctgtggaaagagatgttgcggatgctgaggttgctagagatggttgggatcagaaagcttgggaactcaattcacagattaggaatcagtttcatcagattcagacacttgccattgactgcaaccaagctctcaggagattgaagcttgatattcagttcgctgttaacgagagaggggaaacacctgcagcggtgatgggtgtggattataaatcggtggtgaagccagctctgtgttcgttgtgcgatgggatcaaaggaagctcggcggagaaagtggaggaattggtcactttacagcaccataagtctgaaatggcttcgaagatcgaatccaaaaggagtcttcttgggtcaattcagttgcagatcaatgacctcgaagaaaagatgaagttggtgaagaaggaaactcaggagttgagtacaaaatgtgatttggaggcgaaaacattggttgagagtgtgaaagctgaggctttgaatctggaggttgtggagaaagaagctgctgagtttgtaaaagcttcggagcttagattgcaagaagcagtgaaggagagtgaagaggaggtccaagcatgtgctgcacaactctttgcacttatcgattcgatatcgaaacagaaagagtacatggattcgaagatatcggagatcaaaaccggtgttgctgatactgccagtgctgtttcagagatatacaaagccaacttcaagaagaaccttggtatctagtggttggaatcaactgagccaagagattgttaaaagcgtgagtaattcctattgcttttgttcacatagtcgtattagcatctatgtgtggtatgtatgagttttcaggatggataattgaaattgctcagctatgctagtagtatataaatatctgtgtttcttttttcattgaaacttagatgataggcacataatctaatattcacaatgtttaactcaaagaacgctgttatgatcaagttacataggatttccaatgaatacactcttaccttctttttaccataagctgacttaggtgactttgattcttattcggtttatcccctcgggtctcttgaagtcaggctatgtttgcagctcctcggttgtaacctctttgggttaccactttcttcagtctcactgagttcctcctttacttgtttaaagcttgcttactcatgcatcatatgtggtgagaatatcttactgatgatatgaataagagagagtagctatcaaatcaagaaaatgagaggaaggagttaaaaaagacaaaggaaacctaagctgcttatctataaagccaacacattattcttacccttttgcccacaaagtaaatgacacacatcaactaaagtagaaatttaaaatgcctttgaatgccttaatttgcatttttattaaattattaacagaaaaaagatatgttggttagtactaatccaatacaatacagaaacgtgtcaagtatcctaatcaataatggcggctccacgtaagacaaaaacaaattaaggaaagagcgagagagagagagagagagaaaaaagaagaagaagaatttgaggcgattgggtaagcgatg

SEQ ID NO: 14464 - DNA, 3000 bp, Unknown
  misc_feature (1)..( 3000): cDNA_ID_3017205_gDNA_ID_2684120_Annot_ID_190947 3000 nt of promoter + ATG
acaaatcttaatacgtttttttattttgctggctctgaggcaacaaactttttttacaattacttctttgtcatccccacttaatctggccttaccgtttttatttggcttcccgggttatgcataagaagatgtcaagtaggtgagaggttggtgtgcgtagggaatttgcaattaacacgtgtttattttaactctcttcaattttaaatggtgagagtagacgtagcaaactagtctaatcgcgaactaaaccactttatattttttgaacgaaatagaaattgttgtagttttctataaattattttttaataatctccaaatagagcaacgtatccacttatatatataaccttatctctttttttattggagaaaaaaaaagtacactgtgataatttgaactcatatatatacacactagttgtgtgtgcttgtcttaagaaaaaacaatgggatcaatggctcagaaatcggttttgatgttatgcggagagttcatggaagcctacgagactatagtacctctctacgtcctccaagcgtttggtgttagcgtccactgcgtttctcctggtcgcaaaactggcgacaagtgcgtcatggccgctcacgatctccttggcctcgaggcatttctcgaatctttcactttttcttcatttcagtttttttcccttgcaatcgttctttgcatatttagtaaaacaatgcgatcaaatgctcataattgggtggactttcccctttattatctttatccaaaaagtttagataattgggtggtctcaacccaaaatgcatgggcctactcttaacagtaaaaaagaagagtttcaatttgacttttacctttttacagatatacaccgaactggtggttgaccatctaacactaaacgctaacttcgatggcgtcatccccgaccaatacgacgccatcatcattcccggtggacgtttcacggaacttttgagcgccgacgagaaatgcgtgagtcttgttgctagattcgccgaactcaagaagctcatcttcacgagctgccacagccagctgtttcttgcggcggcaggtctgctcaccggtggaatgaagtgcacggcgttcgaaagcatgaaaccgtttatcgagctctccggcggcgcatggtggcaacagcctggagtccagacccttttcgaaatcactgattgtgtcaaggacggcagtttcatgtccactatggggtggccaacgcttggccatagtctcaaagttttgttagaatcacttggctccaagatttctagctctaaagagaatcatcagacttctttgcttttcttgattggggtaagtagcttattttcataagactctcttttagactttatatattggaattaaaaaaatggtctgactaatacgtaattttggtatatttaggattgtgttgaagattatagtatcaacgtaccatttaaagcgtttcaagctttgggatgtaaagtggatgcagtgacgccaaccaagaagagaggtgagaaatgcgctacaatcgtacacgaccttgaagacggacggcaacttcctactgagaagtttggtcacaacttctatgtgaccgttgcgtgggatgatgtctctgtggatgattacgactgcattgtggttcccggaggaagatctccggagctcttggtgatgaaccccaaggccgtcgaattggtcagaaagtttgttgagaaaggcaagtttgttgctgccattggaatgggaaattggctacttgccgccacaggcgcccttaaggtaatatacaccgttttacaaaaattcgttttactattctaaagacttaaaagttaaaactgaagccgaaccaaaccatattttaatttaaacgaaacaaaaatgtcaagataagttgctctaagcacataggaatctcctatggttatggttatgactaatattattccagcatattgttgaaggttagtaagatataattcatcacatttatggcaccacttccttagcatagattataatttttgccagcttgttataactcatctaattcccattgtggcatgctatattattacattgcagaagaagagatgtgcaagtagttatgggacaaaggtggctgtgaaggttgctggtggtgagatcgtggaatctgaacggtgcgtgaccgacgacaagctggtcacagccgcatcaacttccgatcttcctgcctttttgtatgcattgtcgactgcacttggtctctctgttgtattctaatgtcaagtggtgctttaacgtctaatgcctaaaaaaataaaaacatatctttgtatgtcgaaatataaggtcgtccctctaattatttatgtacaagcttggatttgcatatatatatgggaagaagagttgccacacttgcttacacctcttctaattgtgtttttttataagaaattaccactatcaagttgtcattctcctcgttttacatttggtaaacaagctctattgaccatttatgttgtaacactacttcaagactaaagttgattagagatagcaaaatctgtcaccagcaaattgtgtttccttgttaaatactagtaacagattccaaacacattaaattttgtgaagttaaatttaacaacatactataaaataaaacaacacataaacggattaaagacgttaatgttcatccaaaaagtatactgaacttttaaataatttaccgacgaattgtactgtttatatccgaccaatatagttaatcacattttaatcactgcataaatttactcataggaattacaattaccgaattagtttcggtttaaaatttgttggatcaataaaacaaaaaaaaaaaaacgatgccagaatattccgttcgtcggcgtagtctttcccgcccccaaattatctgagcaaaaaccctagactctcgatttcgtcacgattttctcaatcaccttcactatactgcttcg

SEQ ID NO: 14465 - DNA, 3000 bp, Unknown
  misc_feature (1)..( 3000): cDNA_ID_3017209_gDNA_ID_2684120_Annot_ID_190946 3000 nt of promoter + ATG
gttctcccccaccaccgtactactctccttcacctaaagtgtactacaagtctccaccaccaccatatgtctacagctctccaccaccaccatattactccccttcccctaaggtgtactacaagtctccaccaccaccttattactcaccttcccctaaggtatactacaaatccccaccacatcctcatgtatgtgtttgtccaccaccacctccatgttattctccatcccctaaggttgtgtacaagtctcctccaccaccatatgtctacaattccccaccaccaccatactactcaccttctccaaaagtttactacaagtctcctccaccaccatcttattattctccctctccaaaggttgaatacaaatctccacctccaccatcgtattcaccttctccaaaaactgagtactaaatttctcggctgcctctatatgagtgaaactaaaaaatgtaattcttaaataagttatcgaatattattcgattttatctttccttttgttctcgttttttaatttctcttatctaatcaatttttaattttcttgggatttggctacaaaattttcttttatttgtgtaacgattgcttgcgatctatataaactcctttgcaaattcttgactttgtatcgtttaaataactatatgatcctctaacatggatcttgtctttggacagcacacctaaaagcatgaattattttaattctagtatgtcttcaaccttaacgatccacaatttttaactcttggaggtttcattttcctacctaaatctggtatggattaaaaaagaaaactcaaactaaaaaacaattatgagacgacaattcccaaagatatcaagaagacaagaactacattttactccacaactatattctatcgcattatttttattaaaagattttcattgatataaaaggaattaaaaaggaactctaatcgaaccattacatccaaccacaaaagggaaaaaaaaaggtgaaagtttaaaacatgaaatagctaattcaagattttatatctttatttttccgaaatatttttgtcccttacgattaaattcaataaaccaaagaactaaaagagtggttgtctagtggtagtacaagggaattggtttctttgtacaccgggttcaattctgtttagaaacagagaaatattctttaaatgaaaatggactaaagactagctccggatatagaagaagattatagatccaaattccaaaactttcgcgagcccgaactttcttagctaaacaaaaagaaatctaatataaaaataagaagaagaaacaaccaaggaacgataagaggtaattatgctataaaaagcggtcacttgtcttggttctcgaggatagaaatcaagtttgcacaatcggaagcgaaaataccaaacatcttgccggtagagatcatgcattaattccattgcccataacagataatcaaattctgcatggagcgacaataaactccgacggctacttctgagaccttgatgaagaactaagttttgtttcactagaacccaactatatccgctcagagccatcttcatgccaaggcgcattaaacagagatcaagatagggggatctagattaaacgttggaggtgtgacagaaattatggactcttcttttagggaagcttgtttccaagctgcaagatgttcaacgctcacaaatatgttagcatatgatatgattaggtttttgaattctatatttttatatgtcgcaagcgcactacaattaataaatcttcttagggtagaatttcaatccataagcaggctactaattataccatgaatactaccattttcccctcttttttttatttatgataaggtttctacgttagtaactcttatatatatgttttgactgttacacacttgtggaatcatgatggctggattggtgattcgaccattttgacattgaaaaccggtctccctccaattaccttgaagcgttatgcaataagtgtaaatgtctgctttcgaatggttttagcagtccatgaggctaatcgacccaacccaactcatagactatagagttacatcatttccgttgcatgtctcttgtgacacaaagaactaaacaagataagagagaattagagaagctataaaacataaaatcactacatgtcacatttatcatttactatgttgaatatttttaccgttcaatttaaagaaatccaacaatatgcttaaaataatttttttgattaatgtttccaaattctatatgttcttttaatcatatggtaattgattattttcgaccattctgataaagtttggagtacactgtatttttttttaaaaatagaagaaatgtatatataaattaactaagaatatattaagttttattgttttaataaagtagtttcattgctgcatgcactctgccatttacataaaatgcaagccttgtaatttacttttcttcattaattgtttaagatttgttttcaattttaattttgttaagaaaacaaatcttaatacgtttttttattttgctggctctgaggcaacaaactttttttacaattacttctttgtcatccccacttaatctggccttaccgtttttatttggcttcccgggttatgcataagaagatgtcaagtaggtgagaggttggtgtgcgtagggaatttgcaattaacacgtgtttattttaactctcttcaattttaaatggtgagagtagacgtagcaaactagtctaatcgcgaactaaaccactttatattttttgaacgaaatagaaattgttgtagttttctataaattattttttaataatctccaaatagagcaacgtatccacttatatatataaccttatctctttttttattggagaaaaaaaaagtacactgtgataatttgaactcatatatatacacactagttgtgtgtgcttgtcttaagaaaaaaca

SEQ ID NO: 14466 - DNA, 3000 bp, Unknown
  misc_feature (1)..( 3000): cDNA_ID_3017251_gDNA_ID_2684120_Annot_ID_190931 3000 nt of promoter + ATG
tttcaagctcaaatctggaatcttttctccggtttacatcgaccttcgtctcatcgtctcttatccatccctcttaacacagatctctcaaactctcatctcttctcttccaccttctgcaaccttcgacgtcgtctgtggtgttccttacactgctctccctatcgccactgttgtctctgtttccaatggtatccctatgcttatgcggcgtaaggagattaaagactatggaacatctaaagctattgaaggaatcttcgaaaaggatcaaacttgtttgataattgaagatcttgtaactagtggtgcttctgttctcgagactgctgctcctcttcgtgctgtggggttaaaggttagtgacgcggtggttttgattgataggcaacaagggggtagggagaatctagcggagaatgggattaagttacattcgatgattatgttgacggatatggttagggttttgaaggaaaaggggaaaattgaagtggaggttgaagtgaatttgcttaagtttttggaagagaatcgtagggttagtgttccaagtgtggagaaacctaagcctaagcctagggttttggggttcaaggaaaggtctgagctttctaagaatccgacagggaagaagctgtttgatattatgttgaagaaggaaaccaatctttgtttagctgctgatgttggaactgctgctgaattgcttgacatcgcagataaggttaggatcattcttggtatcgaagtttgaagactgttcattagaattatgttttagtgacatcttcttccaaatgttttgtgttgatgcaggtgggaccagagatttgtctcttgaagactcatgttgatatactgcctgatttcacccctgactttggctctaagctccgtgcggtaattacttttgtactaatttgctctcacacatcttcgaaattctgtttctttgataggtttagttatatagagtaagtgaagattgtaatatctgcaatagacatgagtctcatgtctgttactgattaattggtctctttgatactcattgatctattgtttattgttactttagattgcagacaagcacaaatttctcatatttgaggatcgcaagtttgcagacattggtaacactgtcactatgcagtatgaagggtaatttttctacattatgtcacttagctttcattcaagtcttttcgagttttcgtgtgccaattttttctggtttgttcgcagaggcatctttaaaatattggagtgggctgatattatcaacgctcatgtaatatcggggccaggaatcgtggatggcctgaaattgaaggtatttttcatttctctttattaccagattatagattcttttgtttttctaatgttttgttgcattcctatatgattgcagggtatgcctcgtggtagaggtttgcttttgcttgctgaaatgagctctgcaggtaacctggctacaggagactacactgcagcagctgtgaaaatcgcagacgctcattctgattttgtgatgggattcatctcggtgaatccagcatcttggaaatgcgggtatgtgtatccgtctatgattcatgcaacacctggtgttcaaatggtgaaaggtggtgatgcacttggtcagcagtataacactccacactctgtgagtctctcccaaccttaccacatttatcttacatccattgttagtattctagtctgaaatataatgttgattgctcttttattttattttaggtgattactgagaggggaagtgatattataatcgtgggacggggaatcataaaggcggaaaacccagcagagacggctcatgagtatagagttcaaggatggaatgcatacttggagaaatgctctcagtagattcgatcctgagagatggctgagattttttgtttttgtgttctagtgctataagattgtgctagtttttgtgtgatttatgtgaggatggattttaagactcatgtctcgttgattgtttacttgattgagtgattctcagttctcaataataataaagtgaagcgtggcgagtagttgatctcatatgatttgtacggttgatcacaatttctggatcctttggatttggccgaggcattttgtcaaatgtaactcaaatcacgtaatgaatcaaaacacgaagagataatataaagactaatttacaggttaagttacagtcgcttacacacagggcatgtgcgtgaaaatgttgccaaatactcaagtactcaggaagggatttcaagtgtagaaagacttctgtaacaagtgacagacttgctatttcatttactcaaaaatgatcataaaacaacttcaaattctattgggcttaaaacttcaaaactaacttgctattttgattagtcttgaatcttaatacattgttttttaagattgtaagcccacaaattgtttatatcaatctatgtgggcttaaacccactgggtactcaaaacccggataaaattgcaagcccacaaattgttttccaaatccaaaaaaacacgggcttaatatgggcaggtcttgttttacacaaagtctcacacgggtttactctattgggtcgtttttttttgttagtagttatgttagtaaaacgacggcgtttagatcaatttatgtgaatttaaatataaacattatctccatatccattgttttgaaaacggtgcacgtgtagctatctcattggttagaaaaacacacgtgaaactctctaaattgttttgctgagctggatgagagagaattaagtcaataacaaataagatttttttcccgttttttctttaaaaaacataaaccctatttagtcattgactaatttcattgcgatttattttctttttctttcgcagaggtcggactcgaaacagaagaagagaaagatgagattttcctaaagcaaatctacaaagccttataaatttttttttctggcggcgatg

SEQ ID NO: 14467 - DNA, 3000 bp, Unknown
  misc_feature (1)..( 3000): cDNA_ID_3084000_gDNA_ID_2684120_Annot_ID_190926 3000 nt of promoter + ATG
tgattaatcggtatattgactcttagcaaaaaaaaaaaaaaatcggtatattgataaaaccgattctcattctaacaaaatagttacagttttgataaatatccaatttatacaacgataagggaaatagcagaggaacgtgtggagtggtattgtttaagagatccgagaaactgagttgaattttttttttctcaaagagaaagatcaaaggtttcacgtgaggagtagaaagtggaagaccgacataaatgcattatgtattgttgcatattatggaatgtatcaaaactacccaatactcattaccatgtggtgggttatatctcacattggcctcttctccactatgtagtgctgtccatcaattattaaaaaaattaatggtgtaaagtatcttcattgttgtttgtttcttaagagttgaatgtgatatgtcaatatcctctatactaaaatatttgatataatttgatagagttttcatgttgtgtggattgaaccaaagaaaattttgacccttgtatgtagttgtaagtagctttgcttgttcttagtctccacttagtcactcgttttgtaagaaaaaaagtggttgcagcgaaaatataacaaatgtaaaatttaataaagttacacgatttaacaaatgtaagccaaaaatgaatatctcgtcggaaatttactcaaaagttacacgtcttaagcttacaaactcactttatttttccgatcaacattcccttaaaaaacaacattgttttactttcttcttttctattttttaaaatgtgaaatgcacttaaaaagcttaattccttttaaactaatggaaacaaattctttcagtgtttattaatatcaatggatcggataactcaagagtctagataatgaagtaacttatacataaaaaaactttttaagtgcggtttgcataatttaatttgtttcctatttagtatataataacccatttgactaaatatataatactctttcttaaatctttaatactctttttttttaatcccactagtttgcgtgtacgccacttctaaatttatgttagtatcagaccttgaccttaacactgtacaatgggaagagtcccaaacatagtaggagtagtcggaaattagagcatctccatcagtagtctctcatatagtttctcattaactaaaaaatataaaatgataataaagtagaagagagattgagaatagtttctctgcagagaaactttagaataatgattaagagactatgtgtatatgtgtgtttataattggacagaagttaaatcataataaaatatcattatttattttttttagaaactttttgaaatatctcaccaatggagattacgctctcttttttttttttccttatatattcccagtcataacttggagttgtattaaatgtacctacgataaaaaaatcacgtgagaataaaacggagtatttctttacctttacaaaagaaaatgaaaataaaacaattaaacttttaaggaagatcagataagtagttgaaagcctttaatctagtagttgaggactgatgagattaagtagtgagaggaagaggcttgaggaggatctctaacattaatcaaactctctcatcttcctcctgcactccaacaaaatcttctcgtctctctttaaaccaatagcacacaatggcacatgaaacaccacccacgcccagtacaagaaagaggatctgcagcttattcttgatcgtttgtgtcattgcatgtattattggtttggtcgtttttatactcatcaacgaatgcaaacgtccggcgccaaaagtagaattagcttctatggacttcatggtgcttaatatcacatagactcgtcttagtgcaaagtgggatttgtccataaggatccctgcagatcttcctggtgactatatatgtcttcaaggagactttcaagtttcatttctttacaagaatgttactctctttacctcacctccacaaaagtaagctgtttactattaacaacctccgataccgctgtcctcagcttcttaaagtttctgttgttgtctccgacgaaaacattagttcgattggaacatacattatggaagatgtcaaagagaagaagcaagtaacttttggattgcagttttctcttaccgattgcagaaaaaagacgttaggagttatgagttatgcatgctgtggagtcaccttgaggttcgaacccggatctgagatgaaggcgtctgtgtttggaaagcatccaaggtacacaaatttctgaccaagtccacgtcaacaccagtataatgttagagtttgcaaagatttgacattacttaagggctttattgaattagagatttagtttatttgtaaatgactttagatttggttcgactttatttagggtctaaagtttattgtataactgtttaatatttgtcaggacttaatgaagatgtaatgtttagactttggtgtattttgtacgacatgcatgatataataaaggaattatcataattaaattgaacttataaaaatatgacttgccttacttctcttttgaaatagaaattctaatgtaggtaaaatgtttgtgtttacataattacattacatcaacaaacgtaaaaaaatgtttgtgtcattaaatgtttatccacgtactcttcacaacgatcataagtcataattcagaaaattcctttaataaatgtgaactgaataagcttttgtatagtcatcaaataaaaagtcaactgtacaattaaaagtccgcaaacatctcgatcgtctaagagacgacttttctcgtaactttatgaagaatatacaatagtagtggcttgatcgcgtccacacatttacattgcgacttttcttgcatgccgtctcacgcactatatttaggcaaaacacaattgtcttcatttcaagactagttcttgttttctccatattcctcaacaacatcaaa

SEQ ID NO: 14468 - DNA, 3000 bp, Unknown
  misc_feature (1)..( 3000): cDNA_ID_3017391_gDNA_ID_2684121_Annot_ID_190963 3000 nt of promoter + ATG
ttttgatcggacgattaagattgagcaaaatagagagagatagagagagattatgttttggatataatgagaggtattagagagaatcaagggtttatatagaggtattagggtgagtggtttagtcaaatccacaagacttttaattaatacaaattcaaatttatccatttaaagattgatcagataagatatctaaactgtgtttggtaacttattttttaatcgtaatattctattggttgtttacatatatgttatgatttggtgagatttagagtaaatagtgattaatgtttttgaccagattttatgcttcttcaatgggacctagacgacgtatttcacaaggttaatttattaggggcttatccgttgttaagatagtactattaaggggagtaaaagatactattaatcctcctcttttgactccgaatattttgtttgttttggataactttctttttcaataaaataccattcatggataattttttaggcaaatctaccaaaatcgaaatgtattaatgaatgatttgttataatttaatttcgcaaggttaattacgaggggcttatatccgttgttggataaatatgttaatatcctcctctaatttcgattatctcatttgttaggataacttttatttccgattacacaagatattatctcatgtaaatctactaaatcgagaaatgcaaatctgttacaaattttataaacggggctagctttgacatgtatgatctttttatttatcagagactatctaccaagtaccaacactatttggtttcctatttcccaagttatattttatgcatcagttatcactactaactaacgactatccttcttcttagacgttttattccacgtaattaaagcgatttattgatttccaaaaaaaaaaaaaaaagtgaagagaatttttaataaatgctaaataaaatggatattttaaaacgcaacgaaagaaaaccatatgttacagatctttttttttggattactgattcatatatatgtggatgatttataatgtctataaaaatctagagttgcgaattatctaggcatgaccaaaatctaactgtaactgtatttcggaccgtaatcggaccgtttattaaccgtaacccaaccgtaaccgtataaaacggttaataaccgtaactgttaaccgtgaaaatagattcattacggttaaaaaaatataataaccgtaaccgtatcaaaaccgttggttaaccgtacgtttaaccgcgcggttaaccgtattattaaaaccttaaaaatatagttgtaactgtgtataattctaaataaataattattttactaaaatagtaacttaaatcgtttaatatgcccactaatacgatcgaagttactccactactctttttaccataaatcaaatcataagtagttcatattattattatttatactctaaaaactgtttcttagtgctcataacatcttttctttattattgtttttgtttgaaaaatataattaattaaatcattataattataaccattaatttgtatattcattggtttatttaaaaaaaatagatagctgattcgctataaatatttgaaacacataatcacgtaaaataattattatttgatatatcactatttatttatttattttattataaagattaatataatattttgtctcatatattaattatatcataattatcaaataaccgtaaccgtatctaaccataaccgtatttaaccgtaaccgttttaaccgtatatataacggttaatgttaaggttaaaaaaagttataatcatatacggtggttaataaaccgtaaccgtaataaccgtaaccgtggtcatgcctaaaactatctggataggtttcgatgataacagtgatataagctaaatcatgaaatataagtaactgaatatattactatgtaataagttttttgctattcaaaatttctatgattaaaaaaacttagctaatgtagtttggtagtcaaatcgtatactaaaccatcattagctggttatcaatagcattttaaagaaagttaattaaaccggctgaattggcctggttgacacgaacaaaatgaatgctagaaattagagaaattttgttagtacaaggatgattatgtaaatgaaggataataaaggggtcaattttaacatttattaaaagtcatggacacaccggtctaacgggtgcgtcggtcggcgagaattacgctgtaaaaaataaaataaaataaacatgtaatgaaagaaaaaaaaagaacatgaggaataatcatacgaggcgaagcgcaccggaggaaccataagtcgataaacccaaagcttagatgaacggtgagttgacttctttccgattttgacccaatcatctatcgccacgtcatagggtactgcgtcctctgcaatccataccctgaaccggcaccttctctgtctctcccccaaatcgaaaacctaattcgatcgtcgtctccgacctacatctgccggaaaatatcttttgaccagtaagattgttttattccttacaccattatttcgggtttttaattttcgattttggattgatcgattaagccacttagactagtccctgcgaaagaatgagactgagaagttggacatctcgatacttttggaaaccccgatttgttgatgactcttgaatctatgggacggtgaatcccaaagaatggttccattttaagtttgttttgtattgttggtggaggctggatgattttgagagcacttgtacttgagctttgttctcatatcttgaattagacagtggaatagaaaagatgacaactttgtattagtaagatgatgaacacttgtagctcttcttgctagatatttgattagtggaattgctgttttccctttttttgagttgcagtggatttcaggattgataatggagtagctgctgggatgatgatg

SEQ ID NO: 14469 - DNA, 3000 bp, Unknown
  misc_feature (1)..( 3000): cDNA_ID_3017355_gDNA_ID_2684121_Annot_ID_190974 3000 nt of promoter + ATG
agaactgaatccccatgcccgttgataattggtatgttatgcatttgatcgcactagattttttgatcaacttgatctttttattcttattaaattttgacggacctagctagctttattttatgccagtgcgaaagatactaatattgaaaattgggtggtgagccaacatagcacaagtggcaaaaggcaaactactgaactatacattaaaattttgtgtatactaaaaatgtcttctcttctattaaatctaacaaagaaagggaaaaatagttaaggttacgtacttatcaataatcaatctatcattcgatgttagaaagcgaccaacgtcataagttgacattacctgaaaaaagaattacagtggaaatcttctacttcgacgacgcgcgttaacatttgtatatatatattaacaattgtaactttattaaagatttctttactttactgcgattgaatattatgatgacttctttttatttattctttgtgcaaacgattgacgaaagaacctttctatagtataaaagaagtactaaaaggtacacctgttctctaaacaataaacatgacatgatatatgaatatacttctgattaacagcgaacatggactaaaataaaatactcctctctttttctgtcgacagatatttttttatctacatatcgttaaatacttgaattagtatataagacaatccgatgttttttttttagacaactaatattgtaattgatttggaccgtttcagccatatcccgtgttattaatacagtatgcaaaccattttggagcgtacgatcttgatccgtttttttttatttattagaccttcgtataccctataaaaatttgaaattgagtatctaaactgagtttttaaatcatatacactgtacatttgattcaatttagacaaactagttacgtgccaacacgaaaagtaaactagatataaatatataatccctacaccgcgcgcataggtaatggaaaaactaatcacactaagaaatgtaaagaagggtttaaaaagtaaaaaagatgtccacagcaaataggggaacaagcacattgctacaagatacgtaaggtaggctttgtatattgttgaagattccacgtatggagctaaggaatcttgaaagagaatccgaatcttagaaagaaaaatagacggtcaggattcttcatatctctccactttaagaatctgttttaaggagaataacatgtaacgacaagagaaagtggatcattcgtgacataagcgcccataatttgatgtttactttaatgccccgggtaacacatactttgttgttctcgaagtatttgatatttcattgaatcctcttaattggagtacataagttctcacttctcagcaacgatgaaataaaaaaaaatgacaaaagagagttctaaaccacactaatctctaaattgtatctcaagagatcactatatgaataagccagctttgataaaagtttttaagtgttgatcgaaaatactgactaacgcttagatgattaatttatgtaaagatgatacaattattgtttttctatggtgtttaaatatttgtggtcttctgctatttgcaaatatttaattaattttcatgtgtattaaagaattgttatatctctgccgacagacgctcctatactatgggagatccaaagcaaattttaaactaatatgtggtctattaatttaaaacaaaatggcttaggtttaggatgatcctcggtattatatgcaaaatgcttaaattaaatataaacgaaagtaaacaaaaaagagtgacatatataagcagtaaacaaaaagagtattttaatgggaaaaaaacatatacaactattgtcattaagctcacgacagcatagcaaaatatatatagtcgaagattactgtatcaatggcaacaaattatatatgaattatcttaatcttaccgattactagtcaaaacactttgaatgtctccacattacccattttttttctatacttcccaaacctacctctgaatctgataatacagtaactacatgagtaataaaaagtctaaaaaagagaagagaaatgagtttatttccatatttttgtcgctttaaaaggttttgtttgataagggaaagtcggcatgagaaagaggagaaagtgacagctctctgataaaaagagggaatgaaggagaagaatttacgtcagattacgcaattttatgtcttccccaaatctaactgttgtccacgtgtcattttcctcttcactgtagatttaacttatcctcctttgtcatccttttcattatctgtattttttgttctttctttttctgttttgcttaaccttttctatatcctttttaaaataataataaaatctctatcaattcaatatttttttttgcagtaatattatttactgagagtcacctttaaagaataaaagatataaaaaaaatccaataataaaaaggtaattgtactttacttttcacattacgtcatccgtggtagtggggtcgattaggacgcatcattttttttttacggctcagtgactcacacacacacgccaaaagcagagtttattaaaaacagagtaaattcgctattccaatcaaaaggtgaaagaaaaaaaaactcaagagtctctcctccattaatggaaggaaccgtttctctttctatgtgctgattgctgatgtagctcccacgagctcaagagtaagcttctaccgcaatttcctctaactgaaaccaaatcggctctttactaattttacaataaagtttcctcttttatctttcctctctggctaattaaactttctcttcctcaataccccattcaagtttcaactcttctacactgtgtcttacagcttcatgctccaggtttaggtctaaaactcataatctggttctctttttttcggtggggtttgtttacttttgctactagata

SEQ ID NO: 14470 - DNA, 3000 bp, Unknown
  misc_feature (1)..( 3000): cDNA_ID_3017359_gDNA_ID_2684121_Annot_ID_190973 3000 nt of promoter + ATG
aaatacagataatgaaaaggatgacaaaggaggataagttaaatctacagtgaagaggaaaatgacacgtggacaacagttagatttggggaagacataaaattgcgtaatctgacgtaaattcttctccttcattccctctttttatcagagagctgtcactttctcctctttctcatgccgactttcccttatcaaacaaaaccttttaaagcgacaaaaatatggaaataaactcatttctcttctcttttttagactttttattactcatgtagttactgtattatcagattcagaggtaggtttgggaagtatagaaaaaaaatgggtaatgtggagacattcaaagtgttttgactagtaatcggtaagattaagataattcatatataatttgttgccattgatacagtaatcttcgactatatatattttgctatgctgtcgtgagcttaatgacaatagttgtatatgtttttttcccattaaaatactctttttgtttactgcttatatatgtcactcttttttgtttactttcgtttatatttaatttaagcattttgcatataataccgaggatcatcctaaacctaagccattttgttttaaattaatagaccacatattagtttaaaatttgctttggatctcccatagtataggagcgtctgtcggcagagatataacaattctttaatacacatgaaaattaattaaatatttgcaaatagcagaagaccacaaatatttaaacaccatagaaaaacaataattgtatcatctttacataaattaatcatctaagcgttagtcagtattttcgatcaacacttaaaaacttttatcaaagctggcttattcatatagtgatctcttgagatacaatttagagattagtgtggtttagaactctcttttgtcatttttttttatttcatcgttgctgagaagtgagaacttatgtactccaattaagaggattcaatgaaatatcaaatacttcgagaacaacaaagtatgtgttacccggggcattaaagtaaacatcaaattatgggcgcttatgtcacgaatgatccactttctcttgtcgttacatgttattctccttaaaacagattcttaaagtggagagatatgaagaatcctgaccgtctatttttctttctaagattcggattctctttcaagattccttagctccatacgtggaatcttcaacaatatacaaagcctaccttacgtatcttgtagcaatgtgcttgttcccctatttgctgtggacatcttttttactttttaaacccttctttacatttcttagtgtgattagtttttccattacctatgcgcgcggtgtagggattatatatttatatctagtttacttttcgtgttggcacgtaactagtttgtctaaattgaatcaaatgtacagtgtatatgatttaaaaactcagtttagatactcaatttcaaatttttatagggtatacgaaggtctaataaataaaaaaaaacggatcaagatcgtacgctccaaaatggtttgcatactgtattaataacacgggatatggctgaaacggtccaaatcaattacaatattagttgtctaaaaaaaaaacatcggattgtcttatatactaattcaagtatttaacgatatgtagataaaaaaatatctgtcgacagaaaaagagaggagtattttattttagtccatgttcgctgttaatcagaagtatattcatatatcatgtcatgtttattgtttagagaacaggtgtaccttttagtacttcttttatactatagaaaggttctttcgtcaatcgtttgcacaaagaataaataaaaagaagtcatcataatattcaatcgcagtaaagtaaagaaatctttaataaagttacaattgttaatatatatatacaaatgttaacgcgcgtcgtcgaagtagaagatttccactgtaattcttttttcaggtaatgtcaacttatgacgttggtcgctttctaacatcgaatgatagattgattattgataagtacgtaaccttaactatttttccctttctttgttagatttaatagaagagaagacatttttagtatacacaaaattttaatgtatagttcagtagtttgccttttgccacttgtgctatgttggctcaccacccaattttcaatattagtatctttcgcactggcataaaataaagctagctaggtccgtcaaaatttaataagaataaaaagatcaagttgatcaaaaaatctagtgcgatcaaatgcataacataccaattatcaacgggcatggggattcagttcttttagcgatattaattatatgttgctggcgaaatcgttcgctgtagtctttttaagctttggaccatccatcttagataaaccaaaacaggcctaaacatacaagccgaaatatggatccttaaggcccattatgtgaaattaagaagaattcaacaaatatagtttttttttccctttatttcttaaaatttatctattggatgatcaacaacaaagtcaaacaatattgttgtcgatttcatttcagcttgttcgtaacaaatacaagtttcttgataaagtgtaacaaattgactaattgaaatgtcaacctaaattaaaaagagaaacttttgcgaaacacagaaaaagagaaagagagaaaaggcaggcagggataaatcaacggactttccctgggaagaaaaaatgttcaccggagaagaatgtcctccatgatcttcttctacaggttctctctatgtctgtccgcattgagtatcgcattcaccattttatgtatttcattgctcatcaaaggatgttagatttatccatgtatttgaggaaccgatttctgttgaacgggatcgaatgattcatgtttgtagattactatgtcatcaagttttcaaatttcaaaccttttctatctgggattattgagatg

SEQ ID NO: 14471 - DNA, 3000 bp, Unknown
  misc_feature (1)..( 3000): cDNA_ID_3017301_gDNA_ID_2684121_Annot_ID_190991 3000 nt of promoter + ATG
ttaattgatttataaatacataatatattgatgtgttcgtgtctgacggtgccacaaaacaataagaatataatatccaataactcgtgaataatgccgtaagcgtaaatgatgtaagttatcaaaccatacatcaacgtgacaacgtccatgggttcttataagttacaagttttgcatattcgacttttatttagttttctttctccacgtttaacgttttagaccacaaaaccaaattgatttttcttatagatttctgatattattgtgttttttttctttccttttgatgaaagaagttttggatgaacaaaagtgaaatgttttatgtctgtatatatatattgacccctaatttggtaatactactaggtatagccattcattttattgtatccaatgtcattaaggaatcttgaactaatttttttcccttttatatcgtaaacctttatgcactctcttttacaaatacgtgttattcacttatagtatttggcatttaatgaataacttcgacctataagcaaaagctattgaaacgtttctttggtgttagataattttggattcaaacatgtcccgtacctatcatgttttaataagtgcggatcagatccgaacgaaatatttagagtagttgagttgatatgaatgcatattattgcagtggtctagaagaaaatgggagtagattagtattgactaagagcctttagttaattgtttaatgctttgcatgcttcaattaagaaagcccattcagtttagacataacattatgtctacttggttttgtttaaacaattacttagtttgaaaacttcaaagttctttatgacatactccctccatttctatgtaaatattaaatgtatttaataatttttgatcaatcatataatacattatactccctctgttcctttttgtttgattgtttagaaaaaatacacatattaagaaaacatattaaatgttgattataaatgtattattttcagtgttttacaattttctatacctctaaaccaatgataattaactatttttcttgaaaaattacaattcaccaatactaaccaataaatattacatggaaaacttcaaaaatcaatcttttagaaacaaattttttttctaaacaatcaaacaaaaaggaatagagggagtagtttttattggttgcattcattctatttaatgatatttttataaaaaaagagaaaaattatatatttttttaatctgtttgtaacaactttaaacatcacttaaaaagaaacggaaggaatatatgagagttagtgagatttaggcatgtgcttgcttcatcattgggcttattaatttataaagtttaaatttatcaagcataatataatatgaagtcagctttgccgccacagttgatgcatggcctctaattattggagcattgtacgtgatataggtgttaatggagatggtttgtaggtctttatcaatacggaatctttatcttaccaagtcatttctaagtgttgcatctatgtataaactaatattggagacttcaacaaaaagtagtatatatatacatggtttgcacattgtgctatatatatgtttagatatataactcaaaaacacctttattgcttaacagtctttggtcggaggggggtttggtgaggaagacaatgaaaattattattattaagagaaaagggaatctttctggtttcaacacaaactaatctcccaaaaaaaataaaaaataaagctagcaatatttagaagacctaaaagagttaattagtgactttaatgtgaaactttttcataaaaaatgaatgcagcgatttgttggaggccaggattgcaaattgtttttaaacttcgaaagcaacaaagataaaacatcttagaaccctaaagtaaatccttgacgttagagaaacaagcttacttaaaatctaacttggagatgaaaataaagatttactgatttatgtaggaatacgaaaccctaatttcttgatttaaatcaaaatggaagataaatgtgcatcaaaactctgttttgtgtgtaagattcttcttacaggtttcatcttccatgggatataaaagaatttgtgaacgtcaatgtagcaaatgaattcacatcaagtagtatttccattgatgtctcaggacgtcctttcaatatctcatctcttactacatcaagaagattttctggaagctgcacaacaccattcaatatctgcataaccacactcatatccggtcttattgactcagattgatgtgaacacaacacacctagcttcaaaaccagctcaatctctcccctgttttgttcttgacgtatacattcctctgccgcatcgaaaatgttcccatttacccaaagctctaagatccaatccactagaacttcttcattttccgcttcacgtcgctcaatcaaccttctaccacaaacaacttcaagcataaccaacccaaaggcgaaaacatctgtgcttgtagttgctcttgttgaaagttaaacttgattttgaatcaagtttaattattggatcaattatccaataattaattatggccaaatccaagttctagagttttctctagaaatatcatcatttccacctccttaaaggattctagaaattttctagaatcatcttccacctccttaaacataaaaatctagatactctaatagaataatctagataatttgaataatgtaatctagatcttatgtaagaactctctagacttaagattaaaatattttagatattttgtagtttggaggctataaatacctcctccccctctcaaatgttgtaatgttgtgaagttgtattcaagtttaaagcaaagtaataaaagttctatttcctaaaaaactctctcaaaacacttaaacactttctccattacctctaaaagaattttactctaacaaagtggtatcagagcttgaagatcctaaag

SEQ ID NO: 14472 - DNA, 3000 bp, Unknown
  misc_feature (1)..( 3000): cDNA_ID_3017315_gDNA_ID_2684121_Annot_ID_190987 3000 nt of promoter + ATG
aatttgtgtatccagatttctgtaactatataccattaacaaaaatctacaaacagatccgatatttaaaagttataaagatataatactttattcgaaagaaaaaaaaaaagttctaatacttatgttcaataattatatcatgatatcttggagatatagacttcgttgtggttcctttttcccaactagttaagtatattttttttgctaaacttggtaaatattataaaatgaaagttaaggtatgacataagcattacctagagctagggagagtcaccttggtaaaaaagaaaattaaaataaacaaggctacaataaatttacacttgtgaaaaattgctaactaagtaatttaagtgactaaatgtagaagaaaataatcatagttaatagaggacgtgaccatatttctcacgaatgcattcaaatgtacggaatgcactaaacaaaatgatgcttgcatgattacatatttacatctattgtcaggataaatatttgttaattgtatttatttattatatttttaattacgaatgtacaaactttttagtatatgtttcaacaattcaatggttttttgttgttgtttaaatcgtagtacattcaaaagtcaacaataaaatttaaagtgtattattgacgttctgctatattacaattacaaaaccacaccttttctttttgttgaagttatatttgaactcgtcatatggctgctgactgctgaatttttctatttccaccagttaattcatatgtcccatgtatctgtagttgatcgtataaaaagacacacgcacgcgactgaggtggcgtgtcagcagtatatgaagaagaaggaatgttgggaaggagacttgtcagttgtcactttgggttaattgttttattttttcaatcttcttgcttgaattgtattccaagctcatatcatttcattatttttcttacttcctttctaacatccacaccgtgatttctcttctttatattactgataaaactctaaaatatcaattacacttttatatgaaaacatcaatgtcaagctggttgagttttagttttgtaaatatatgtttagtactcatctttgggctaccagataatgacacaacttttcaatcctaattagtataactctattttcaaaaatttaaatagtacttaaaacaattataccccgcttaaacagaatttaactctattttcataaaaaattagaatttaattccagtacatatttcaaatatagttgatcactagttaacattttacataataatcttttacgtattttgaagatgtataatttcagcaggtttgaagtctttcactcataaaccctacttttcttttaaaaagtattatttcttaaatgcataattagttatgcgttaaaatactaaatttaaaattctggtactattattttaaaattttcgtaagtaaagcttgtgaatataaccgttgtcgagtgaaaataatttgatttttttaatgaaaaaaaaaaaaaaaaaaaaaaaagagggggacaaaattttgacttaactgacataagagatctagaaggtgaaaccacgcgcgtgtggtagtcagaaacgaccaaagaatcaacctcgtccttgataataaaattcttgagattggtcacaccaaaacaaaaaaaaaacgttttatcattgcttcttcaatagtatcaactgacgtaatcatgataagtctacgacaatatccctccaccaaacctaaccgttttggttcaacatttaacaattatgatgagtttaatttttttattggagactgttaccactcttagctttcattatctataacctaagtctggttaattcatgattatgtcaacagtttctttggtcgaattttgatatcgagtttggtttctaggttttagtttccttaaatgtttgtctttacaatgaagtaaagttaaaacaacattgagtgagaaagtggccaactaattctctctgtaccatcaatccaaaattaaattgatttgatttgattaatcaaaaaggtggtcagagaaaaacaaaagaaaaaaaggttttaaatttcttcccgtaccagctagacccagaatcaaagtagcatacttttgctacatattcaaagtaatttaacccccaaaaaccaaaaagaatgtgttagaaaagcaacaagaagaagaagaaagcaaattaatagacaaataatctttcttctctggttgcttctttttatttctttctctggaacagcttttctctgttactttacttctttgagaaactccataatcaaagaggtaagtgattcatgttgcttgtgattatcccaatggttttgttcttttaggttttcggaaataaataattattcttaattaccgagttgtgtataatttgtttttgttagtttctctgatctatcccttgtctaagttatcttttagggtagtttgttttcagggaacaatttttatcagtataatatagggaaaattttccaaacaaaatcgataataatactaatatctgcataaatacaattctagccagtatgtgttatgatcagtttacctaattgggttagaaagatggagttcgatttaagatatcttaaaagttcaaaaaaaaactttcctttttcatgaaaagctcaacaacttcaaaatctttgttttctggctgtttcctcttgtcttcgattgttcttgttctttggatttttttgttttaactttttttttgtctgaaactgctgtttcaatttggaatatgttgcaggagtttttgaggttgaagctgttcctccttggtaaaacagagcaattatgctaacttgcgccgtcttttcaaatcttgaccatcatcaaaatcatcagtaagctataaccatctgtttataaccatttgcttgaatcaagaaaaaaagtttatcttctgtttcttgttatgaacagttgaaaggaatgttcaagaa

SEQ ID NO: 14473 - DNA, 3000 bp, Unknown
  misc_feature (1)..( 3000): cDNA_ID_3017325_gDNA_ID_2684121_Annot_ID_190984 3000 nt of promoter + ATG
ccctctgcctcatattcccatgagagtctaaacaactttaaggtgaaataagtttcctaaagcagtaaatgatatttaaccttagcaggaagttcatctgtgggaaaattgaactcttcaccccacattggatttctcgagccagggaccatagaactgtaacaagcacagagctactacattaacattagaccatcaaatgtgtaagcactcaacaaccaaaccaccaattatatgttttcactttttttagatggatagaggttgttgttggtaagaagctaaaagacagcggaaaagagcaggaaagaaacatgacatcgaaaaagttgctcacatgttcctttgaaaagttataacactaattgaaaaggatatgtaacaacctgaatcgcttttctgatccacaattaacaatagcataaggatctgatgttccatttaagttagcaccaattagattcttagcagccaagagttccacctggaagaagatcctcacattgatgcaatgttagtatcctatctatgcacagatgaatcataagaatcaggagaagcatttaccttgactatataagcagcattagtttgagtgtctcctctcaagtgtcctatctacaaaaataagtgcagaaactgcaagtcaaaaaatttggaaaattacccaattagagaaggggaaagctaaaattcattaagaacccacgagatttctccggctaagtaaactgagaaaccgatcaatttagagaaatgaagaagatgatataaaaaccttgtctttgtcaaaggcgtcaccggaatcgagattctgcatgagacgagaccgatcaaatccaacaccgacgacatcgtcatctccgcctcctctgtaagcgaatagccaataggaagcgattaaaaacacagaagcgaccaccgcgacctcaatctcccacgccgacggtaatagaacttccaccgctgactgtaccatctcgatcaacggagttaaaaagtttaaatttttcgaaacgaaaagcgcgatcaagaggattgtctagggatttatcctatggaggatcacaacacagagaatcaacattattctggagagaagaaacttcgccttctttagaagaagaacaagtgagtcaaaaaaggacaatcgctgagaaagaaaggattttggaaagaaaagtagaaactgagaaattagttgtaaggacggagttacggaaatacccttggaactgtaaacagttactggctgtgggactcgaggactgtgaggagaattcgagggtagttctggtaattaagaaacttcgaacgtaaatagtaaccgtagaaaagtcgtacgaagactttttataaactgaaaaatgaaaaatcttgtcgtgatgtatattaaccaaattttcttactggttgaataaaaagggaggccaaaaacaaaaatcgaactagtcaaattgaaccaaaccacactaattacgttaagtttggtttaaaatttcaataaaaactggtatatgactcaaatccgtgaatcaaattagagtttcttacttttctattgactcaatggtttttatttgttttacttagaacaaatttgtaaaactatattaaaaaacattaaacaaaagaaacaagtgtaaatatataccttagatcatttaattaaaagctctatttatagaaatgtatattcatattattttttttgcatatctaattaacaattaaaaaatccaaggatacaatagatttgatttctaaaacctagtaaaccggataatgatccataataagattaattcagttaatttatcggttcggtcttaataaagtggttttaattgtagaaaaggcgaatggaaagaggccacgtggaaaacaaaggagacagatagagagggaaggacccgttttaggttttttgattgaggtataaatagatttcgatcagtagacgtttttttaagttgcctttacacattctcttttgctcctcctccttctctcttactctcttctcgccgcaaaacctcacttgctctctctttctctctggtatatctcattatctctctatcttctgtgttgttgtatatatgtatagctctaacttcgattctttacgagctcaatttctttgtttagatggttccaaatgttttacctttttactttttttaatacctttttgtctttgttgctgccatgtgagctcaagctctgttcttgttagtgggttaaattcctttcttttatggatattctgattctttgagcataattgttgagaattgaagtcagttttgtctcggttactcaaaagtttcgagctttgtatattgctagtgatagaggcagcttcaaatccgaacaataggaatacttagagtggactttgattgtggtgcccctgagatttactctgtttatttggttgcaaatattgtacctttgcttttacctgccatgtgagctccaactccgttctttgtcgtttgctagcttcccttttttaaatagttttcagattccttgagtataattgttctgaattgaagtagggtttttcttggctgctcaaactttgtagattgctactttgctagtgatagaggcaacttcaaatccgaacaaaaaagatacttagattgtgcttctcctgagattactttaaagattttactttggctatgaacaaaagcctatagctttgtcttttatagtctaatttaagtaatgaaatcccagattcttagttaatttagagaggaaaatgggtagtttgaaaggaaagtgatgagatttcaagaattctactaagattttatattgcttgatgcattctactttcaacctgaatgttagtagcagaggtactgacagtcttttatccgcaggatctttatcggggagcattacccgcgttttaacttacggtttccaatgtgaactaagagtgtgttatcagttgtgatgactgtggctgaaccacac

SEQ ID NO: 14474 - DNA, 3000 bp, Unknown
  misc_feature (1)..( 3000): cDNA_ID_3017331_gDNA_ID_2684121_Annot_ID_190982 3000 nt of promoter + ATG
agtctgaaaaaaatgagaaattattgcagttttggtgaacataccaccaaagtcatcagccaatcccattccatctgagctcaatctcttggtctctgtaacaaaaaccgcagcaatatatgaatgatatgctcaaagcaaagacagagttatggagttaataatgttacaagtacattagtctcttaccgatataagaaaagaggttgtgacatgccatatatgaagctatatcatctgtgctctcgaccttcttacgctttcttctcttctttgctgctctttttttgtaacacggattagagaaaggcaatgactttatcccctcaccacaactttccaacacagatggatcaatattagcttcaagcttttcttgatcatataactcaagctctttcggatattctaatgcccgagactctaactctctaattcttaactcaacccacttggaccgccacatcagtggcctgataaatctcctccagtggttagttagccttttcttcctagaaaaaacacacggaagagaaaactaattacagaacagcaagaacagtagaaaagaaagaacacgagaaggatttaggcagaaaacacacctaaaatgaaaaatgctgctaaaagaatcataagcaggacctagatcggtttcatcccaataatgagattcgacctcagcttctccggttagtccatcaagcaacatttcagcattctcagatgcagtgtcggaaaatgagcttgagtattcagtagcgttcgggtcctcatcagtggtggaagtcttgttttcatcagattcaactatatcaacatccaattcctcaccaccagaaactgaagtaacagtttcctcacttgtattagcactggtaagaccacattctttatgttctcctccaggactttgctctttctttggcgataacctctcaacatcgaattgcttactttcttcgttgagctccatgtgtggttcagccacagtcatcacaactgataacacactcttagttcacattggaaaccgtaagttaaaacgcgggtaatgctccccgataaagatcctgcggataaaagactgtcagtacctctgctactaacattcaggttgaaagtagaatgcatcaagcaatataaaatcttagtagaattcttgaaatctcatcactttcctttcaaactacccattttcctctctaaattaactaagaatctgggatttcattacttaaattagactataaaagacaaagctataggcttttgttcatagccaaagtaaaatctttaaagtaatctcaggagaagcacaatctaagtatcttttttgttcggatttgaagttgcctctatcactagcaaagtagcaatctacaaagtttgagcagccaagaaaaaccctacttcaattcagaacaattatactcaaggaatctgaaaactatttaaaaaagggaagctagcaaacgacaaagaacggagttggagctcacatggcaggtaaaagcaaaggtacaatatttgcaaccaaataaacagagtaaatctcaggggcaccacaatcaaagtccactctaagtattcctattgttcggatttgaagctgcctctatcactagcaatatacaaagctcgaaacttttgagtaaccgagacaaaactgacttcaattctcaacaattatgctcaaagaatcagaatatccataaaagaaaggaatttaacccactaacaagaacagagcttgagctcacatggcagcaacaaagacaaaaaggtattaaaaaaagtaaaaaggtaaaacatttggaaccatctaaacaaagaaattgagctcgtaaagaatcgaagttagagctatacatatatacaacaacacagaagatagagagataatgagatataccagagagaaagagagagcaagtgaggttttgcggcgagaagagagtaagagagaaggaggaggagcaaaagagaatgtgtaaaggcaacttaaaaaaacgtctactgatcgaaatctatttatacctcaatcaaaaaacctaaaacgggtccttccctctctatctgtctcctttgttttccacgtggcctctttccattcgccttttctacaattaaaaccactttattaagaccgaaccgataaattaactgaattaatcttattatggatcattatccggtttactaggttttagaaatcaaatctattgtatccttggattttttaattgttaattagatatgcaaaaaaaataatatgaatatacatttctataaatagagcttttaattaaatgatctaaggtatatatttacacttgtttcttttgtttaatgttttttaatatagttttacaaatttgttctaagtaaaacaaataaaaaccattgagtcaatagaaaagtaagaaactctaatttgattcacggatttgagtcatataccagtttttattgaaattttaaaccaaacttaacgtaattagtgtggtttggttcaatttgactagttcgatttttgtttttggcctccctttttattcaaccagtaagaaaatttggttaatatacatcacgacaagatttttcatttttcagtttataaaaagtcttcgtacgacttttctacggttactatttacgttcgaagtttcttaattaccagaactaccctcgaattctcctcacagtcctcgagtcccacagccagtaactgtttacagttccaagggtatttccgtaactccgtccttacaactaatttctcagtttctacttttctttccaaaatcctttctttctcagcgattgtccttttttgactcacttgttcttcttctaaagaaggcgaagtttcttctctccagaataatgttgattctctgtgttgtgatcctccataggataaatccctagacaatcctcttgatcgcgcttttcgtttcgaaaaatttaaactttttaactccgttgatcgagatg

SEQ ID NO: 14475 - DNA, 3000 bp, Unknown
  misc_feature (1)..( 3000): cDNA_ID_3017335_gDNA_ID_2684121_Annot_ID_190981 3000 nt of promoter + ATG
gtataacgagtactggctaaagattaagcgatcatcaacaagtctacctggtctggtaacccgggcaaatacaaacgcatcttgagatcttatgttgattcaaatgaaatgaagatagtgatcggttttcttactggtttaagtagtttcccttagacccttacccgtgtttttgtttttgtttaagttacttttgccagtagtaaatattgatgctcatcgtcacaagtattgactctgtcgtgtttacgtaaatgaaaagttaccctgaatggctgaatcatattatatagaaaaagtaatcgaaatcgataacaagagcagagcatgtaaagaagaataccgaggagatgacataaggtgttagttagggaaccggaatgagagtttggaagtaagaagaagcaacaacacgagcgtatgcagacttgtctatatcaccaaggctactggaggatgagtgtgacttaagatacgacaatgcaacttctagcatcacttccacttctttaaagaaagtgtcaaaaacaaatgcatcagacaaaccgaaaaatgacggccttttagtttatcgattgaactaagggcaccaaactaacctcgtcaattgcccctgctttaatcttcgattgcatcaaacaccatttcttgaaatgtacacctattgaggaagccaaagagatcattccacactatgtgctttgcaaaatttcacacggaaaagtagaaatcattactttggtttacttaccgactcttatatctataacagatgaaattatctgggaggagatcaaatatcgtttgcagaggccctggcttttgatgtacaatggttgggccttactgagccaatgacccctagatatcttttcagagacctacctcatgattccagctctgcgtcttcctttgaaagtcaaactacttttgtggtaatagcagccagtagtaaatgtaaaccaaggccaaatagacaaacttttttcgtaacttttttgtattgatattaaaaatattctgagatattacagactccagaaacatttcccgtatctcgagtccgacttaacacatatagtaacacctttacttaaactaactggtaaaatggatctttaaaagtgttccactggttttcccactgcagctttgcgaccatctgctcaaataaaaggatccattttaggatctacacaaattaaataattaactggtgtagatcctatatagtttgagcatatactttgaatcttaacaaattgtttcagatccaatttgtaaaagcttgcaagagcacatatccacttagaaatcgacaagcatctatgtatctacatcacataaagcatttgttggaaacatttacaccaccaaagagtgttccaacaaataatgtcctacgactaacctcaaacaacgttttttttgcttgaacaatgctgaattttctgcagtagattctggttttctcgcagatcttcacgcgaaaatcaaacatccttcgatactaaacttcaacatttgaaactagtagcatctcttctggtactctgacgagggagcagacactatgggaatgtaagggcagttccaacctcccagacatattttaataccaaatgaactaagattagaaagggtaagagatgcgtgtacataccagttattactataatagttagtttttataatttcaaaactaaagaatgtaaaaaataagttaaattttttaaaatataaaaatttaaattaaaaccagaaaaatcttattaagaacaattaagtaaaggaacttttttttgtcttatcaattaaaaaatattaacttcttattttcatagaaaaaaaattattacaattaaacccaatacacatgactatatgagttttataagaaagtaatatgaaaaacaattgagtatataactttttagtctaacttttgcacggtaatttttaaattcaaaatcaaaattttaataaatatttaatcaaataaaaattaatatttttaattgataatataagaaacaaactaactattgattaaaaatatttagtaaattaaaaaaattaacttcttaagaaactaactattaatattatgaatagttcatatcttaaaattgtttattctttgcacacaaaaaaaaatgtttattctcttaatttagttttgaaattgaaaaaagctaactattataataattatctagacgaaaaaattgtttaaaaacaatacagtttttagattttctatgcaatattattaattactattgataaactgtaaacttgaagaaaaaataattgactatcattggtttagaattgtagaaaaactgtaaatcacaaaagcatcatatacatttataattaacttttaatatattttttgtatatgtgtgaaaactctaaaagatcgattatttacacaaagagtaaatttaaacataaataaaactgaataattaatattaccccacatgtttataaaaacaataataataaaatactacatcacaagattgttttgtatgtagactctaaaacaaaataaaaattaatttaaaaatattcgggttacgccaggtatattttttaaattttatcaattaaaatataatttaataaatataaaatttatggtttaacataaaaattatttgaaataattaatatgaacttgaattagggttttattttttgagtgacgttaattattaaagaaagaaacaggaatatcataaaaatagtttctagtaacctttaaaaaacgttgtaattcagaaaaacgtgaaaccaaacgggctacaaaatatattaaaacacagagtacaacaggcttttggtttgagcccaaacaagcccatttaaatctatttagtctgtaacataagtcacgtgcacctatcacgtgatcatcttctttcttccttttttcttgtcatctgttacacatcggttagggttttagtttctcttaccgagattcaa

SEQ ID NO: 14476 - DNA, 3000 bp, Unknown
  misc_feature (1)..( 3000): cDNA_ID_2990644_gDNA_ID_2684121_Annot_ID_190980 3000 nt of promoter + ATG
ttgataattacagctaattggaaggctctgttgtttaacttacctcggggaagtttgcgagtttggccgggttaggccgtcccatggcaagaatgtaagattttttgccagctgcagatatgagtgcttgcatatggtgaatcatatgaaggtaaccagctgcatatattgccaggtgacattagacatttaatgaacttatcaatcttgacatcacaaaatcaatcttgacaacacaaatgcagaagaataggaacttaccaacaccaagagtccccaccaaaatacctataatattcgcatccttagctttttccaccaagtaatatctgcaacacataactctgaatgaggacttgaaatgtaattcaacagagataataaagaagatcgaaatgattgacaaagtttcatattgtgatgtataatgtctgcttgaaaaaagtgattataccgtcgcttaagtatccttctttgttgataaaattccgtcaccaaagaatcttcttcagcatcatatctgactaacatcaacaaacgaacataaacaagaagataagctactcatgccttagtcaacccattggatatttgtttaagaaaaatggatcaagaaatttccatggatagagccatatacctatgtcacaaccattgaaggtcagtactacattggcaaaagctgaactgtcagaacctatccagaaaagtaaatagtcctcgattttgcttccttctggcaagtcccaagttagccctcctagtctatagctcctagatgaggataagctatcactagaatcactttcgctatatggtctcggatgctccatggattctctaggatctttggatggactaatgaatgaacacaagacattggctacagataattgagaatcagtcttcgataatcctaattcttctcggatttgtggaattacatgcgcgtattctagaccataaagaatctgaaaacaaagcaaagattgagaaaacagaacatgttcatcaatacctataccataaagataaacttatgaaaacaaagcaaagatagagcgataagcctcacataccatgataggcttatcgctctttgacgcataatctatcaaatgcttaacacagctggagacgtttatcgaagctttcccaaaaacgaagaatgctggaagaactgatgtcctgtgaaaacatagaacctcacaataagacattgtttcaacaagggaatttaaagcaattacatagatgaagaaaagggtttatgactcacgggcttagacatgtttgaccgtaatgaacaacacattcagaatcaatatgcaaagctccaacttcatcaatacagcaactaccataagttgtgtcagccattacaaagaacctgacttctctgtcagtaagcaaacgagttttgctcttaagagcactcacgaccttagtcgaatcttttaacaactcatccgggaactatgaaagaaaaaaactaagctttatcatcaaatattcattgaagtaacaatttgaagctaagaaacaaaatcaaacttcttcattcagaaactggagaaaaggtttggtacctgtaaagcaattctggtgaagcttttgctaataatgaactccgccgtacggttaatctcgtactttgattcaaattccaactccatagattaatcacacgaaattatcaacctttccggccgaataactaaaatcgtcgtattcgtcgacttggatttgcggctgaagaaaaacaaaccagacgtagaagaatgatgcttgatgaaacggcgtcgtttctaagtatagttctcatcactggttttccttatttatcaaaccggtttaagatcctaccaaaaaaaatcaaaactcaaaccggtttttaagtatttattttagcggttatgatgaaacgacatcgtgttgattccttaaaagtgcctgaaacatgaagtgagctcagagtgattcaactgatggatttacagaagataacaaagacgagagaagctccaaaaaccctaagagccatttttcacagttacaacttacaacgcaatgaaagctgaatcaacgaagttactttcagaaaaaataacaacagtgtcccttttttttgaattgaatttaagggaagattcgagcttgagttaacgccagaaatccgatcagtggcaaactacaacagtttcatctaaatcaatcaaactataaccaagtcgaagctcaaaagaacaaacactatgagcgcttgtaagaagcagaggataaaccatagagaagagagatcagatgaaatccacatcgcaaagcttgcaattaacgatgacgttcgacaaagaaattttaaaaaaattaacctttttagtttccgattgcattcaaggatctgggttttgtcgcgacgtcgcacagagaacgatggacgtcgagcactatgtttccgtattgattaaaaccggttcaagtatatatttatcggtctatatttgcaaataaatcacacccacaccggccatcgctggtttccttatttattaaacctggttttcatcggataagacgaaacgacatcgttttaatccaccgccgtcaaaaacaatttcttcggtcaattatacctctaagcttcgaagctccgacttcttcggtctgtttcttattaaacacacaaacaagaaaacgcaaaactaatcctctctcgaattagggtttcgtcaaggtattacattatttcacacccttatcatcatcttctgatttctggtaatcttcttttgattagatcttcctatcgattggttcagtcctttcttattttcgaattcttgattggtttaccgtggttgctacgatttaaacctttaacatacctaaaagaacgtttttgtttttgctttttgttgttattgaagtttttttttttttttattgttgttgatgaagatcctggagttgatgtattgagagaagccattgagataagag

SEQ ID NO: 14477 - DNA, 3000 bp, Unknown
  misc_feature (1)..( 3000): cDNA_ID_3017338_gDNA_ID_2684121_Annot_ID_190979 3000 nt of promoter + ATG
cgtcatttttcggtttgtctgatgcatttgtttttgacactttctttaaagaagtggaagtgatgctagaagttgcattgtcgtatcttaagtcacactcatcctccagtagccttggtgatatagacaagtctgcatacgctcgtgttgttgcttcttcttacttccaaactctcattccggttccctaactaacaccttatgtcatctcctcggtattcttctttacatgctctgctcttgttatcgatttcgattactttttctatataatatgattcagccattcagggtaacttttcatttacgtaaacacgacagagtcaatacttgtgacgatgagcatcaatatttactactggcaaaagtaacttaaacaaaaacaaaaacacgggtaagggtctaagggaaactacttaaaccagtaagaaaaccgatcactatcttcatttcatttgaatcaacataagatctcaagatgcgtttgtatttgcccgggttaccagaccaggtagacttgttgatgatcgcttaatctttagccagtactcgttatacacttttttcctcgacatcttctcgaagaatctactccaaccttccataactcgggtcagcctaacactcttgggtcttcctataaggtacctaatgtaatctcttgcaagacggaacaactcctccccattgatgatgtagaagtactgcaaaaaaaagaaacaatgatcaaagctaaagatactataattcaaagataacttgtgcgggcttgtgatcttgtccttaccagaaagatgaagcctaaggttgctaataccacttgcagagtttcatccccaaaactagcaagaccaccatcttcccctgatgagcctccagacccattattcccaccatttctaccgccaccccctcctcctcgtcctcgtggaggaatgccgccagtgtctttcttttgtatctgctcacgcaacatatcttcaactgatttcttccccattgctttctcaatagcttcccatgttgatgatagctgatgataaaacatcatcactgagcgtattaatatcagacgcactaaagttctgtgccttaacttacaaacacagacaaaaagatcacttttgcaagatttaatattcaaatctcagcaagaacatctatagaatgaagagaaatcatctgatctcataactactatcagatttatcctttcgaccaagtaagtataaaacagaaaagaatcatatcaatactacttataatcagaaacataactcaactctgtgccgaacttcttacacgcacacacacacaaaaagatcaatttggaacatttaaagattaagcatcatctttatatgatctaataagcaaagacatcttagaatgaagacgaagcatctcacctcattactaccgttagacttatccttcccaccaagtaaacacacaacaggaccttgcctctgattccggcagcgatgattctgtagaggcgaaaactgagaagacatcgatgatgatgcagatgcccgaatagctaatttggggagtggtcgataatcaaagcgtaatgacgacataaaaggtgcactagagacatgtcttgtttgcgttgtccttgcacagaacaaggatggtctgcatagattagcctgcgtagagctcatctcttatctcaatggcttctctcaatacatcaactccaggatcttcatcaacaacaataaaaaaaaaaaaaaacttcaataacaacaaaaagcaaaaacaaaaacgttcttttaggtatgttaaaggtttaaatcgtagcaaccacggtaaaccaatcaagaattcgaaaataagaaaggactgaaccaatcgataggaagatctaatcaaaagaagattaccagaaatcagaagatgatgataagggtgtgaaataatgtaataccttgacgaaaccctaattcgagagaggattagttttgcgttttcttgtttgtgtgtttaataagaaacagaccgaagaagtcggagcttcgaagcttagaggtataattgaccgaagaaattgtttttgacggcggtggattaaaacgatgtcgtttcgtcttatccgatgaaaaccaggtttaataaataaggaaaccagcgatggccggtgtgggtgtgatttatttgcaaatatagaccgataaatatatacttgaaccggttttaatcaatacggaaacatagtgctcgacgtccatcgttctctgtgcgacgtcgcgacaaaacccagatccttgaatgcaatcggaaactaaaaaggttaatttttttaaaatttctttgtcgaacgtcatcgttaattgcaagctttgcgatgtggatttcatctgatctctcttctctatggtttatcctctgcttcttacaagcgctcatagtgtttgttcttttgagcttcgacttggttatagtttgattgatttagatgaaactgttgtagtttgccactgatcggatttctggcgttaactcaagctcgaatcttcccttaaattcaattcaaaaaaaagggacactgttgttattttttctgaaagtaacttcgttgattcagctttcattgcgttgtaagttgtaactgtgaaaaatggctcttagggtttttggagcttctctcgtctttgttatcttctgtaaatccatcagttgaatcactctgagctcacttcatgtttcaggcacttttaaggaatcaacacgatgtcgtttcatcataaccgctaaaataaatacttaaaaaccggtttgagttttgattttttttggtaggatcttaaaccggtttgataaataaggaaaaccagtgatgagaactatacttagaaacgacgccgtttcatcaagcatcattcttctacgtctggtttgtttttcttcagccgcaaatccaagtcgacgaatacgacgattttagttattcggccggaaaggttgataatttcgtgtgattaatctatg

SEQ ID NO: 14478 - DNA, 3000 bp, Unknown
  misc_feature (1)..( 3000): cDNA_ID_3017351_gDNA_ID_2684121_Annot_ID_190975 3000 nt of promoter + ATG
gagactatgtcggactctgaaaactgtttcagatgctgaatcaattgacggtacagaatttggatctcgtagtgtagaaatgacaaatctcccacaggctactgtatccgttggaagctttcatacgacatttcttgatactgacgtcaactctactcgaagtaccttttcgaacatctcctctaataaaagaaatgaaatggcaggttctcaaggcactcttcagcaggtatgatgatgcatctaatccattcatttactctaatatattttgatacatgctgctaggtatagagactgagtattgttgtatatcttacataggaaattagcggagcaagaagattagagaagaagaaaagcagtacagagaagaatgtgagcttaaatgttctccaacaatacttctctgggagcttaaaggatgctgcaaaaagccttggtggtgagaaactagtactagtagtgctctttgcttgtttcccttacaagattattcaattgctgatccttggatgtttttctttttgctttctttctgcagtttgtccgactacactaaaaaggatatgtagacaacacggaattatgagatggccatctcgaaagattaacaaagtgaataggtcactaaggaaaatacagacggtgcttgactctgtccagggtgtagaaggaggactgaagtttgactcggtgacaggggaatttgtagcagttggcccttttatacaagaatttgggacccaaaagagtctgtcttctcatgatgaagatgcacttgcaagaagccaaggtgatatggatgaagatgtgtcagtagagcctttggaagttaaatctcatgatggtggcggtgtcaagttggaggaggatgttgaaacaaaccaccaagcgggaccaggtaaaaaataataactacattttaagaccttttttggaggagctataagaatgtgaatatggtctaacaaaagatcattctcattgtgttcaggatccttgaagaagccatggacttggataagcaaacagtctggcttgatctatagtgatgataccgacataggaaaaagaagtgaagaggtaaacaaggataaagaagacctttgtgttcgaaggtgcttgagctctgtagcacttgcaggtgatggaatgaatacaagaatcgagcgaggtaatggaactgtagaaccaaaccactccatatcaagtagcatgtcggattcatcaaatagctcaggagcagttttgctgggaagttcatctgcttccttggaacaaaactggaaccaaataagaactcataacaatagcggtgaaagcggatcaagttcaacactaaccgtaaaagccacttacagagaggacactgtacgtttcaagcttgatccatacgttgttgggtgttctcagctctacagagaagtggctaagcgtttcaagctgcaagaaggtgcctttcagttgaaatacttggatgatgaagaagaatgggtgatgttggtcacagattctgatctccatgaatgcttcgagatattaaatggtatgagaaaacatacagtgaagtttctggtccgtgatataccgaacaccgcaatgggaagttccgcaggcagcaatggttacctcggaacaggcacctaagcatcaatgttattgtgcttaaatatgtacagataatctatgtttggtctgacattagttactcatgtagaaagacaaaaaaaaaaaaaaaaaaagggtgcagtggagttgaagaatgtatataaacatagaaagacacatcacacagatcctatatttttgtctcgaacaagtcgtagaagtaaatctgaatatatcagaaacgcaaggagatagaagctcaaatctgtggactgcagattagacatacatgttttttgttttgtttttgtcatcatcttcatgtttccaacttaatttcttttgaaatattctacttaaattaaagttgtttaaaatagggctattatattccagatttctttttaacagcttctagatttctttttattttataacttttggtataattattcattttggatctaaataagtttatttacgtacatccgatctaaaatagtttattgataaagctttctaattaactcatattttttttattttttttgtcgaaagtgaattttattgattaagagtgacaaaagtcatgatacaattgttcaagaatccaactagggggacaaacattatcagagtaatagttacaatggagacaaccctgtttagcaagtaaatgagctaccctattacactttcgttgagtgtatgaaaaactgatgttttggaatctaattaactcatatatattctttttttttaaacacccatttttttttaccataaatcaattgttccaatattttctttctattcaatttttacatctacagtaattattgtattatgagggggtgatttagttatctattttgaatgatttgagtttttttgtgagttatagatgattttgggtaaatatagtaaaattgataacttatgaattttcctaataacctagaacacttttttttttttttgaatacctagaacactttaaaatcattaaagaccaatcttggaaaaaaaaaatcaataaaagtggatttgaatatactctttcaaattcattagttcaatagcattggatttagcaattcttattataaccaataaccctagattttttattaaaaaaataatctatgataggataacatatgaattatcatcccaaacaaattaatttattgcttgccaaaaaaaaaaggtatattaatattgttactttttcattttattccacctattgttgttattattttgttatatctttatgtaatagtagtatactaacgtaagctataaaattctaatagaaaattcatctatatatatatattcttatgggggtgtaattgtgtaaactcgtccgtaacagataacata

SEQ ID NO: 14479 - DNA, 3000 bp, Unknown
  misc_feature (1)..( 3000): cDNA_ID_1694329_gDNA_ID_2684121_Annot_ID_190971 3000 nt of promoter + ATG
caaagacattgcgtaaatcatctgagaagcctgcaggttgacacatacaggcaataatctttcttcaaaaacaaagggaaaaagaaggcaaaactgtcgaaaataaaataataatcaaagaaagttaccagtaaacaagggctcattgaaattttgatccttccttgactggttattcattctccaaaactttaatttggatgaaggcatcttctttctcttacgtagagtatcactaggatccttaagcctttcacttatgttcctgttcaaactatttgatcagtacggaacagctaatgaaataatcaaagccacatgaagcaacggaaaagttattacttgttggttaatactgtgacaccatcaaagttcttcctcttccttgcccttctttgtggttggggaggaggagatggctgaagcaccagttgaggtgatggatgcacttaacataaagaaaaaagtgttttaaatagataataagagagagaatgtagtggttaagcttcaaattatcagactatgttgctagctcaccaaaatctgcacgttcttcctcagaaccagcagcagaacctggagatcctgagcgaagctcaaacgcagaatgccttccagaatttaacatttcttcatcaatactagggatagtgggttccttctcattcaaagtttcatccaatgactcagtgcgttcaactctgacatcctgttgttgtgcagcaaatgatggatgggacgtggggcttagatcatgtgcagcgtcacgcattctctcaatctcgggaacagttccaggagaagtggcatcgtttctctcggaattgggaatgcgctcttctgtcaagttactttgtctaggatcctggacttcagtgaattcctctgtgacgttacgaggactataggttccagtatcgaaagcaatattggagtctcttggctcattgtctggtcctgtctcatgagccgtttcaacatcaatttctccggtatgcctactcacaggttctgttgattggctgctcaaagcaaaaaaatatgtaacaacattattaaagaagatcaactaaacagataaggaagattaagagcaaggtgtagtaaaggaaatcaaaactctatgaagagcctcactcgacatccatcgggatagattctgagatgatgtcctgtaagaaaggcatacaaactttcattcaataacaagtgctcggagacatgggaaacaagaagtcagaatcaacttcaaagtcataagaagcaagcagtaatctcacctcgtcgaatgttacagcaacataaggatcaatgccagtaggaatttgatctgaaaaataagcatcaacatcataaacacctcaaaatcatggtatgctgcatctagaaccaaggaaaaaaaacacagacaaaaggtacctgtgagagtgatatcttcctcactccgagtatgattatcgaattccctagaattcacaagaaaagaatgttaaagatgagtcaggctttagaacagataaaaactcaaataaaagcaagaaagaagaatacatgtcgagagtgtcatcttccaagtcgaactcgtccagatttagtgcttgaggcaaagtaacagactcaggcggggcctgtctggcatcctcaggcaagttaacttgagtagaaacgaaagccttagctacccaagtattaaggagattccagtcattgtaaagataatccactttctttgaatatattcgcactaccccaactagaaggtgacttgacgttctcaatgccaatggtacttcaggaaacattatattatctgcaaagccaattgcaaaattctcgaaaagtcagaaactttattaaagcagagaatttcaattactacaatgggttatatataaaaaacaaaatcggaatttgatgaatgcccatgtaaaaattcgtattgcctttttgaaatttcgaattggatacaatcaaaggggattcaaaaaaaaaagaagcgaactttggatcaaaaagcgaaaattgaagataggaaagacgaaccaacagtgtcggggatgttgatggaggtgtactgagacttcttgaggcgttggtgcacatgagcggcgcaccacaccgtccccaatggaccctttcgagccaaaagcgtatgtgaataaaacattttaattccttcgaacaaggagccctaaagaagcagagatggagatactgaagttgatttgagagagaaggattatcgaatcgaaggtgttacattatttagagaaaccaatcaattttgaataggaaactgcagagcgaaagagagagagacgaagcggtagggttttgtgtgcttttggagagaggaagaagtgtttttttagtggagcgggaaaaaacattttgtggcgctaatgttgaaatcataggcaaatagacgcaatgacttaaatacccttttcttattggatccgagttttttgaaatttgccaaacaaaacaacttgggccactaaacccaatggccaacttttcggattaatgggcctaaggggtacatttggaaattcgcgtatatgagagtctagggttttcttcatatttaggtttctctatttctttcagacgctgggttcttgcttttgctgtttgttctcttgagtggaagaaagttgcagccactaaatcagatccgacaatggtaaagttttcttcgcctctcagttttattattctcaggaggattattgaagctaaatattatttgtttgattatctgttctcacgactaggattttagtaaagtttgcatgattgagctgaaagtaatcaatctcttattgtgggtttcttgtttggttactgataatctagtagattagagtcttcctcgtaattgacccattggtttaagtttcatcttgaaatgtatgaagtgttcatcatgcagtaacatttgggtcgaagtcttgttgtgtgttctgttttgttttgtattgattgaaaatg

SEQ ID NO: 14480 - DNA, 3000 bp, Unknown
  misc_feature (1)..( 3000): cDNA_ID_3017363_gDNA_ID_2684121_Annot_ID_190972 3000 nt of promoter + ATG
gatttcataaagagacaggaaatttgtatattgcagacgcttactatggtctacttgtggttggtcctgaaggagggattgctacgcctttagctactcatgtggaaggaaagcctatactctttgccaatgaccttgacatccatagaaatggctccatcttcttcactgacaccagcaaaagatatgacagagcgtaagacaactctcttattcttgctttgtatgtcaattcctaccgtaaattgtatgatatagaaattatacttgtattttgtaggaatcatttctttatattactggaaggagaatcaacaggaaggcttctaagatatgacccacctaccaaaacaacacacattgtgctggagggtttggcttttcccaatggaattcaactctctaaagaccaatctttcctcctcttcaccgaaacaaccaattgcaggtatgaccctcaactttgtgtttatatagctgtatctatcattcatttctcttcatcattatgtgtatgacagattggtgaagtactggctggagggtccaaagatgggtgaagtcgaggtggtggcagatctcccgggattcccagacaatgtaagaataaatgaagagggtcagttttgggttgcaattgattgttgcagaacaccggcacaagaggttcttacaaacaacccttggataagaagcatctactttcggttgccaataccgatgaagctgcttgcgaaaacgatggggatgagaatgtacactgtgatatcgagattcgacgaggaaggtaaagtcctggaggtgctcgaggatagacaagggaaggtaatgaagctttggattggaacagtggctcataaccacattgccactctaccttatcctttgacaatgaatcaatgaaggactttgttgtgtagttcctgaactaaatcatctctctgtaacttaattatcttcgttttgattcaagttcctttggaccggtttgtcttttgttgatattatgtgtgaccttagattcctcatgaaattctctttctttctttcttgagtctctttttttttttgtttggttcacgtcctatggaaggcttcataacttgagccatcgcccagtcttcttcgactcccgcgaaatagaaaacaagagtatgcaatgaagaattgccttggaaaacaagagtatgcaatagagaaagtctcgaaagtgttggaaggttgaagataaagagaatacagagaggtaacggaaaaataacgactgctttttctccaaaatgatgacgttacaatcatctccattacgacgttttactcttttttcagtaactttttctgtagtttgtttggcatcacatagcaatgaacattttatgaaatctgtggtgtctgctttcttctcaaagcacaactatccaaaactccaaactgttggggccatatatattactaaccaagttgatagcaaaaaaaaatacaaatccaactcataatttagtcttgaagttataagaaagaaactcaacggaagtctgaatcatagtcattcaaaagacagcagaaagggaaaaaacaaaatcatctaagacaagggtatataaaaccatgatagatcctgatttcataagatcttcaaaggtcttgcacactcaaacctgaaataaacaattggcaaattcaacttagatagagatagacgcatgcgttcatggaccaaccaaaaataacttgtgacctaaacatgccaattaaaagtgtctgaattaaagtagattaaccacaagactattcgaattcaaaaaccaaaatccaacaatattatgacactagaactttcaagtgatgaattactcaaagctaggaacatctatccaatctaacaaatgttatgagataagaggtttcaagtgtgtaatgtttgggctgagtcacagagagagagagagagagatagtgaacctggaggaagagactgcttcaacttatcggccttctcttggtcgaagacacatagtgtgtagaggtaccttgagcacctgaccttgaacttcacaatgtccttgcttctcttgatcttcacagaccttgcatccttccttctcgccgtcaaaaggaagtccttgatctcatggatttgcttcggctgcagattatccaaaccaacatccattttcaatcaatacaaaacaaaacagaacacacaacaagacttcgacccaaatgttactgcatgatgaacacttcatacatttcaagatgaaacttaaaccaatgggtcaattacgaggaagactctaatctactagattatcagtaaccaaacaagaaacccacaataagagattgattactttcagctcaatcatgcaaactttactaaaatcctagtcgtgagaacagataatcaaacaaataatatttagcttcaataatcctcctgagaataataaaactgagaggcgaagaaaactttaccattgtcggatctgatttagtggctgcaactttcttccactcaagagaacaaacagcaaaagcaagaacccagcgtctgaaagaaatagagaaacctaaatatgaagaaaaccctagactctcatatacgcgaatttccaaatgtaccccttaggcccattaatccgaaaagttggccattgggtttagtggcccaagttgttttgtttggcaaatttcaaaaaactcggatccaataagaaaagggtatttaagtcattgcgtctatttgcctatgatttcaacattagcgccacaaaatgttttttcccgctccactaaaaaaacacttcttcctctctccaaaagcacacaaaaccctaccgcttcgtctctctctctttcgctctgcagtttcctattcaaaattgattggtttctctaaataatgtaacaccttcgattcgataatccttctctctcaaatcaacttcagtatctccatctctgcttctttagggctccttgttcgaaggaattaaa

SEQ ID NO: 14481 - DNA, 3000 bp, Unknown
  misc_feature (1)..( 3000): cDNA_ID_3017419_gDNA_ID_2684122_Annot_ID_191006 3000 nt of promoter + ATG
tcaggatgcaaagttatcttgatttcatttttttttgttaattaaagttgggaacttttcctcttaagacatataataagtagataaatgtgagatcacttttagatcacatacacataccaattcatagaaaaaattgtgtctttttagactacaattgaaacagaacttgaactataaacgaaattccatattcctaaaccctaagctcagatcattcgatcttcctctttcttacgagtgctcacgttctctcacattcaggtatttttgagcttctaacgttctaagtatatacagtatagaacttcaagaagacaagaactttgtggaccgaacactggatttgcaatgtaattcttctatcaagaaattatctctgaaatgtcacattggagagaacaagaaaggggagatggcttgtctctgccgctggatatgtaacgcagtagaacgcggtgttttgtaagttggtcatagactcatagtaaagctacgcacacgaagaagaagaagaagaagaagaagaatagatatatatttagtggttgatcctttgcatacatcttcttgatttatgcttcttcagggtttgaatggtggttacacaggcgatgtcttcatgccgctcaaccatgtgaaggtgttgcatatacttggttttcaaggaactagtctagaattgaaacactttaaatggtgcaagtgaatgttgtcgaagcattggtggatgatgacataaaaaaggagctaatgatgcttcttggagcttcggtttcacccaagtgccagatcaaagtcacataaaatgtatcaagagctatagtagtttttattatttatcttttgacctttgtgatttttccccatatagacgatttgacttatctttactaatcatcatattcatatcattggatgaatctcttttggaatccaaaggaaaacgaccaattcttttgacgtttaagttaggaaagtagacagtaaaaaccctattttgacttacctacgggaagtattaatatttagtaagatagtatatatactaaataactgattggcggtgcctagcacattaaagaaccgtatatttgcatcttattgtgttatgttaacttttctttttcgtttttgttttcttcttctattctatgttaattttgattcccaagttgtagagataaggcaattaggacttatatatatactcatcttatgagatagatatacaaactaactttttgcaaagtaaccttttgtctagggttttgtcaaataagaaagggaaaaaacaacttttgtctagtaactttgttaaggagacacgaaaaaaacaaagttttggtggggtggagaaataagaaacaatatgcttcctttgggtgtaatatatagttgtgtgatatttggttctttcgcggccataattatctttcttgtgttctggaattactgtatcgccgccgaccgaatacgagtcacgcccgattctaatgagtagctattatcatgtatccgttgttttttttttatatgttcttcaacgatgaagattttagtatgttgaataatactctatagcatatcaatagttacgccatttagtgatcaatttttttttttagattaatgatattgtaactctattatatattattatttcatattctatcattatgttgtacgttgagatctcggatttttttgtcacatatataaaaattcccaaaattcttactttaatttggaatataactttgttttgtcataaagttaatatcagtgtgtttacacacgcaaaaccgatcgagaaataagtaaacagccaaagattttcatattttttttggtcacgtatcagtatactaaataatttctaaagggatacaaattcattatttctagattaattcaagtatacagtaaaattaattttgagtaagtggatctagaaatgggcctatcaaggttgttttgacttagttggacccacgtaatcctattatttcctaaacagtcaaagtcaaagcgatttcacaccgccgacacttttttgagtttttcttccttttggccttattgctttgtcagctaacgaatattgccacaacatccagttacagtagatactgcggttaacgtacatctcaccgtaggaaattctatctacgagcgcacaccagaacacaaatggtacgcgaagcacagtatcataacctacgaagattggggtaattttttcttatttaaaaaggcgaaatcgagtgagacacgaaatatggggaagtggtccccaccattatttccatttttttatttcttcttcttcttcttctctgtttctctttctgtgtcgaaatgaagatgctttaaatctaacttcttttttttgtttgggcactataaaaccatatccttaccgctaccaaacgcttctcctttaatcatcatcatcatcattttatctccgtcccttcatgttccgttaccgttaacggctgtttttttttaatctccggtgaccgttctttttctgattccaggtgttgccagctgtttttttttttgggagatattttttttaattccttttaaagttagttataagtcagttttgtctgcttggattttcatttataaaacaaggtggaattaggtttcttccgatagagaaaggggcttgattttggacaaaggcacgtgtcttagtcttttattcaagctccgatctataagttatgatttgggtttggttttgagttctccaattttagtctcatctctgtggttgttgtaactgggtttgtgatggaagctagaattgaaggtgaagtagaaggtcacagtttagaatacgggtttagtggtaaaaggagtgtagagtgggatttgaatgattggaaatggaatggtgatctcttcgttgctacacagctgaatcacggctcatccaacagctcttctacgtgctctgatgaaggaaatgttgaaatcatg

SEQ ID NO: 14482 - DNA, 3000 bp, Unknown
  misc_feature (1)..( 3000): cDNA_ID_3017409_gDNA_ID_2684122_Annot_ID_191009 3000 nt of promoter + ATG
ctgcaatgtcttcaactactggaagtaacttgctcttcaagaaagtatcatatgactttccatgcctttgcttcagaagcttgaatagatccgagcttatgatctgttgggaaaactagtgagggagatgtatacaagaattgaaggatggaattggaaatagagtctcttcttggctgcttcttgatcattggctttaattacaaggacgatcttccctcaacaacttctcaataaaacctgcacaactttcaagtcaaaagtcagttttgcaagacgtacgtaagataattggcttgcaaaaaggatggaggagaagaagactggttccttacctttggcaagaaatcatgttgcaccggtgacgaatagcctttcccttgcaagaaaacaaaaactgaaaagtctaacgctaccgagatcgacggtagccattgttagtaccaaacaaagcttttggtctgagaaacaaaaactgaaagtgtgaataatgttgagaaaacagacatgtttattcattggctggactaatctaagcaaaaagcataagcaaaccaaaccaagtcaatgtaattgttagaccaggctcagtaagttggcttgttaaactaatgccagagaaggttttaaatcaggcccatcaaatccacatcttttttttttttgtgtgggcttcgtatcatgtaagacataattgggttaggccgggtcgggtcggatctagtctaactaataatgtaatatgataatttaaaattatctgcaaaaaacaaatttattttttcttcagtagtgaattaagttcttcttcttctgctagaaaccctaatttttggggactgtgcaattagtcgcactctcagattcggccctggagccatcgtcatcgatgaatccgatgaggtcttcttctcgacgagcaagataagcatttttgtcttctgcggttttgactattatccaggtaataagaaacacagtctaaacattgatatcttgaaagtgaaattggaaattaaatatttgattattgcaggaaagatcgcagagaataatggggattgagatcagatatgaacttggcacttgttttaggcacaaatgtagttcgtaaagcttatcgctttctcttcatctccagaaaattctgcaatgggaactttggtggtaatgaaatcgataatggtttccctgatttggattgtggatttgacgaggactccaatatcagtgagctcagaagcatcgatcgagaagtgatctctgttcggagtaggtttttggagagtgccaatcatagtgcgtctcgtgttctcgtgacattgcagctagatgaatctggattcaattcaaagtcagttttagatgaattgaatgttagagtctcagggcttctagtgagggaggttcttgtagggatcttaaggaacttgagctatgataataaggcaagatgtgcgaaactagcttatagattcttcctgtggtctggagaacaagagtgttttaggcacacagtgaattcttatcatttgcttatgaagatatttgcagagtgtggagagtacaaggcaatgtggaggttagttgatgagatggttcaagacggattcccgacaacagcgaggacgtttaatctgttgatttgtagttgtggtgaagcaggtttagcgaaacaagctgttgtgcagttcatgaagtccaagacttttaattaccgacctttcaaacactcttataacgcgattttgaattctttgctaggtgtaaaacagtataaattgattgagtgggtttacaagcagatgttagaagacgggttttcgccagatgttctgacttataacattctcttgtggacaaactataggttagggaaaatggatagattcgacaggctgtttgatgagatggctcgagatgggttctctccggattcttacacatacaacattttgctgcacattttggggaaagggaataaacctctcgctgctcttactacgttgaaccatatgaaggaagtaggaatcgacccgagtgtcctccactacactactttgatagacggtctgagccgtgcagggaatctggaggcgtgcaagtactttctagatgaaatggtgaaagctgggtgcagaccggatgttgtttgttacacagtgatgataacagggtatgttgtatctggagagctcgacaaggcaaaggagatgtttagagagatgacagtgaaagggcaattaccgaatgtattcacatacaactcaatgattcgcgggttgtgtatggcgggagagttcagagaggcgtgttggttgttaaaggaaatggaatctagagggtgtaacccgaatttcgtagtgtatagtacattggtgagctatttaagaaaggcagggaagctttcagaagctcgcaaggtaataagagagatggtgaagaaaggacattatgttcatttagttccaaagatgatgaaatataggagatagacttttgttttgttaatttaggttgtttgttctcttctggaactttaattcttctcttttacaaaagaaaaaaaaagagagaatattagtaggggcttttgacagatgaagaatttctcttcgatatcacaacgactcgtatttagacttttgttctcagatgcagtgcgtataccaaattacaaaaatatagtccgtctgtttctaattagatgtagtttaaagtttttgcacaatatttttttaagtacataaaaattccaaaataatctcatcctccatcttgtattccaatttttgactaaaattgatttaaagcatgaaggggtaaaaatgaagtagtggcaaatcttatctagaagaaggagaataaatttttaaaaaagctcatataaattgccattccaatttccaaagtcgcacaagtcatctagtttattcatatcaaacttggtcagtttgttgttttgttgatgcctcatggagttcaccaactgagaatatg

SEQ ID NO: 14483 - DNA, 3000 bp, Unknown
  misc_feature (1)..( 3000): cDNA_ID_3017401_gDNA_ID_2684122_Annot_ID_191011 3000 nt of promoter + ATG
tagcccaagattctcagcccaattttgtctttgttggtgggccttgtattcacttttatttttattagagtcaaccagatcaacagactacagtcaccactcaccgtatcagaaagtcgagaaatgaaaaacgtagaacaaatcattacacttacgtttatttcatcaattattgtatcgaaagtagacaaaactcaaaagcaaagagatcatcaacatttgtctaaaaagtaaaaacaattgaacatgaagaaaaaaaaaaaactctcgttattgtaactataatcaataatcgattaaaacgccgatcggtaaaataaacagagagctgagaatttgaagcaaacaaaaaaaaaactcatatttgaatttcgaaatcgttcttacaaaggcgtcgttgtgacgttgcttctgtctgcttcaatctcttctcttcttctcataccaattccaagacctgaaacagtcctagccaaattcctctccatctctcccactcccaatctcatctgctcatgacgacgagccagtcttctcaacgcgtttctgattccaagccaatcatcttccacatcatcaccatctgcagcaatcgtagccagatccgataatctgattctcatctcagcctctgagccaccgattcccaccttcgccgtcgtagggagctcaaatctacaaagcggacacgagttatgatccgagagccaagggacgatgcaatcggagtggtatatatgactacacggtaatctccgagcagattctccgatgatgaaatcctctttgcaaacggcgcagagtaaaacggaatctggatctgaatcatcggtggaacagagcaaagaagacgagatctgaatcgtggggatcgaatcgatatctgaagatttcaataacgaagaagaagatgaagacgaggaagaagaagacgatcctgaattatcggaagcgagatgacgaagaagacggtgaaggtaaggactatcgaggaggaaattatcatcggaattaacagctggatcaacgaaacaccaatcttcttcgtcgtcttcatcatcgttttctccgtcttgttcttcaaaatcaccgatggtaacgtcaaagagattagaagaagaagaatcgtgatccatacgttcgaggaaatcgacacggcattggggacataacagaggagaggaatcggaatcggaatcggaggaggagaggagggataaactcatatcgcattcatgacaccagtaagttcgtcgttcaggctcgccgtggacggtggttgttgtggtggtggaagacgacattgagaagtggtggtggtggttgtgagagaaagaaagagaaaatgtgaaagaagaaaaaaaggaaaggagaaacaaaagttagtggttgtggttgagtactagtgataatgggtttatgattggtttcaaagcctttcaaggcccttttttaatatataaaagttaaaatggattaaagttggtttataaagggcctaccattttacttggctttattcggaaggtttggtagtgggtctctctattctttgaagtttattacaagtctttgcacttactaattggactttgctagtgataatattgtttgattataataagtatgcatatgtgtgaatgataactactttgctatacctctattagatcaaaaaaatcacagatttgttcgtttgacaactgcaacaagtaatcaaattatatacaacattttctattgttcgttttctagcggtcgctcttaattaccatattttaaaacgtaatctttttttctatcattgatcatcgtgatattcaaacgaacaacgttggatgtagtcaccaagtaattgccaaacatcgaatctgcgatactatataagttatatacggtacatttgtttattgtaatctcgtatgatgtattctaatctttgatatatgagggcagttgacaaacaaatgtatagcaaagtagtcacatttaaatatctaataacgtgtaaaaacatcaaaagtcgctttggccgagtggttaaggcgtgttcctgctaagtacatggggtttccccgcgagagttcgaatctgtcaggcgacgtatttatttttttagtggcattttaaatgttgatgctgcaacaacgtgccttctcgtgtaagcaagcaataaaataaggaaagtgagaaaatcacaatcataaagatttgagcttttaattgtttgttttcttatctaatgaaagtatgggcgttacaagcgtttagtagtagattccagttgcctgcaaaaaaattacaacttttttaaaagaatctctgacaaattgctatcaagattctatccattaactgatcccttgcaaacaaaattccaaaagtcacccataaaagccataaccaaatctggaaaatgaaaccgacatgaccgcatgatttctcagactatcctgcctctctcattcactctctgatcacttcaatttccaatattttataatactattttttcaaggtaaaagaaaaggtcttatgttcatagaatgactcacataatgacgttggaagaaaggtattagttagggttagtggagagagtgctcaatatgaaacaagtttttctctgtcttctttactccttctttttccctcctttgggggagaaattgttgcttttgaggtttcttatagatcaatctctcatcacaagggctttcatttgaagttgattctgggtatgtgaaagctccttcctttgatttttactccttcatgggtttgaaaatttccccttcctctgttttctaggtctgaaagttcctatttttttcctgatttagggtttgatagctcaattttcatctcttttgtttctgattagctcaattagatcttattgaggagtttgataatttattgctaggggtttcccaggtccagattgattaaaaatcctcactttattccggggaaaatttcgaagcggttgagaaaatg

SEQ ID NO: 14484 - DNA, 3000 bp, Unknown
  misc_feature (1)..( 3000): cDNA_ID_3017452_gDNA_ID_2684122_Annot_ID_191015 3000 nt of promoter + ATG
gtttttggctaatgatgtttcttcacttaggttgggagtgcactttcagatccatatctttcatttgctgctgcattgaatggtttagctgggccactccatggtttggctaatcaggtatttatatccttaatgagtcttatattgttcgaatctacaagtgtatataacttgaactctaagattgactcttaattataagcttaaacttggaatcttactctgttttttttcgttgtcttgttgtaggaagttttgctgtggatcaaattagttgttgaggaatgtggagaaagtatatcaaaggaacagctaaaagattatgtctggaaaacgttaaacagtggcaaggttgacaaaattatgctctgctttgccttttgaaactatccatatgtattgcatgctaatcatgacaggccataacttgaattattgtataaataatgaataaaagcttcggattatgttttgattatggggtttgcctgtgaatgttgtcaggaaacttaaataaacatttgtcttgcaggttgttccaggatatggccatggtgttttgcgtaaaacggatccaagatatatatgccaaagagagtttgccttgaagcatctacctgatgatcctctttttcagctggtaactttttttccccctcaaatctttggtcatgctttaaaattttactggctcacaaattatgcaagtctataggtctcaaaactttatgaagtggtgcctcctattctaaccgagctgggaaaggtactacttatactcattcatttcatgtgctaccagattttctgattttctctggttttatgaatcttgaaattgctgtatcaggtcaagaacccgtggcctaacgttgatgctcatagcggagtgcttctgaactactatggtctaaccgaagcaaggtaggaactacttgtgtatcgaggctttgaccttgttttgctgaatcttggttattatagagtgacattcctttcaaatatagatactacacggtgctttttggcgtctcaagaagtcttggaatctgctcgcaggtacatacatacattcatgccatcgacaattcgattttagtacgtatcgccatatccttcacaataaagtcagactaatcttttattccttttctgtttcagctgatatgggacagggcacttggactgccacttgagagaccaaagagtgtaaacatggactggctcgataacttcacgcgcttgaaccgctaagttaatccctgactgatgttggtcaaggttctctcttttatcacttcagccttctcttccatttgattgggtagcttttagagataaaaaaaaaacgatttttcgtcgaaattttgttctacagagttttcattttggttcttctgcaaaaacaataaagtcaaacaagtaaagaaacagtctttctcagattgagacaccatattattgttcctcaactttgatagacaaatgatgaccattgatatgtattgattagtctttggtgaattatcgcataataaacaatactcatgcaaccagtcccgctcaaacagagtgtttgaagtgaacagaagcagagtcaagaaattcaaagcctcgggatcaaacagaagcttcctcctatcttaagaagctccctacgaagctttatgatgattctacaaaacacatttgctatcttcagtgaacagtaagatgcaacgtgttctcttctaaaccttcagatatttggctaagtataagactcttcgtaatcacaaaaagccagaaatgcgaaattgattttgagtcttcttcctcacaagttttctctaactttcagaggagtcgctggatcctgttaccgagaattattagaaaccgagagcagaggtttctagctaggacaggaaatatattattagaacatatcctagtcttccttgtcatggccagtccagtggtgcaagagaaacatacaattccaactcaagtatgtgatggacttgacttgcttaagccgtacggcatcctcggaaaaccaaaaccatgtcggaaaaaggaacttgacttccttgaggcttacggtttcctgggctcgaacccaactacccaagtcaagtgacagagagtcttgacatagattaggcacctccttactaaagccagacaactatacaagattattggttcaaatattagtcaatcctttcgcgttttctggcttgacccgtctcgtcatgcaagggttggtcacgagtttcttattcttctaaagtttaccaaaattaatcccctttctttatctttgcgtgtgagtgtgaattaaagtattgatttatttaatgatgggtttaacttaaaaagtttaaaattgtgtcatcaaaacccatcaagacgtgtcttgtaactctgtatcacacaaacattcgtgtgtactaataaatgcaaatattttagtcacaccttttcgtaattatttatttatcatttaaataagtgacaaatctgggtccaatctccattagaggcccatttacaacgaattaaagcccatgtctttttgaagtggataaattccatgcccaagttactcacattaaccaacatcgatataaaaggaacattctatttctagtaacccatgagggtcattcctgtaaatagatctgccttccttcctcctctccgtagacggttgttgcacacaaagcgaggttggtttgacccgaacctacccgacccgttactatatatataaacacaaaatgggtaaagcaaaggtgaaaatcttatacgtaggtctatatcatttccatatgaagtggagatatatatatatagctaacgagaccctaaatatttttttctttcttataacatatagtttcatttcatatatttaaaggcttcataatacgaaacaaggtgataagaaaaaaaaaaagaaaaaaaaaaagcaaattaaaaattaaatccctaaaaacaaacgagcgtattgtt

SEQ ID NO: 14485 - DNA, 3000 bp, Unknown
  misc_feature (1)..( 3000): cDNA_ID_3017441_gDNA_ID_2684122_Annot_ID_191020 3000 nt of promoter + ATG
gccctatttcgacattttaaagaacacctaggtcatcattccagaaatggatattataggatttagataatttcccacgtttggtttatttatctattttttgacgttgaccaacataatcgtgcccaaccgtttcacgcaacgaatttatatacgaaatatatatatttttcaaattaagataccacaatcaaaacagctgttgattaacaaagagattttttttttttggttttgagttacaataacgttagaggataaggtttcttgcaacgattaggaaatcgtataaaataaaatatgttataattaagtgttttattttataatgagtattaatataaataaaacctgcaaaaggatagggatattgaataataaagagaaacgaaagagcaattttacttctttataattgaaattatgtgaatgttatgtttacaatgaatgattcatcgttctatatattgaagtaaagaatgagtttattgtgcttgcataatgacgttaacttcacatatacacttattacataacatttatcacatgtgcgtctttttttttttttactttgtaaaatttcctcactttaaagacttttataacaattactagtaaaataaagttgcttggggctacaccctttctccctccaacaactctatttatagataacattatatcaaaatcaaaacatagtccctttcttctataaaggttttttcacaaccaaatttccattataaatcaaaaaataaaaacttaattagtttttacagaagaaaagaaaacaatgagaggtaaatttctaagtttactgttgctcattactttggcctgcattggagtttccgccaagaagcattccacaaggcctagattaagaagaaatgatttcccacaagatttcgtttttggatctgctacttctgcttatcaggtttagttcttattcttttgtccattggttcttttttgtatgtatgttaacatttttcgattttgcagtgtgaaggagctgcacatgaagatggtagaggtccaagtatctgggactccttctctgaaaaattcccaggtttttttcctaattagaaaccccaaaagctttagatctctataaagatttaagcctcaaaatgttggagtttggttcatatatgtgaatctggttttgtcttgtgttcataacaaaaatgggttgatgatgatgaaccttcttgatacttctttctttttcttggtattaaatttaaagataaatatttttgtcattttcattttcagaaaagataatggatggtagtaatgggtccattgcagatgattcttacaatctttacaaggtcttatttgctttcttcacccaaaaaagaaataaagtcaattatacatcaagcattacattttgcttcatgatttttttttggaaaatcaggaagatgtgaatttgctgcatcaaattggcttcgatgcttaccgattttcgatctcatggtcacggattttgcctcgtaagatatcgatattatcggattagatctttgtaacttgtaagcgttgttatatattcttgatgtaactcttctcaattgtttattaggtgggactctaaagggaggaatcaaccaggctggaattgaatattataacaacttgattaatcaacttatatctaaaggtaatgtttctctgtttctcagtctatttgattttaatgcacatagaggaaatcttggtgatgtttaggatattgccaaaacccttgtaatttttttttttttttcttgtaatgttgtaaatgtgtcaggagtgaagccatttgtcacactctttcactgggacttaccagatgcactcgaaaatgcttacggtggcctccttggagatgaatttgtgtaagttcattcataagatctctatatggtaagattacgacactgcgaagatttgttgttgatattttggtaatgaaacaggaacgatttccgagactatgcagaactttgtttccagaagtttggagatagagtgaagcagtggacgacactaaacgagccatatacaatggtacatgaaggttatataacaggtcaaaaggcacctggaagatgttccaatttctataaacctgattgcttaggtggcgatgcagccacggagccttacatcgtcggccataacctcctccttgctcatggagttgccgtaaaagtatatagagaaaagtaccaggtatgtttgttctatttttttatctagagtagaattgtttgtttgtgtttgaacttagatttgatgtgtactctttccaaatgatctcatagtaattttttatcatactaataaaatccttttgtttgtaaaataaaaatgtttacattgtcctttagagtcccttactctgtttttgctttaactctgttttactcttgtttccggtctgctctgttttcgctctgtttcttgtctgctctgtttttactctgcttaccatttgctctgttttactttatttccgctctactctagttctactatgctctgtttatgctctagtatgtttctttaccgtaacagtactgggattggcttgatcaatctcgtatcgaatcttaattttggttaccaaatcctcataaaaggtagactgttgtaaattgtgacaacattttcctcctaatatgatgtccataggcaactcagaaaggtgaaattggtattgccttaaacacagcatggcactacccttattcagattcatatgctgaccggttagctgcgactcgagcgactgccttcaccttcgactacttcatggagccaatcgtgtacggtagatatccaattgaaatggtcagccacgttaaagacggtcgtcttcctaccttcacaccagaagagtccgaaatgctcaaaggatcatatgatttcataggcgttaactattactcatctctttacgcaaaagacgtgccgtgtgcaactgaaaacatcacc

SEQ ID NO: 14486 - DNA, 3000 bp, Unknown
  misc_feature (1)..( 3000): cDNA_ID_3082861_gDNA_ID_2684122_Annot_ID_191024 3000 nt of promoter + ATG
ttcttagaattactttcttgttttgaagtatttaaacttttcaaaattaattttgtataatctgaaagtaaaaagaattatcaacaagacaacaacatgcatgatatatagtgagtgagtgacgatattcgcactaatacttaatttttaataattacgtactatgtattatcataacgaacgaacgagcataagaatattaatttaaacctgtgaaattgttttgagacaaatatatttgggatctagttagaaaatggagaaaatcacatgatgatgagctcaggtccaaatttattgaaacatgaagcaataaaagagacttgcagaagttaggacctgaataataatgatgacttgcagagtcactggtcactcttattattgatagtaataaacgtggacaatgtcaatgtaattactgttaatgatgtggtccttgaaaaacattaatattggaacgccgaaagctcttgatttccctgccttatgcaaaggaatgcaatgcaagtcgtatgttctttcacttcgtgattaaaaccttagatgatccggcttttcattaatagttaaatagtttatgtctagactaacttgatttttatggaaatgtgactaccgtacgtaatcgattaatcgctgactcggatttatttgtttagtaactcgttactcacggaagtaaaaacacacacacagtaattacaaatataacaagctcacgtgtaaataaccgtattgacgaagagtatatacgaaataatcaaaaataataaaatcgttgaactaaatacatatgtttcttcgtagaactttgattagacttggtagtactgagagttctgttgtttagcgtaattaaggatgaacgtgtgaggttcgtagaaaacgacttccttatatgaaagttaggctcgacacttttggaaaagagtgaatgggagagattccaatccgatttgattctattgtatcctgtccttttccactgaattgtagttggctgggaccatatatactcgactgcgatattattacatcgtatcttcgagtactgtataaaccaataaatagtatctgacaaagttgatctggccgtatggtctcaaatcatcatcaaagtcagtaagtcaccataaaacccagttagggttcgaactcctttgagaaagttgaaaggaaaagtggtacagaaccaccaaactagctagatgacccgaaagacaaaaacctatagtaatagtattgtttcttctacttattacgtgattagttctctttttttcattgattttttgttgttatagttctacttgccctaatttttccttgaattgctaatttcaatgccgacaaaaaaaaaaactgtagtatttttttaggtttgatcaaagtgataatattccaatagtcacggtctagtaattaaagcaaagttaattccttaataaaatagtttgactttctaagaatcgttcttttcttttctttttgtgctttaagggtcgttattccacaagataattaaattaaagtataagaatatacgtgtacggtgtgccacaacatcaaagtgaagaagcacgttgaaaattaaggtcgaaacaaaactgtagtatatgattatttaagtcgatgtcctttttttgcttttgtttttgtcttcttataacgagaaacagaggacaaaagggtatgggattatataagtcgatgtcttttggcccataattgagtcgagatgttgctgaccttaataaaaagggtatgggattattcatttcatctaagtaagtaccaacatagattttcttaataaaagcatctttaatctttattagtattaattattatacagaaaatcaatgtattttaccatattttgaatctaaatagatacatatttcttcacaatatccgaagaaaaaaactagactaaataactcaaaggatgagtggatgactaaaaaaccaagccggttcacagagtttagtcatcatcttaaaataaatatctgatatatatatgtgttaaattgacaaacaaaaatattataaaaagttgtatgaattatgtcttgtcatgtacgcatgtgttagtgatttccacgtgagtttcttggctgtttcggtcctttttcttcatatgtttagctgcgtcatcaacttgccttttcttaactttggaaaaatgcaaaaaaatagtacattagaaaaagaccccacctcaattcaaatgctaaagtctgtgaattgtcaacgttcattgcacagattacttatcctatgaatttaagaatatagtacatctgaatacactgtaatcttaaatgcatatatttagtagtctatgcatttaatgtggatagcagataaacatagggatcacacacactgattgttacgttacgtataagatcttgggcctgcctttgtataagtgaacaagtcagatatcacatgaaggcccattaactttagggagaattaagaaacagagagaattcgaagctagagagctacgcgtcgagattctttcttgctgaataaatcaatcacacccgccggaaaaaacagtaagagcataggacttgccggcggtaacggaggaatctgagctctacacaacggacacttggacatttcactgagccatgtatctatgttggtgtttgaaaaagtctttggttgttagtcgttggtttgcttctggagtcaattatgtccgagtcttatggaggagtctaagtagtggagttgtggaattgagtcagttcgtgtagtggagtcatggagtctgttcctattttttagttgttctgttgtttctttcgagtctttgtaaggctatttaaagccatcttttctcgttaatgaagtatcacttttagtcaaacaattcacatttggtatcagagcttgcaaacaagaaacaacctgtgtgagagagtgatcgagagagaaagataaaagagagagagaaaagtgagaaaaagagag

SEQ ID NO: 14487 - DNA, 3000 bp, Unknown
  misc_feature (1)..( 3000): cDNA_ID_3017437_gDNA_ID_2684122_Annot_ID_191021 3000 nt of promoter + ATG
ggatgttactatatatattggtaattcttggcgtttgttagtttccaaaccaaacattaataaataaataaataaaagagttgaggttagatttagtctgtaaatgttcgaaatattacgtaagagtttgactgtaacaaaatattatagtctatatgtatatactagttacgattaaaacataactattaaaaaattgcaaaagtttgtacttggtaatatgattacttatacggttataccattaaacatttctcttgaaaccgcttcaaaacagtgccatataaacttaagcagcacctattttagtatatcttaaaattaattcttaaaaacataattcgtgttggtaaatattaataactgaacaagtttctggatattctaaaaagtataagccattatgaacagttttgggcttgggccatgttagaaaagccactcaaaaatatcatatactaattcgtcagctaaaacaagaaatttcatacgcagaaatttgtgttgaaaataccatagttcaaatgtttaataaaaatatgtaaaattagtttgattgttttgactttttcgcgtctaattagtttgattgatttgattgcttctgttcccagtacatgcaatatagtgatatattagaggtaaaacatccgtgttgacaacagattaaaaaaaaaaaagtaagacagtgcatagttcaatttctagtagttgttctcatcttgtttttggcaactggacgtgtcataaaatttgtttcttaaacatgaattgtattttcgtagggaaattaattcaacgtttagtgaaaagaatcaaaatcaatccagaactagtataatacatttttctaaaactattatgatttttttataaaaaacatttttttaatagcataaagtttttggccaaagcccataatccttttagatctgaaatcatagcatgtaatattagttttgtcccaaacgttaaaccggtgacctttaaactttgcttaagatcttttaccaattgagctaataatactcgattaaaaagatattttttgactttctcacgaaggatatttttccttttcatataaatgataagttcttttgtattaatctttttgtttcctgcattatttttttcgttttcgttgttagacattgtttcgttcttgaaaatgatagtaggtaacaaatgaaaaaaataaaaaatacaccttttctcctaatttcttatatgttttattaaattttattattaaatcataaatatagaaatgtataatttactaaaagggagggacaagacaaaaaaaagaagaagaagaatatataagcccatctccttgtgttggaaaattagttgctcctttacaatatacaatttcttaataggaaaacatgtcactgccagttgattgttctcatctctttttttccttagtggaatccgataaggacaattgctcatatctgtttttttttttttaattgaagatgtacattttctcttctctgattatcttccatacaaaatctgcactcagtaaaaagaaattatgtattgctgttttaataccactagatgatcacccgtactacgccgcagtttttttggattattttatattatttaatttaaatttaatttttatttgtctaatcattcactcatacaataagcaattactttagtattaaaaatatttttttctaacaatattctcaacaatgcatcatacatataattcataaacaacatttatcttaaattaatttaacagagggtagtattggattctagaaacctaagaatatgatgataaagctccttacgtattcttcagcgtcagtgatttattctataaatatcataagagaatataaatatcaatttaagagaataacttactcaaatcattaagtaatctacgactattatacattcatactttgaatttggattacaaaaaaaaatcttcgagtatgagaaaactattaaaatagttttattgaaaaatcatataaaataaaaataaatttagtaatagtataattaaatatgtaaaataaaattaaataagaaatatatcattaacctataaattagaagttgaagagcttacattaattatttaatagacacatgtcaaatgctaaagtgatgatgtgtcaatcatatgaagagagttggccaactttcatatatatgattcttagtttcgtaccaattagtttctcaattcagtgcatgtgtagtcaaatgtccaaaagattgtttctaagcaattaaaatcttatcaaaacttcattgcccaaaatattacgaaagcttgtttctgtgtatgatatacccggtaaaattaaaatgatcattatacagaacaaatcagcatgattttcggataaagatgacacacatttgaaatcgtagccgtactacgcgaaatacatgcactcttcgttatgttaacactttaacagtgaacgtagccataatgttgaccacattcaacagtcaacacaaacattactttacacacaaatatatgattatatatacatatgtacatgtaagtgaatgtgagcaataatgacgggaatattcagagaagacgatggtgaatgttagcagtgatcacgggcacattcaaaactgactgtggacaaaaaaagctcctggccttaaatatgattgtgccaaaaatagtacaaaactaagaacccaaaatggaattcgagacctatataataatatatatgtatatagtctttccttggaaagaaatcttatgttattaagaaaaatactataagttatctctctatctagatatgatatatatgtccaaacatttccacgtagatgacgtatattaccgaggataatcctctatataaggaagagaagctcgagtaataaatctcatcactttgaaatctcaaaagacaccaagcaaaaaaacaaagacagacaaaaaaaaaagagagagagagagagagaaaa

SEQ ID NO: 14488 - DNA, 677 bp, Unknown
  misc_feature (1)..( 677): cDNA_ID_1017007_gDNA_ID_2684122_Annot_ID_191027 3000 nt of promoter + ATG
cttgcttggagaattccagagatagtagaggcttcaaagaagacaaagcttgcttcttcttctttcatgttgttctgcactgagagttgagcgagctgtataggattacatgtccaattccaaagctggatcctttgacctcttgcaaggagaaagattatcaaaggaagagagattggaccagatggaagtaaggaagtacctttttttatggtttacacataattttaatttttaacatttgtttttaaacttttttttttttatcactattaaagtttaaaggtttttttgaagtgttaaattctaaatttttgtctaaactaattgtacacaacatccaaattgtttttatttaaaaatgttttaaaacttctattttatttttttcaacaattttgtttttttctaagtgttaaaattttaaaatattttcttcaaaaccgtattaagagaactagctttcaaagatgagaagcaaaagtattcgggccaacatagttaggcccaaactaaatcaaacaaagcacacaaggaaggaagcatcaagagaagtctgtagaagaaaggtttgtccaacaacacagcaagcacgagcgaatctcctcaacttccccaacctaatagctcgccgtgtcgtgactactcaccgagtaggaacctaaccttatccaatg

SEQ ID NO: 14489 - DNA, 3000 bp, Unknown
  misc_feature (1)..( 3000): cDNA_ID_3082857_gDNA_ID_2684122_Annot_ID_191025 3000 nt of promoter + ATG
atcttaccgctatacgaacccatactgattttgtccaatttttttggaatttagatccggtttgatcaggttccacggttctaccaatcaatcgatccggttttatcttgatttcttgtcctaataatcggtaagtaattctcataagtaaaaaaacaagaacacactacattatttctcttaatctcctaagaacaatatatttggccattcaaactctacaattacaatcagaaaacattacaattttttataacaaaagtattgtttgagctatttcccatagagattattcaccacaagccatataaaaagcttgattttggcaaaatccatcttcagaaagccgtagtttactatccaatagtcaaacacgttgaccaaagactaatcccaccaaaataaaaaaactcaacggcggcgatcaactctacctaaatccacaagcttcttcgatctatttgcacaaaacgacgccgctgctgatatatgaggcttttccggcaccgccgttacctccccagaattaccaaactccgatggaaatctcattttccgtttaaacggacagttaggactagctctcaccaacggactcaaacaaaaagccatccccgacatgctcttccctatccccatcgcaatcttcctccttcccggagttttcgtcgccggagttctcctcaattcctcgattgattccgccgactgctccggttccgtatctcttacaggtgacattcctctacagtatatacgttgaggtctacgcgcagcgataacgtcttcgatgtaacacgcggtggttggttgctttttacgtcgaccggtggagagaatcgtcgagatccatgaacgtgaagaggaagaagaagatgaaatctcagacgcgtcgcatgaggagaatctaggattgttggatttgggattggtatcgaaatcttcagatctagctctgaatagattcgagaatctagatacttttttaccttgttttgatttatttgatcgattcgattcgaaatctttgcatgaatatccgacgagatctatctgtggcgtggtaatgaatctccgattagaagaaactaaaggatctcctccaccggctccggcgtcggattttctacgggtaacgtaaggagaaacagagcgagggaaaatcaaaagcggaggatgattattgttattagatttctttgattgattatcttctacggcggctgatacggcggcggaagcggcgagagagaggagacgttcacggaggcaagaagcgcaaacgccgttgctgctgctgagatcgacggtgtgtcttttacacctcatcggaggagaattgaagataaaagaaaaagctttgatttttttcgaaaggaagcttttttttttttgggttgggccgagagtttcggtggttatagtgatgtgacaacctgtaaagatgaaggaagaagaaaagatctggtggtaaagattttgtcttcttctcctaagatctctgttttgagataggcttagagagagagagatagcattctatgtcggaaaaccaaaaaaaaagatagatgagagagagaaactaatttatttatctaatggagatttgtaagcacaacattttgacagatcattttatcactaaccatttctttaatgcaaaatttaattatgcgatggttagtgattcaattgcaatttttggttcgtaattttgccaacttacaaaaaattgatctaacgcgccattatagtttcatagttgtagaagataaaatctagttatggttgacctttctttaattcaatatacggaccaataccattggatttgaatgggatgtgtagtgattacctcagccactgacttgaaacaatgatataactgtataaataaataaaaaacctaaaagagaagcatgtgacgttggatggtaaaagccgacaagtattaggtgaagacgagccatcgtcgttttccacatatctcacacgaatgttcgtccgtttcttctacatattgccacgtggttttcatatttcatcaataggccttaacttcattattgggcttttaaagccttcctaaagtctccttgtctattgggcctgtcatgtgataatcaatgatgtaataaataacgacaacctatacttagtttttgcttcttcttagtttgaatatgttatgttagtttggttatttcagtcatttagtttggtttggttgataactaaatcatgatgttgagagaaactcattgtttttgtgtttatgtctatgtttattgtgaagaatgattcattatttaccaagtactaagaaattcaaaattttctagaaatattattttatgtttgtgatttctaaaataaaatctaaaataattcagactggataacacaaaacccataaaaactagagaaccgcttgtatacatatagcctcctaccctcttcctggacctaactttattattgggtccttttaaaagtcttctatatctattgggccttctaaacaatgttgattgttgtttctagacttattattttgtatttgtgtgaggggtccatgtggaatttcaaaattcgaaaattcaaacaggttacaaatatctcaaattaaagggacacaaatcttatcttcattattttagatttgaccgtctagaaaagtaagaaccagaccgtaccgaaccaaaacgaaccagagccagacgactccttaacggcggctaagctatctgtaaaccgaccgaaccacacagccacaggcacacaaatcaaaccttctagaaatcaaagagagacatttattctctaaattcattttcctattttgcccctacgaatatttttcttcttcgtctctctctctcagctcttgaagtctttggtctgttggcgaattttcaagcagctttctaattctgaactgaaaatttcgtctttggaactttatattctctcatctgaaactgaaggagaaggaagatg

SEQ ID NO: 14490 - DNA, 3000 bp, Unknown
  misc_feature (1)..( 3000): cDNA_ID_3017444_gDNA_ID_2684122_Annot_ID_191018 3000 nt of promoter + ATG
gggtcacactaaacgaaccatgggtgtacagtattggtggctatgacacgggaagaaaagcccccggacgtgcctccaaatacatgaacgaagcagccgtggcaggagaatctggtctcgaggtttacactgttagtcacaatctacttctggctcacgccgaagctgttgaggtcttcaggaacaatcccaaagtacggaaaaggataattaatttcactttaacgagcatttttgtctttaaaaacatacttattgagatatacgacgtttattgtttggattacagtgtaaagatggcaagatcggtatcgctcattgtcccgtatggttcgagccttatgactcgaactgccctaaagacatagaagcatgcgaacgagctatggagtttatgtttggatggtgagtggttttatatcttaattaaaggttacatatttcaaaataaaactagtacatatgttttgttaagtttctaattatttttgtttgggtgctttctttaattaacaggcacatggatcctacggtgtatggagattaccctgcagtcatgaaaaaatcgatcggaaaaagattaccatcatttaccgcagcacaatccaagaagcttagaggatcttttgatttcgttggggtgaattattacagtgctttctacgtcaaaaatattgatgaagtgaatcatgacaagcccaattggagatcagacgcacgcatcgaatggagaagtaagtggagttgtatataatatttatatcattttagggtttcttggctccaagctttttgttactgttttcttgtctcacaagttttcaatttctattggtacagaagaaaacaacgcagggcaaacattaggtgtaagaggtggttcggaatgggactttctatatccacaaggccttagaaagtttctaaattatgccaagaataaatatgaaagcccgaaatttatgattaccgaaaacggtaataattttataagaagttctttaattagtcttactcaatttaatccgggatatagtttactaactcttgttttgttaaaattgttcaggacactgtgatatagattatgagaaaaagcctaaactttctaacttgatggatctccaaaggacagagtaccacaagaaacatctccaaagcatccaacaagccatccagtaagtgtctcttctaaacatctccattataagtttcttgtgggacaagaaactttactgtgttgaaaccatatactttgtttcatactgacgatgaaaattgttttggtcagggaggatggggttgtagttgaaggatactttgcgtggtcattactagacaattgtgaatggaacgccggttatggagttcgatatggactattctacgtcgattataacaatggactaaaacgtttcccgaaaatgtcggcgatgtggttcaaagaattcttgaagagagaagaagaaattgaagattcagaagaagaagagtacgtgttgaagtcaacaatgaacaagaagagattcttattagcaactggttcatcagcttcatgctttattcctaagatgtctgaatcttctaaagccctcgaactattattctaggtttaattttgttttccttattaaaatttgatttgtcaaaaaaaatttgatttgtcaaaaagcaaagcaaagtacttcaataaagaaggcttaatgcagggtgctttgcggctttaaactttcttccttttttggtctcctttgtacactatcagttgttgatttcaaaatttcaaatcaatcattaaaataagataatcgttcgttggtttataaaaagcatcacgcgccggagttagcacacacgatctacgcgcgattgatgcgcgtgggttaaaaagtagaagagtgtcccgatgataacgtgtgggctcaaaatcatttatttggactttgacggacccaatcccatagcccataaacccgtgatggagtattgtcattcaattaaaaacattaatatgtagtaactatgggcgtatgctttactttttaaaatgggcctatgctataattgaatgacaaggattaaacaactaataaaagtgtagatgggttaagatgacttatttttttacttaccaatttataaatgggcttcgatgtactgaaatatatcgcgcctattaacgaggccattcaacgaatgttttaagggccctatttcgacattttaaagaacacctaggtcatcattccagaaatggatattataggatttagataatttcccacgtttggtttatttatctattttttgacgttgaccaacataatcgtgcccaaccgtttcacgcaacgaatttatatacgaaatatatatatttttcaaattaagataccacaatcaaaacagctgttgattaacaaagagattttttttttttggttttgagttacaataacgttagaggataaggtttcttgcaacgattaggaaatcgtataaaataaaatatgttataattaagtgttttattttataatgagtattaatataaataaaacctgcaaaaggatagggatattgaataataaagagaaacgaaagagcaattttacttctttataattgaaattatgtgaatgttatgtttacaatgaatgattcatcgttctatatattgaagtaaagaatgagtttattgtgcttgcataatgacgttaacttcacatatacacttattacataacatttatcacatgtgcgtctttttttttttttactttgtaaaatttcctcactttaaagacttttataacaattactagtaaaataaagttgcttggggctacaccctttctccctccaacaactctatttatagataacattatatcaaaatcaaaacatagtccctttcttctataaaggttttttcacaaccaaatttccattataaatcaaaaaataaaaacttaattagtttttacagaagaaaagaaaaca

SEQ ID NO: 14491 - DNA, 3000 bp, Unknown
  misc_feature (1)..( 3000): cDNA_ID_3017460_gDNA_ID_2684122_Annot_ID_191014 3000 nt of
gattagtggccgctttttttttggataattaattaatctttttttttgggtcaaacaattttggatttttgatccaaggaatcaaaacatcaaaacaaaaagctttgcacgtgtacagatgagtcacatatcacgtccgacgagtatctgtcgtgtttattaagttattagtatagggcacacggaatttgtttttctttttgtcggtttatctaatctcttaattccgaaacaaatgtaatttttttactattaacgatgtttaccatagacaataaataattacatttcacatatgctccgtgaaaattactaagacgaatttcacatatgtagtgaaagattgttttaaaatatatgtacaactccaagaaaccctatctccataagccatgtaacaaattattattattattattttggtaaaggacattttaacaaattcgtaaataaaacaaagtcaaattcacctccaaaggttaagtcgacgacctatattatatagtcaaccacatatattaaataaaacatcgctcacgccatctactcatatgtatgtttttacttaattatatagctaattgattatatgatatatcatcagttggaaaattaaaaaccattttattccgatagcgtaaaagaaacagatcattctttttgtttaaattacaatttatttaactcaagttgttgaaaagtgtgtaatggaaggcaggtccatagctatttcgtcttatatttttaactattttcattttgtttgtctttaagaaatagtattttattaatgtttttttacaaaccaacaataaaactgtatattcacattttgttttttttgtgtatatatatagagacatataatccacaacatatgcatatcatttcccaaaacaatacaagaaacctgaaatccaaaaaagaaaaacccaaaatcttcgcttcttcatcttctttttacgtttatatggtgagaaattctatgaaggctgagtacgatatagatcatcttcctcatcaaaccttttatggtgattattcaaaaactttggttcccatgaacaagaactcccaaataataaccaagatcaagcctaagatccgtatcatccatatatttgctcccgagatcatcaacaccgatgtcaagaacttccgcacactcgtccaaagtctaaccgggaaaccggagatcaccaaaaccggttctaagaaaaagataaccaacacaaattttcctgcgccaccgggtttgcctcaagattccggccaagaacatacggctgaactggacaacagaataatagggagccacgtggtgaaggaagaatggggatcaagttcaaacacaaatacttactttgattttgacggtttgatcgatcttgatgaagacgacaacatattctcaagtcgatggtttgatcttcaacaacaataattagtttggtcacaccttaccctaatatgtagggtttctactaatcgtaagtcctgttggttttgatgatgatttgatcatttattcgatatggagcataacaagacatgggtcaagacaagaccaaggttgagacgatgatcatctatataggtaggaacatacataacttgtatatatgtacaaatgtttggattttttgggcttgggtgccctttgatttaatttgttagactgacttaatttaccaagaaagagtgtagtgatgagtttgtagactgattttgccaagaaaaagtaagtttgtgttttgatctccgatcatgtgaaaactctacttaaaaatggtgtaacgttgtactcacgcgtgcgtgtgcaagttttatatatagaaaagcgagaatgatattgtgattgaattttttagattgttcattttttttcgtcaaattattttgtttgttaattcatatataagtcatgttacttacaacaaattgtttgataaaacaaaaatgaattccattaaactgaattaacgaaatactataatgataaatgattcttacatgactctaaaagagtttcgatttgaatatataaatgaataaagttctgttttattggcgatgttcttgatatataccttcaaaactttatggctaaattacattttaacttctcaaaacgttagattatgaaaggtggactcacatttcataaacattaaaatgatatggtaatatgattataatgagttgtaatggatatatgtcatatttttccaatctcattcattgaaatatcagtttattttttggatgacataacgatcaatagtgtcatataatatgatatccaatgttttaatattaactagctatagctatatccatcattgttaatagttgtgttacatcattaaatagtatttcaaaagaatataaaaatttctgataactaatggagaatgaagaatatcaaaccgcccattcgaccaagaaattataataacgaagtttataactttttttttcaattgtgaaatgtcatttttactttatttatttccaacaaaataaaattatgttttatctaaacccttggactttaccaagaagctacttttttatttagcaacagcaaaagctacataccatttgttctttatttattaatgaccgtttttttaggcattagaatcgttacggctgcttcgaatcttgcgtctcacggaccgacggaactaaccaatctcaaccgaacccgaacataacctgttcgtttggttttctaaatggtaatcaattggttcattataccggtttggtaagaagaatccgtgtgtttggtttacatatgttgtaatttgacgcttgttcatcacgttgcagatatatctcaacatctctcaatttttctctctacgttgaagaaactttcgaatttcccgttagttcttctccacgctttctctttccctttatctcttatctggttaagccaatcttgattgtttggattcgtaaccgatcagtgttgtgaggtttgaaaga

SEQ ID NO: 14492 - DNA, 3000 bp, Unknown
  misc_feature (1)..( 3000): cDNA_ID_3017517_gDNA_ID_2684124_Annot_ID_191034 3000 nt of promoter + ATG
aagaatgggaagtgaatttaccagctgaagaagtgcctcctgagttaccagagccagctcttggtattaactttgctagggatgggctctctgaaaaggaatggctttcgcttgttgctattcacagtgacgcttggttactgtctgtctcgttttactttggctcaaggttttctttccacaaggaagagaggtaatggatggtttctcttttggtctcctactcttcacaggtatatatgtacatgctaacttgtgtaattttttcaggaagcgtttgttcaacatgatcaatgatgttcctactatatttgaagtagtgactggaatggctaaagcaaaggacaagtcatctgctgcaaatcaaaacggaaacaaatccaagtctaactctaaagttgtaagactcttgctatatcctttttaactctttgcttttgcagttttcggaaacttgtatcactaaagatgttcatggttcaacacttaatcatgtactagctgacggaaacacgattaattcataatcttgaataccacatccagactattgtagtttcttagtagggtggataaaacaaagagacaatgcttcaccgaaaacgctgctttggttggattggttttgagtatatctgtagtttttttcatctgtgtagtttaatatttcctttgctttgttttgggaatgcagagaacttcagagggaaaaagctcaaagaccaagcagccaaaagaggaggacgaagaaatagatgaagatgatgaggatgaccacggggaaaccctttgtggagcctgtggagacagtgatggtgctgatgaattctggatctgctgtgacctttgtgagaagtggttccatggcaagtgtgtgaagatcactccagctagagctgagcatatcaaacaatacaagtgcccttcatgcagcaacaaaagagctcgagcttaaaaatgttgtattgtagagaatagcctgtagtgacaactctcactaccctcgatctgtctttatttggctagtcttttagctcgttattggccataacagcttgggcctatttctctgtataattggtttgattttgcaactgagaaaaaaaaggaaactctttaactgaatttgtggttagcttcaaaccaagaggaaacataacaattcttaattcggatacagcaatatactctagaagtctcgaaatcatcactaaccctatctggaacaattatgttagggttctcagaacctgaggtaacttgtgatgcttctctagcaatctagcaatagtctcaactctcaattgggagtgtaacgaaactgaagatcacatcaacaaaatcttgacacattttatagtaaattcaaaataaaacataaacatttcggacacatgaaaacaaacaaaaaacaataacaagaagtcttgaagcaaacaaatttagaaaggaaagccaacacttgagagcacaaaatagaaagagaagagatgaacacggatcactaattcactatgcccggtctctcacgacttgactctgcgtaagttttcaatatcgatacctttattccttaaccaaatcagtacacactaacacaccatacacgagagagactagcacatcactaggtcagctcccaatacaccatacgagagagactagcacataactagcttagctctcaagtctctcatgcgagactcatacaccacagatttataacgaacaacaaacattcagaggcagtatttatactagaacagagttttttaaagatatttttagatcctaaaaatatcttattcttccttctcacgtgcctcctcacttgcacgtttcttcttctgctttatctctcattctcattcttcttgatacaccagtcgtatcactctgcttcgccttgtaagcacagtaatcaaggaaaagctctgtccccgttaagtagcagccaaagtggctcttcttgagtgccatgagcgagtagaccttctttaggttcttcgcaccatcaaactggtcacctttctccaccataaccatgtagaagccgaaatacaaagctatattgcatgcgttacgcatacaatactctttgatcgaggccacgaccttctccctagtatctaagctcctaagatgagtaggcgcgttgttgacagtgactatctcttttgacatccaaattgggaagttctctagataggccatcatctcgaaaagagtctcccatttgtatctacctcctcctactttgttaatcattggagaaacagtttccaaatgggatatgtaggttttagccttccttacttctggctcaaggtacgggagcattgccgcggcgctcccaagacctgacttgacaagaagctgcttaacagtgttgctgcaggcagtctccttcttaaaggatatcttcaccggatgtccagcgttaaaccacatggcgtcccttagagcgttcaggtcttccttccaccaccgggacaattgatcacaaccagtccatactcgttcctccatagccatgaatacctcctcggactggaaattgtactggtataaagacgtgatcagagagtatccttgtaaaggaatcattccagtggcaagaaggtggagctttggaatcaccttcttttcagtttcagataggttcaaaggtttggacaggtggttgcaacactggagaagatggagatccgtgaagctaagcgggtcgagcatggtgaacactcttatcaatcaccacgtcactcgttttcttcatcggctcctcctagaggttctggtgagtctcagatcttattggataatcgatctagcttactaagacgtatagagatgcctatgtttgatagatctggagtttatgaatggttttcaagggtggaacgcttcttttgcgttggtcgttattaggatccagataagttggatctggtagcgttgagtcttgagggagatgtgttgaaatggtttaattgggagatg

SEQ ID NO: 14493 - DNA, 3000 bp, Unknown
  misc_feature (1)..( 3000): cDNA_ID_3017483_gDNA_ID_2684124_Annot_ID_191044 3000 nt of promoter + ATG
acatttcattgtcacatgcacatttgtggacgaaattgcccttgatagtgacagactgatgtgtcagataaaggacaattggtgatagacttttttttgtctccagatcttatccccgattagaaattctctgttgtgtctacgtcttttcctcgatttcatcatcttgctctattattatgaatcccacatcttgtccaccaattgttctcatttaaggattttaaattttctttagattttttgccatctattttggtccacagattagttaaacattattgtcttcacctacacgtttacaattgcatataattttattttaataatatgttatatcggggacaagttcatatcgaatgagtgatagaattatatcgataacaaattcagatcgaatgatagaaaagataatatgttataacatgatcttttttgttattttgcaatagaaggaaaaaaattaataatctcggtcgatgaagacaataatgttcaactaatctatggaccaaaatagatggtgaaaaatctaaataaaattcgaaacccttaaatgtaacaattagtggataagatgtgggattcatgataatattgaaagatgatgaaatcgaggacaagatctattcacaacagagaatttccaatcggggacaagatctggaggcaaaaacgaaagttatttgttcagatataatgtttattggttaaagtgcacgtgtttcgagagaatagagataaatagaaggggttgtgttatgatggggcactttacaagtttgtaagcctatttagagcactttggaggcagtaggccctttttggaggttatctactgttcgaaaaaaatcaatacaattctacccctgatgacgtcagctgttgcgctaacatggtaaacaaatttgaatcacagccgttcgtttgttttggagagagaatcgatctaacggttattattaagagaagagttaaagttttcacggaatgatctcctccgtcggattgaaatgtctcttttaattttgaccatcaaattaaaattaataaactatatctaataattattttctctctcttcctttttgttatttaatttctttttaatttgtcacattctctattttattaaaaatctttaaccatttttttgtaaaatatataataataacattttttccttcattttgaaatctatattactatatttatttatattattattaattatattcacttaaacataaatagattcagaaaaaaacaaatccatatgatctaatccatatggataacaatgaaatatataatttttaatcagaaccatgtaactataaactctaaaatcattgtaaacaatcatagttccttaacactaaatcgtaaaccctaaacattagatactaaactctaaacattaaaccctaactcctaaatttaaaccttaaatattagatactaaactctaaaacattaaaccctaattcctaaatttaaaccctaaaccctaaactttaacacatagacactaagccgttaaccatatacatataccctacaccatctaccataaacactaagccattggccataaatgttaagcataaatcccttaaccctaaactctaaatcttaaaccctaaaccctgaaccctaaactttaactcgtagacattaaccctaaactatatacatataccctaaaccctaaacccatatgacaataaacccaaaaataattatagaacttgtttcatcatattttatcaacatcttctacataacgtaacacttgttttatggatagtattatcaaactacaatcatttagaattatcgaccatcaacacacatccaccaaactatgaccatgtggtcatttcaatcatttcaaattatcgaccattcatgcacattcaccaaacttcgatcgcgtggtttgtaggacaaaatagtaatttgtatacatatcattctttccttgaaaccctagccacctatcactctgctatcatctttttcctccgacctattcaaccaccatgtcttctttgattcatcaagaccatcaccattattattgttgcccataaatgtaaacccttccctaaaccctaagccctaaaatttaaaccttcttattgttgcccataaatgttaagcataaattccttaaccctaaaccctaaaccctaaatccctaaactcctaaaccctaaatccctaaactcctaaaccctaaactttaacccatagacactaagcctttaaccatatacatataccctaaaccctaaactttaacccatagacacttaatactttaacctcgagggtaaattggtaatttcaataataaatgtggtaggagttgtaaagaaattagaaatatggtagattttataaaaaattagaaaaatggtaattgttataattttctctatgtgtaaagtgcccttttgttttgggctatattaattggtatgctcagacgatgagaaattaagaaagtatgcatgacaacatactaattagtctctctcttcagcgacatatttatttcccgaaaatacccctattaaccgaaataaacgataattgtttctagtgtagctgcagaagcatttaatgttgaggatacactcgaagatacacccgctggcattagaaacataacaaggatattgataatcattgctgatatttttgaggttgcggatatatcgtttgtatacactgggctatttattagcaatgtattatcttccctttaacaacgaaaaaactacaagactaaagaccttagcttccgacaactttaatgcaagagggagctaaagaaacagagaaatcaaagcagaaaggtaaaagtaaaagatttgagtatttcgttacttagagttaaatttttggaatttcttttttaacttagggtttgggaaactaaacttcatatcggtaacgaatttgttatttctaaaaattctgcagttacgc

SEQ ID NO: 14494 - DNA, 2909 bp, Unknown
  misc_feature (1)..( 2909): cDNA_ID_3016263_gDNA_ID_2684124_Annot_ID_191050 3000 nt of promoter + ATG
cttcttaagcactgaaacaaacccaaaaaaaaaaaaaaaactcttcaaagcgaaaccaaatttcacaaaacacgtaagcgtagatcggagcaaaacaactatgaagaaaatcacgattccggtagaatctcttgacgaagaagacgatttcctactacaactcgccgcaattgaagctgaagcagcagcgaaacgccctagggtttcttctataccggaaggaccatacatggcggctctaaaaggaagcaaaagtgatcaatggcagcaaagtccattaaatcccgcctctaaatctcgcagcgtcgctgttaccaccggcggttttcaaagatcagacggaggaggaggcgtcgccggtgaacaagattttccggaaaagagttgtccctgtggagttggtatctgtttgattcttacttcaaatacaccgaagaatccaggtcgcaaattctacaagtgtcccaatagagaggttcttaatatgtttatttttgcattctaagtgttcgataaaatgcctatgagaatataatgattttaagctacgtgttctattaggaaaacggtggttgtggatttttccagtggtgtgatgcggttcagtcttctggaactagtactactactagtaatagctatggaaacggtaatgatactaagttcccggatcatcagtgtccgtgtggtgcgggtttgtgccgtgtgttgactgcgaaaacaggcgaaaacgttggccgtcagttttatcgatgtcctgtttttgaggtgtgtgtatatcaatttgtttatatggttggttgtgttggtatctataatcaacatagcaatggcattgcaatctcttgttcattttgtggtttgtgcttctggattctggtttagtgagccctttggctgtgtttcggatagaactatggttatcgttctatatggttaagtgctgagtcttgtctttcattgtatgctatctctgattgttgtaaccaagtatactcagcttagattaggagatttttcatggtttaaatgacggaaatagagtgataactgtggcatacacagtttgtagactttgtgcatcactggaataagtgaaaaattgaattccgagtcaatattgtgcacgatggttaagtggttaatgtagtattgcttacctttgagtgtatgtgtgataacatggctttttattaatttcagggctcttgtggtttcttcaaatggtgcaatgacaatgtagtcagctctcctacgtcgtatagtgttaccaaaaacagcaactttggtgactcagataccagaggatatcaaaatgcgaaaacgggcacgccctgttataaatgtgggaaagaagggcactgggcaagagattgcactgttcagtctgatacgggaccagtaaagtctacatctgcagctggagattgttttaaatgcggaaagccagggcactggtcgagagattgcactgctcaatctggtaatcccaagtatgaaccagggcaaatgaagtcgtcatcttcaagtggagaatgttacaaatgcgggaagcaaggacattggtcgagagactgcaccggtcaatctagtaatcaacaatttcaatcagggcaagcaaaatccacatcctcaactggagattgctacaaatgcggaaaagcaggacattggtcaagagattgcacttcccctgctcaaactacaaacactccaggcaaaagacagaggcagtactaggtcaggctttctagttttgatctgtcttatacaaaatcttagggtctctcttaatatagttaaccacttcattgccatggccaatgggtgtgcctaacttcgaaacctagctttatcttccatcttatgaatctttcttttgttaccttttttttagaaagcttgtgaatcaaagaagactgatctgtttaaagttactgcatgaaattaccttacatttgatttgttttctgacgttttgatataacatatcataatgggttgttctattattttgttgggttgaaatgtgtccattattccaattgtgacaaacgttttgttaatagattttaccgtgctttgactaagaaaaccctgtcaacattgtatatacatagcaaaacaaatcttaaaaatatcaataaaaataagccttgaaattctctaacatttctctccgataacttctgcaataatatatgaaatttattttcacatttaccctacgccatatttcttttcgatcattcctaaagaattcacaagtttttctttatctttaatttttactagtgcaaatgtcaaagcggatattttggtgcgtaaaattcgtgtccaaccgcatcatatcacttatgtaaaacaacattccttagaaatgactcttttgagctctaatttatttcggatgacaaaaaaaaacacaatattcctcataaatggttcttttgagttccaattaatttcggataaagtaaaataaaataaaaaggaattacatatggtccatatggcgaaaataatatatatcatcacctgaagaaattgcaggtaaaaagttaaagaggcacaaagaaaaaaaatggttagaaacgaatttggaagctagtgcttttttagtttgttgaagaaccaaaaaaaatatgacaactttcctctgcaacaacaacgtaagaaaagggacagagaagatttaagttgttagaaaaaatcggtagactccatatttagcttatgtaacgctttactcatatctatattcgcttttatcttatcatcttctgatttctcccatttatggctaaccaacaaaacaaaacccatttttttttctctttagaatcaaaagtaaagattggttgatttaacattgtgtaatgcccactctgcttcaaacagctccaatg

SEQ ID NO: 14495 - DNA, 3000 bp, Unknown
  misc_feature (1)..( 3000): cDNA_ID_3017511_gDNA_ID_2684124_Annot_ID_191036 3000 nt of promoter + ATG
ttccgatctgtattataaatcagccgtaaagtgatgtaactcagctgtaacgtgatgtaatttagcagtaacatatatttttcacaacctttcatcttccctgaatgataactcagccgtaccgaactttttgtcttccctgaagcatataatttacacccatctttcgtcttcccttgagcatataactcagtcgagacatgtaaatttaccaaacctttcgtctgtccttaagcatataactcagctgtaatgtaattttaccgaacctttcgtcttccctggaacatataactcagccgtgacatgtaaattgaccaaacctttcgttttcccttaagcatataactcagccgtaatataattttaccgaactttttgtcttccctagaatatttaactcagccgtaacatgtaaattaaccaaacttttcgtcttctcttaagcatataactcagtcatgacatgtaaatttgccgcaaaacaataagagacgcaacatttcgtctaactttatcatcgagcaccaacttcacaagcttgtcgtgcattatttctgcatctatctgcacaactgtacaccctcttaatcagtgtaaatacgtatttgtgtttcgatactcaattaccggacacaacaacaaccggaaccggatcaaccatatcggaagaaggatgaaagaaattgaagaagaatgaagaagacaatgaggaattgtaagttccggtgatgtgaaaaactcaggtgaagaagacgagttgaaaaattttggctctatttacatggaatattgcagccgacgtcgttttgaattgatgaggtggcaagtaagccaccaaacgaacatgtaaatttgcctaaataacttagccatcaaacaaagctataagccagtcgcaacatgaatactattatagtaattaaaaaatgaaaaaacgccaagttaattcagccgtgtaatatcgtaacttaaccgacaataaataactcaaccataacgtttgataactcggccgtaactgcatgctattatagtaattaatcttttgcaactaagtcagccgtaactaggctgagttatccggtaatccagctctttatggttgatttataacacttgatcataactcagccgtaacaacatcccataactaacccgtccttcataacccagccagccgaaaaagataactcagtcgtgtcgaggaaataagtctgatattttctaataacttagccataacgttgtctgggttatgctcgaaattcttataactcagacaaaattccttaactcaactgtcatgtaggctggattatcgcataactcagacataatttttaaatcagtcgtaacgtatgccaagttatactcataattccaccgttttctcatgactcaaatacttttgtcgtaagtcagccgcaacataccgtaactcagtcgtaacggccgctatatcgccttacggctgagttcattaatccacgttagcgatttctgacgtggcagtggtattccttgtattacgttttttcttgtaacgtttggtatagacacactgagtatacaaaaagacgaaaatatgatagtaataaaaaaatattttgtttggttctggtgaataaacctaatttatataacatcttagtaaatctctctaaaaataatttatatattataagaaaaatataaacataaattaaaacaatctttttaggaggtataaccttccatatgattgtagaataggcataacctttcataggatcaaggagatagagcttaccatttgatccaaaatatagatctgaacatatgatcgagcaggcagagcctaccgttatgatcaaggatgtagatcttattatacgattaagaggcaaatcctactattatgattgggaagagggcatagcctattactctatatataaatttctaattttaaataaattaagttttttaatataatttaaatattacctcaaagcgatgatatatttagagtcgctcagagagtcactcgtgctagcgaatcaagagtcgttcgtgctgataacgtattaaatattatatattatattattttagaataataaaaaagaatctcttactcatatttttttcttcacaaatgaaacatatatataggaaaggtgaactctttggatgtaccaaaaacttagacaacaagtcacgtgggtttccagaaataaatagataaacacaacaattaataattatctaactttttcttgtattaatcatttttattcaatatatatatatatagttgtttattttttaatgatatttatatattgaatacttcattttgtatctcacagtttttatataaaatttatattaatcaccaaaatatttgttttctttatttgttaacaagttttatactgatttgaatttggataataacacaacaacgaaaataacacaagttactatatcacatgttaaaaaacatgtgattattcatatgttaaacaatttttgtatccaatttattatagattattcataatttcatatgttaaacaaaaaatttcccgtctacggtcttaaaatttctagccacaaaattgatattgactgaaagaatgtcgaatatatacaacaattaagaatatttgaccaaatctatactttcctaagctggagatgaaaaattgatatcgaaagaaatcaaattgatacttgatattaaagattaccaaaaaaaagtagagtaaatcctaattctaattgatttgggcttttgggcttcatattggattatatttatgacccgacccgaaccaaaaacacccaattctctttgaccaaaaaataatccaaagacttagaagaaaaacaagatcgggtctcgtcacggtccacggcgcagctttttcttcgtcttcttcaattattctattccctctgagagattctctctgcgtttcttagatcgagcgagcgaagcgagagatcatg

SEQ ID NO: 14496 - DNA, 2291 bp, Unknown
  misc_feature (1)..( 2291): cDNA_ID_3017636_gDNA_ID_2684125_Annot_ID_191054 3000 nt of promoter + ATG
aagcttaacgcggtctacaatcaacttgtggaggttgtcgattatgttagtagcagaggttttccgaatcagagatttgatcaccaacaaggctacagaggttcctatgggaatggtccaactagctacactcagaattctcagttccagcaaccgcttcagaatagcaatagtttcagcttcagaaggaactatgatcttgcttcttaccaagccccccccccctccacccacacctaaaagcaagatagaatcactgctggaacagattctggaaggtcaacagaggatcttagagagacctatccctagatggaatgagagcagcctcactacttctcggcattctacttcaatggaaagtgagtatgagttagtgaagattgaggagagtgacgattttgcagttgcagaggcagtgtcgatcgacaccatcgcatatatacgagacatcaggctgtgacgaagtagaatcgaccaggctggacattaatctccagaatcgctcgacacacattgatagtgtcgaccgacaccacctgggtcaaaatgtgtcatgtaaacctataaatacagtttatatatctaataaaagtgtgtggttttcgttttacaaaaacagagaaatatacagtaaaacaaaacagagtaaaatatatgttgtccgatccttaataaatttgagagttcaaagttctacatatcttagattaaggcgaggtcaagttctccaaaaagatgactctgtgggcgatctgttgatatattattccatacgagattctcaggaaatcgtccctgaggcgagctggactattccaacggattgtagtcttaacaaactatttatgatacagaaaaccagagataactctttgtagaggtaactgatcgaggagtggttcagttctctagaaagctaatatccggggcaatccgtgaacatattactggttgcgagattcattgagacttgtcggaatgtcaatcccgaggcagagtgatctattcagacggatctgtaaagaaacagacagtaacgacttcagcaaaacagtgataactctgagcggagatatcggattgaactatggttagattccatggaaagctgatctccgtggcaatccgtgaacatgttcgtcgtcacctggttcattggactttgacggaaggtcgccccaaaagtagtcggattcgattgtctttgcttgttgagcgtacatcgaatacttggatgaatgatatgcgaagagaattttttgtcgttccccacagacggtgccaattgttgaaccaaggattcacacaatagatttgtttaaaagggaaaacaaattaagtaagttctcttcattaggtattccatccaagacttgattacaaagactattctaatatcttgtgaaaaacgttagagttttcctcaagaacaaagaaagaattagggtttttagaaggtgttgcatctatggtggattgcctacgtaccatgtgaagggatgaagccatcgtagttctcattaggtataaagttatgtgttctttttgagtattgaattatctcctttgctaagttgttgataataggtttttagtcaattatcgtaaaacaccaatcctgtcgttgtagtattttaggttgtcaatccaaatgggtgtgatgctaacaatcaagatgtgatcagaagtcactaagtcaagccaagcaataacaggttttggggtgttctaacagtcctaagtgaacatgcaggaaacagaaatttaagcagaaaaaataaaacactcgaccaacacagctcgttgcagagcatagggtgtggtcgagtgcctggtcgagtaacaagcagtaaaccaaataaagatactcgactgcacaatctgttgccaaacaactgggtggtcgagtatcaggtcgagtaacaagaaagaattgtagaaactaaacaacatgtaacaagatgcagtaagcaacaatagagtaaacaaagaaatcaattagataataggtttctaaggatgggttagagtagtttagaattctctgtatgctaggtggttgagtttgattgatagatcccttctggattaattgtttttaatgtgtattgctttttgatcaactggaatttgagcacagacatttccgcgcccaaaaggtgttcgatgaaatgtctgaaccactaattccagagatttgtggctttgtaccaaggtattggttgcagagagcgttttggctttaacttgttgattcgtaatgcctgttaggtaaactctcgtcaatg

SEQ ID NO: 14497 - DNA, 3000 bp, Unknown
  misc_feature (1)..( 3000): cDNA_ID_3017619_gDNA_ID_2684125_Annot_ID_191059 3000 nt of promoter + ATG
attgcttccttgatggatactccggattctttcagatcccgttcatccatatgaccaggagaaaatgactttcacctgcccctatggtacatttgcttatcggagaatgcccttcggtctttgtaatgctcctgcgacatttcagagaggtatgatgtctatcttcacggatatgatcgagaatatcatggaggttttcatggatgactttttagtttatagatcatcatttgaggattgtttagagaatctctacaaagtgttagcaagatgtgaggagaaacatctagttttgaattgggagaaatgtcacttcatggtacatgatggaataggtctaggacacaggatttctgagcatggtatagaagttgatagagctaagattgaggtcatgacgagtcttcaagcgctggataatgtcaaagcagttaggagtttccttggacatgctggtttttataggagattcatcaaagacttcagcagaatcgcaagaccattgactgctttactctgtaaagaagtcaaattcgagtttacacaggagtgtcattatgcatttcagcagataaataggccttgatcagcgcaccaattgttcagccaccagattgggatttaccttttgaggtaatgtgtgatgcaagtgattttgcagttggagttgtctaggacagaagaaggataagaaacttcatgcaatctactatgcaagtagaactcttgatgatgctcaaaggaattatgcaactaaagagaaagagttgttagctatggtttttgctttcaaaaatttagatcttatctcgttggatccaaggttattgttcacacagatcatgctgccttgaagtatttgatgcaaaagaaggatgctaagccaagacttttgagatggattttgcttcttccacaatttgacatagaagttagagataagaaaggagttgagaatggtgtagctgatcatttgtcacgcgttaggatcgatgatgatgtccctataaatgattttttgcctgaatagaacatttacatgattgatacagctgaagacaatgactacaaacgtgacaggttgcaggatcgtgcttcagtgtcgatcgacactcccattatgtcgatcgacactcacatttcagaggaagttgatattcgtagttgcgcgatagtgtcgatcgacacccttgcatctgtcgatcgacacccttgcacctgttgatcgacactcttctgaatcgacaagaaattggtcaccaaccgagaattgcgccatcacagcggtcgagaaagattatccattgtatgctgacattgttaattacctagttgcagatgtggagcctgataatttcacagattacaacaagaagagattcctaagagagatcaggcgatatcattgggatgagccttatctctataagcattgttctgatggaatttacaggagatgcattgttgcaacagaggttcctgatatactattacattgtcacagctctagctatggtggtcattttgcaactttcaaaacagtttcaaaagttcttcaagcacgcttttggtggcctacaatgtttcgggatactcagaagttcatatcacaatgtgacccttgtcagagaaggggaaagatcagcaagcgtaatgagatgcctcagaaatttatactcgaagtcgaagtcttcgattgttgggctatagatttcatgggaccattcccaccttccaacaagaatttgtacatcctagtagctgtggattatgtttccaaatgggtagaagctatagctagtctgaagaacgattcagcggttgtcatgaaactcttcaaatctatcatcttccctcgttttggagtaccacgcatagtcattagtgatggaggtaagcatttcattaacaagattcttgcgaaatttcttttacagtatggagtccagcatcgggttgctaccccctaccatccacaaacaagcggccaagttgaagtttctaacaggcaaatcaaagagattcttgagaaatcagtgggtaaagcgaaaaaagagtggtcctacaagttagatgatgcactgtgggcctccaggacaactttcaaaactccgcttggtaccacaccttttcatcttctatatggtaaagcttgtcatcttccagtggaattagagcacaaagcagcttgggcattcaagatgataaatctcgacatcaaatcagctggagaaaggagacttattcagttgaatgagcttgatgaaatacgaatccacgcttatgacaactcgaagctctacaaggaacgaacaaaagcctaccatgacaagaagatccttactcggacctttgagcctaatgaccaggtacttctttatgattctagattgacattatttcctgacaaattgtcttctcgttggacaggtccctacacagtccactcagttaggccatatggaacaatcattctcgaaaacaacaatggcaaaccatttgttgtgaatcgactcagagtcaaacactactgggctgaagctgagattccagtagaaaagcctttggatcttcaggacccacctgttgattaagcaactccaaagtcaagctattgactataaacaagcgcttagtgggaggcaacccactggtaagtatttctccttttatttatttcattcatttgatttctaacttagaatttttgattttataggaatatccagatttaaaaaaaaaaaaaaaaaaaaaaaaaaaaaaaaaaaaaaacgtgttgaccaataacgcgatggtgtcgatcgacaccctcattttccaggtaagtcgttttaacctaaaacttcatcttcttcatttcatatttttctcaaaccgccgaattcactaaaacctccatagatccttcgattcttcaccatttctcgtgatttcaggctttaaactcaatagaatctcaccctctatcttcccaaagtgtcaattccatcgatttgcaag

SEQ ID NO: 14498 - DNA, 3000 bp, Unknown
  misc_feature (1)..( 3000): cDNA_ID_3017615_gDNA_ID_2684125_Annot_ID_191060 3000 nt of promoter + ATG
cagtcttctcactcccatattcgagcatttccgcatcagctttgagggcgaagaagtcaacaccacgcgtgtcactatggatgagacttacctgaagaactctcactggcttaagggcaacctactgtggtgcttcagggatgatacaggtcagcacatgattcagttacctcaccttgcacttacagagattataggagagcatgaggagataggctttcatcaggatccctcccttctgcatgccgcaccacgcaccaggcgacagagaggttctgctttaggatctgcgcctacacagaccgaggaagagttcattgaccctactgggggtccgagagttggatcttcctcatctgctcttccatatcagctgccttctcctccccccatcccgatggagccacaggtctttcagcagtacgtcgtcgacagtttcaagagcgtctagaacgccatagctacactttctcgctgcggttgtgttgcccccagtcgtcgtcgtcgtcgctctcccgcacccacctccggctttactttctgactttggttctgctttatttcagactcttggttatttgttttgaaacttgttgcacttattttcttatgctttgttgggactattgatatgtcttttagtgatttaacagtctaactggaggatccatgtgaaaacactaaccaaggctctacaccaacgagcagaattcacaaagcaatgcggaacgaccaaagtgtcgatcgacaccatcatggtatcgatcgacaccactctcaggtggcaactcacgttttctaactttttaacttttgactatttctctttcaattcctctagcttaataactttggggacagtgttatctaactctgggggagtcagttactaacttcatcttttcttttcttatgagtcagttgtgtcatttttaacttagatagtcattttattgagttaaaacttttgtctgaaattatgatctatctctcgagtttattgcctggattgtttaagtactgcacattcaaatcaatccgactaatgaaaaaatctagaaggccaatcaacaaaattaaggacatccattcccaaaataatccacaaaggctggagctaatctcactgctcttccttttacctcatcaaaacggttagtgctcataggacttgactccttgttcatacccgatagatcgactaatgtgttaaaaagaaaagtgttcctctcccaaaaaatttttttttgataaataatgagagattgagaagactttcagatagtgtataggggtaggaatatttctataaccccattattatacattatttggaacgatcaattacaaaggttggaaaatgccgaaggtgtcgatccagtatgcgagttcccctttgtttactctctaaaaagaataagtctgggggagagaaagaacaccaaagaaaaaaaaagaaatataataaaagaatggtcgatttatcatggtatagttcaggaatgagtctagaaggttcttaagcattcacttgattgatgagacccagcgatgatagcctagtggatatagttgagtgctttggcatagaatctaggatgttgtgtgggctagcggagaattacatggtggtcaggatttgattagaactgtttagttcatggatttggtttgtatgatcaaggtaataaaccagagagattgggagtttctatgtttttcaaacctctttcacagattcaaccttttgttttgcttgagggcaagcaaaagctaagtctgggggagttgatatctcccggtttttactgatttctaacacagtttcagaatgatttttagagtctttctagtctttttcgtacgttttaagtcattctaggtacacgcacacatctgggaactatggagtacaataaggaattttggaagcttttcagcaataaagatcttgaaggacgtctttcagaagctggtgtcgatcgacaccacacctgtgtcgatcgacactcttgtcgctgcgaggagaatattcgttttacaccaagtctttgagaagccctgaagttttccttatttgcaagatagtccctgcacgtttttagagttaaatacctaattgtttggtcattgttagacctagtttttgttcttgagcttttgttacactttagagaaaagaatccaatccctaaaaagagaggattctgaactcctttgctactattctcaattcatcaataaaaactattcagattatgatttgtgtttctattgtcatgtctgagtaatcaccttgttgggtctagagaatctcaatagggatttagatgtattagtagatcgaaaaccccttaggattattcttagagttcttcatcttgataattcttaatgctagttttagattgatcacctagaacttgatattggataatgggtattcccgctatatgtatttgttatttgaaccatcatagatgagcctaggcatttaagaaagaacatgtaggctcatagaagggctttggtttagatactaggtgaactaatcaagcttattaacaatgcatgctttagcataggatttctcggcttctccggttatcttagttgtaagtatagagagtttcgcggaacgccaccggttactctagaattatagttttagtttgagaacggtgcgataacaatcctgatattagctagatctacaatttatctatgtcccgagacaattccttagacgtgacgctttaatcacttgaatctacaactcatttacttgcttatttgtctatattattcaattacttcattttgcttattaaacagcatgacaagtctattgtgtgaacatcgagagctcagtagaatttgacccttaagtgttttggagagagaatcaatctgacgttattattaagagttaaagaagagttattgttgtgtggatagcgtcgacaatcttgttttcgtttttgctccccagaaggaaac

SEQ ID NO: 14499 - DNA, 3000 bp, Unknown
  misc_feature (1)..( 3000): cDNA_ID_3017623_gDNA_ID_2684125_Annot_ID_191058 3000 nt of promoter + ATG
gattttccctatgataatattaaatctctcaaacgaatgtgatatagctaattacgttattaccttccatatattttacgttattatcttccatatatttcagaaaattagactttttttttataagttaattatattttcaagttttatattaatacatttaaatgttaattgatgatgtagttttgcttttattgttttatttttaacttcggtttagatattatacaattatgataaatacaaatcttaatattctattatagagtcggtttgttcgagcctatatcatccattatcgacatactcacatattcttaaaacctttcatacttattattatattgatcatggggtctattcttcgaattactttgtttatctgagggaaattaatcctgctctagaccgatacaagattaaaatacgtgtggttaggcttcggcgagcatttaaatctataggtattgttgtatttaaatctttggcgagcatttaaatctatagttgttgtggatggagaggtattgttgtattttttgttcttaactatttgttgttataatgtatatgttgtcttttatttgttattttttccaatctttgtattattaggaacgagaattcatgcgtccatcgaagagggtttcgttaagaggtttcagcactagtttattagtggtgaagccagaataatcgacactttcaattttgttgatcatgatggtaactataggacgagtcctttctgtttcaaaatagtcttctattgaattactacggtgataccctgtgacgattttccatctcaagttcccgagaaatattttaattaaggagtttgctgaaattttgtctgggaaattagacaggcagatattgtttggtttgtattaatattttaattggtatgtttttttatttctactttttactagcattatgccccctgctatgcagagagaaaattacacattagttacagtaaataagtgatttataccattaataatagcaaaagaacaaaggtagattttggactataggtgaagtcgaaacaaagactgtcaatccaaactaaattcatatatttcaattaaccaagaatctaaaacctctaaagaatcacagaatgtcaaaatatttaggttagcctaaattctcaaagtgagatgacattttcgtgatccaaaaaatacatgagattaaatttttcagttaaatatttttttacagaggaatgaaagaaatttaaaagaaaatcaatcattgtctccagttcatgtgattagcagtaatgaaatgaccaaagatctgtacttaagattgatgaatcaaatttgaatacaataagataaaagagattgtggtcatttttagtcaacatggagtactatgaagtagtggagcaaataaaggaggataaaaatcgtatgttaagtaattcaaatcatagagatattacgtattagggaagtagattatgcatattaattagggaagtagatgtcccttgtaatattttctgaaaatttatgaagttgtcgagaaaaacatggagtcgaaaatttatgaagttgtcgagaaaaacatggagtccgattggtgacctataaaggaatacatggaataaagagtaacatgactaaaaagaacaaacaggaaaagaaaaaaatgataaaataggaatgaagaggaataggtgcagaggaaaaaaagaacaaatgttactgtaaatgataaccaaaacatagaacaaatagtaacaaaaattaaaaaataaataaattattttttaaataaaatattaaacaaaatagccaagttatcatagactcaaacaatttcattgccaagttatcacgtaacttgtatggcttggttttctttcttactataagttcacaaaatcagagagttaattgtcgagtacttgatttgcgtttgaaaatatgagatcaactatttataaaagcaaatgatgtaattgagaactgataaccttggcatgtctttgggttagtcacgatggtataagatttttctttttctgaaaatgtttcacagggaaccctaaaaatgaaatccatgtcttgttacagtcagtttctcaaaaatatgtgattagatgagaattgtaataattcacaaagtataaagcaaaataatgttaaaactgaaaccagaataataattgcaaaacgaagagacatatgaatctcgagaatatgaacaaattgataccttaattacaattacacttgttttgttcttcagccataattgacatggaaggggaaaggagagtgaaaatgaattatggttcgagagatgaaagtggacaaaaatactgtaaaattgtaaatctgccatgacgtggagatggaggaagagaaagtaattgatctgaaagcgagaaatttgggaatcgtaattagaaaatccgcgaagaaaattaaacaatataattagcaagaacagttgcaagagaagatcgtgaggaagatgccgagaaagaaggaaagattttgggattaattttctgtaaaatttttattaatgagtaactaattattgttttacgcttcaaaacacaataaattgttactttgcttacgtgtcagatggagagagtatcagttattgtaaaagtgactgttgatttagtataattagatttgtttggttccactaaaacaatgggatagctaataaatcgaatactttaaagggtttcttctatgttggggcactttccaagtatttaagcccatttagagcactttgaagggagtaggcactttttggagattttctattgtttaataaaaatcaatacaattctacccctgatgacgtcaactgttgcgctagctatggttaatgatatgtcccggtttttactgatttctaacacagtttcagaataatttttagagtctttctagtttttttcgtacgttttgagtcattctaggtacactcagacatctgggaact

SEQ ID NO: 14500 - DNA, 3000 bp, Unknown
  misc_feature (1)..( 3000): cDNA_ID_3017611_gDNA_ID_2684125_Annot_ID_191061 3000 nt of promoter + ATG
ggggcaacgtgtttatgtggaacctcaacgtttcacaaaatccctcttcttcttcgtaattgtatctctttttaaattttgagtaaacttcgcggtcctctcttccagcacaactcttcaacataatgtataataattcggtcactgggtagacttctttagtatatgtggcgatctcaattgcctcttctatgtcaaaaaataggaaagccgaaactaggcttcgaacatacaatgcataaggattttttgctttacacatttccaaaaaaaaggattgtagacactatcaaggctggactagtatacaaaatttctagatttgtccaaccttaccgatttctggctatctggtgaagatacagctaccattccctcccttccggagataatccaattctttaactcaccaatctcaccttcagctatatagctaacaatttttgcaagaatgcctgcaggcatgtggaagtttgttgaaggcccctacatgtgaaaaacggattttaatttttttataaatgtatgttttactcttttataaagattgcctcaactcttaccttttttttaaacccgacgattgattccagattttgactacaagtttgttcggccatccgtcgaggagtttgttgtcttctactacagatgtaacgattgggattattggttgaaacagaacgatgcatgaagtgcctttctcacaaactattttggggaccatagtatagatctttaaggtatttggagcatatgatccctaatcgcacctttacttatttataatttgattttaaaatttttggggggaaatatcccgccaaaatatatgaccacgttgatatttatagttcaacaatatatgccctataggtattttttgggttctcaaaccacgtggttttgttatgatggataacataaagctaatgctgtgtgttaaggttaattgtttaggttaaagttttaggatatagggttgctaattatgtgtaattggttaagtgataggtattaatagtttatttatttatttgggtttagggtttagggaaatactgtttaggaattatattttagggtttagggttttgggttttgggtttagggtttaggtcttggtgtttagggtataattattattgtctggattttagtgtttagcgttagagtttatagtttaggacattagtggtttagggtttagagattaggtttaggttttagggtaatgttatagggttttggggttaaggtttagggtttagggtttactgttagggttaagtgcataatgtttagggtatagtgtttatgatatatggcttagagtctaggtttaggattatgtttaaggtaatgttatagggttttgggttatggttttagctttagggtttagggtttagtgtttagggtttaccattagggtttagtgcatagtgtgtatggtatatggcttagagtctaggtttagggctatgtttatatgaatttgacaatatagcctttactatttagaaacactagtgaattaaagagataattatgtattgtcttaatgtggttatgttgtgatggatagtttatttaataacttatgatttagatgactgattactatattctttattttataatttagatataattttatgattaatacggacataaatatcatgaaattgtttttgttataacgaatttaattaaaatatgtcattcacaaatatctaacaacatattaagaatagggtttaggatttgggttttagggtttagtgtttagggttttgagtatagttattaggatataaggtttatgatttagagtttagtgatgagatattttagcttagggtttcccaatagtgtgttgtgcatacggattttacaatatagtctatactatttaggaaaactattgaatttaataggtttatatatgttcttaatgtgaatgtgttgtgatggacattttatttaataacttataattttgagaaatgattattatcttaccaatttaggtatatgtattatatgattttttaatgtatatataagtttatgatttatacggatattaatatcttgaatgtagattgatataacgaattggtaatcaaaacattaagaatataaaattaaaaatatttaaaataaactaaatttttgtgataatcaaaataaaaataagaatataatataagttattaaaatctcaagctaaacattaaacgagaaattattacataaaaaaaaaaaaaatcatgaattaaccaaaaattattacataaaatatttaaaaaaaacaattcctgaatcaaccatcaatctataaccaacttcaacttcacgaatctctgcattagaaaacacttttgatatagatccatggctcacaatcttcactccatttgccctccaatttgacttcaaaaccttccaccaccctagtgcaacaatcatatttggctttccatacaatcgattttttttttcaaagtcagtagctgtctgcccaaaagcctcacacgacaatacttctttgctatagcaataagtatgatcaaaatcttgtatacaaatttatgcagactattttatataaacaatataaaaataatttactctctagcgatccatgatcttgaacagaagggtgtaaccattaacgtcttcaacgttgccagtatcatttctcaaactcccaatgataagtgggcattttgcctgttttgagcatacatttatcatcactttagcatcatatcatcacttttttatatcatttgtcatcatttgtcatcactttgcatgtttatgatagttttacatgcatgttgcatatttgtgttgttttcaagtgatttggagctgttggcgagctaatttgaagaaggggacctgatcactgcaaaacactcgaccccctggtcgagtagatgattccacgacttcaacaaaccactcgaccccctggtcgagtagatg

SEQ ID NO: 14501 - DNA, 3000 bp, Unknown
  misc_feature (1)..( 3000): cDNA_ID_3017532_gDNA_ID_2684125_Annot_ID_191083 3000 nt of promoter + ATG
atataaagacaaaaccataccaactaaaacccaaaatcttattaacatgctttctttcacgtattcttttctctgcatttgttattcttacagatccataataatgtgttcatttcaaatgtgttcatacggaatcttgtttactaagcatatccatcaccccaagtccatacaaccatgtctacaccgttgtagaatcacaatacacaatttctataaaaaagcataagtaataaccaccaatttcaaaaactatgtccactacgatgctttgcgtttatattctaaccctttacaagtagccatccactagcgaccattcaatgttgaccatatagttgtagggatcaattacaattttcttgtaaatggttagagttatgaccatatgatgtatcattgtagaatgcgcaaacaaaagaaagtgctaatttaccgagctataaacacattcacagcaaatcaaagacatagttgttgtccattgatgacagtccaaaaaatgtagtccatatggttatctaatgattcacatggtagttttatttcaataaacaagtctatacatgaccaataaacgccaatccaaagtacattatccatttttctttgaccatttattcacttgtgtataaacaatcccatcagtaggacaatgtcagttatatagcttttataaagaatttaacgaagatcttatcactctcaatgaagaccattagttcacttggataaacccgtctatactaatcatttgtaataggtataagatagaaggatgtgtccattgccataaactacagatttttattcaatagaaattcaacaaatatacatctattgtataacgtcataactcacaaaagttactttgattttcatcgtgtctcaacctctcgtttatttcttcatcttgactttgaattagaagtgattactctcaggaaatcaaatcaatcagaaacaatactttcaaatttatagatctgatgtggaataagattaagaactttctaattttgtatatcagagataccagagtaattaggagcagagaggcaccaaacgaagcgacgaataaggcataaagctccctccgccaccgccaccaccaactacgtacgccatcatgtcttgattagcttttcaaaaacaatcatagcaaggaatcaaagcaaatatgtcggagattagaagataaagccctcatttttgaactttgatttttcgtaaaagatttgatattggttttggaaatagaaaaataaaaacgatgaagaagcgctgagaagatatgacaaagagaatgagtttgcagttaaaaagggtaaattggacaatttggtttggcaaagtgccttatcttttcaaagtgtctaaatccgtacatagttttttaaaagtgccctagaatgtaatattttcataaataaatctatggtagtataaaaactataaatcttagaaacaaaaatatataatggtataatatgaggcaagcccactttaattggttgtatatctaacttttatctaaaagtttttcaaaaataaataaataaatagatatattaatatccatttctctctagagtttgtaacatctaatacctaaatattttagaaaatttagtttgatattaactacccaactaaaccaacaattaaatttgttcacacatatgtaaagtcaataatacaaagtaaatgacaattaattgaaaaccaaatctcatatcatttatttgttttccaagcaaccaaatatatttgaaaaaaaaaatattatataatatatcatgcaattaagtaacaaattaaataaagctatggttgaatacaaactatgaatcttagaaacaaaaagcaaaaaaaaaaaagagattattctagggggtgaacccaattatttttctatatattcaacgtttttcttcttgacacactcaaatctcattctgtttatttggttttcaaacacccaatatcttctcatactaaacaatcttgagtaaattagtgtttcctaatttgttctcaccacaagtctcaagccacacaaggaagacaatgatgataaaagagagaaaaaaaaatcagattattggaggtgataagagtaacaatgaagaatatggcaatgtagaatatctctttttttttttcctttagcaataaagaagatataaacaagagtatgagttttgcaatcagattatttttttgctcttgttggtctgcgtaattatcttcaatagttccatttctttaagtttccatagtcactagatgtctagatttatatttcgtttctgatttgcttgggctcttcttaattttgctgatatgtttgaaaaatagggacatgagtatgagacttgatatttcattcaaatttttgttctaagatgtcctgtttataaatcacattcaaaagcttttttccctccctggcacttttacctaggcgaaacaaaagcagaatagagctttcttttaaccggatctcaccaacttccccaacccatttttagaagtttgtaacggtcccttcgtggctttggcttttgtccaacggtcggatgaagttttccgttgaagtttcgcttcttgttaaagcttcaaagttttccaatagcaagttccacaacctgtgaagcttagatccatatctggtaccttacaaccccttaaccaaaaccaaccactaccctctgtttccatggcaaaccgaatcccctatcacctcaaaggaaaagttgtggatattgactttcccccccccccccaccaaagagaatccgagcccctgaccttgatacctttgacctaattgaagccaactccctaacccttatggatcgtctcaccaaccctgctggctaaagattatggtctttgttttctttcctctctaaccggtggaacctaaagggtaaagccgcaggttcagatctgggaagaggttgtttccagttcagctttgaatttgaggaagat

SEQ ID NO: 14502 - DNA, 3000 bp, Unknown
  misc_feature (1)..( 3000): cDNA_ID_3017557_gDNA_ID_2684125_Annot_ID_191076 3000 nt of promoter + ATG
caggtgtcaaaaaggtagtgcagcgtatcataagctatagttttatacgtttgacatccaacataaacaaaaaaccaattgtttcctacctttttttttttttacgcaggttgctattatccctgaaattcacataccggcaccagtacttgctaaaattgttagctacgttgttgaagaagacgtgtatgctctgaaaccctttgtgaaagctggaccactatttaaatcggctttgtattcaaaggaaactctaagttgtgtacgcgttgacaaatctcgttattacatgtggtggtccatgacgcactccatctattatcatttcttcacaaaatgtcttgaagccaaaaattcacatgctttgaatgctgtattgtacaaaccaatagcatatgagaattttgcagccgaatgctatagagctaccttatgggtggagctttacggagagtatgaagcatagaaatcaatatgttcataatgtgtccattgttatcttgtcatgtacatttctatacttgatatatcttatatcttttgaagtttaatcctaggtaaattcatccattcctccaactaacttttttggttgacatgaatctgttgagcacgtttgattaagttaatttcccagaaaagattctcaaatgctaacccgtttgggtcataaaactcagatccaatatttatattacatccaaacggacggttatcggtggacatgttattttggacagaaaaaaagattatgaacaaatataaattgatgatatccgcaacctgcttcaagacgaatttccgaggtcaaaccgaattaatgcttagtacaagacaaattaaatccccataccgtatttcaaactctattttactttattgaactttcatagaaccaacgtttttttaattaaaagttacaatgtttaattccttcgacgaatcaacacgtcgttatgacagtttacatcgtttcagtttgtatagattcaactgctactcacgatttcatcaagacaaccacatcacaaacgcaaaacaaaactaaagcttaccatatttctcagttttcgttactctttacttctcctgttcacgatggttcaacatcataatctttacgagttgtctccgatggttactggctggatcatctgtgtcatggtattgagaatttaaattgctcaacccgaacgatttcaaactacgtcttgtcttggccgatgaatgggtaaacaattttcttcaatttattttgcaatttgcggaatttttatttacccgtctatccctcacccctaaaatgttgtttgtaacagggcacccaaatagaagcaaccatcggacctcgtttctctgccttctactttgacaggatccaagagaattaatggaaaacgataagtacgtttctcgttcgacctaactgcgaaccaataagaacaactcctcatgagtttcgcattctattcatggatcacaccattatcacttcttccacacctttagcaactagtttactcaacaagttcactccatttgactacattgtggatgatgttgttggcaaacataccttggttggtaagtaatggcttcttcataaatttcattcacatttttcaaaaaaaatatttttttaaacacatatctccgacatatttcttatagatgttattggtgcactcgtgaagattgggattctcactaataccgcaagtaacgggaaagatacggtcggattcaaactgccgttcatgatcatggataaaaaaacacatttcttcaacatcaattttcagtttttttccaaacatatcatgtttatacatttttgtagtaaggttactatataatctcatatttttactgattttcagcaaagatacattggaatgcgaggcttatggacaaattgcagtggacttggagaaaaggtttcgagcatttcgcaagaacaatgttgttattgcacttgcttggtggaaggttgttagatattatccaggttgtaactggtttaagattgttagccatgcgccaatatcaaccatgtatcccgaacctgatgttgaggaagttgaagaaatcaaaatggttgtcgactaatggaagatgcttagaactatcaaagtgcttgttgcttacaattgttatctcatcttcttttctgtttttttcaaatcttatgtttacctccaacaatgttttaatatttttataaatgatattatatattaataaaaaagttatttatttattcaaaatttctcctttttatttattgcaacaaaaacttagattaagcattacaatagtaatcaagtgtctgaattaagtttacctatggaacattgttgaactgttttaaaactgaagaattacccacatacaggatcacaactgtttgtaaaacgtcaaaccataataacttactcaaactgtttaaaattctatttctgatgttttgttgttatgttaattcttgtttgcattccatctacatttctatataagcgaagttttatcgttttaacaatattttttttgtctttaatgacttcagtctatggatataaaatctaatctcttctcaaatttacgaaaaaaatgaagaaaaaaaatttcgaacctaaatccccataaataagttccggctaaattggctgtaacaaatcactgtagcacgtctatgtaatatattatagaccatgcgtatatatattcatggacgtgagaatatggacatatctaatttactatcacgaacaattttttggaatatttataggatccactaattatattcggtaacccatcgctccaccacaccactccctactcatttgtccagagaattagggttcccatttcatcacgatctcaaatccgtttcccttcagcctagttcggtcctctttaattatcggtgtttcttcaaattccttagatcgttatttgttcactttcagtactatactaatttgataattcaaaatg

SEQ ID NO: 14503 - DNA, 669 bp, Unknown
  misc_feature (1)..( 669): cDNA_ID_2730160_gDNA_ID_2684126_Annot_ID_137181 3000 nt of promoter + ATG
aagcttcctgaaaccgcgacgccatcaaaaagtgaagatcaacttagaattttggagggaaaataaaacttgctctgctttgcttttgacaacgaaacgaactgatgaagttgattcagtacggaaaccctagttcgaatcgcagtgacgcagatcagatcctcaattatttatttcttcccgagtttaacaaaaagtcaacgtgctcgttttttaaaacggtgtcggttagatgatgggctaagcccaaatccttttgagtccaaatacggagaccagagttcgaagcgcaagtgacggctttataatctctttatttaataaaacgatgtcgtttttgcttaagcaataggcccaaataagtaaaaagttcaaattaagggttttgaaaatattcgccgtcgccgatgtcgggaaaccgaagaatttgaggcaaaaaaaattcgtatttccggtgagtctgaagttcctgaattataaatttccgatctttgttaaattcaccattcgttttcctaactctccgtcggcaaaaggcgacacaatgaagcacatataaaactgaaaatctataggaatatatatacacattataattctctaattgcattggcattggatttatctctttgttttacagaagagagtaatctctggaaagaatcaatg

SEQ ID NO: 14504 - DNA, 3000 bp, Unknown
  misc_feature (1)..( 3000): cDNA_ID_3017649_gDNA_ID_2684126_Annot_ID_137187 3000 nt of promoter + ATG
ttaaaacccactcattgctagtacacatcaatccacaaacaggaacacaaactccaaacgagtaatctttagggacatccatatgattatcaacaactacaagatttgagttctggtctgaaatcagatactcgggggatgagaagaaagaccacttaccctcagcttgaaaagtgattaggagatgtggccgagccgaggacctcttcaggaacaggttggtgagatatggactgcggagaagagaattccaatcatttgacacgcaacggaacctcgcggccgatttcgcaggcaccctggagagtatttcgaccatgagatcagttggcaacgtacccgagttctctccatattcacccactgaagaagatatggttagggcaacattttccttggagactttcctcttccgttttttcatcatggcggacattgcacatgaaaaagaaatgaaacccttagagttctgagtaccgatagacaaacacaagacgaccttataaatgaaacccttacagatccactagacagacacgattttgccacctttcggattatgtctacctaccacattttttttttttatctttctccctttttctaaccttatctttttttctttaatttcctttttgtagcatccttattagataccattacatatatagataattttatctataatttttcttcttttccttctaaattcattgataccaatcgagattacaaagttattatacaaattatttatctataattaggtagtactttttaatgtatatatacatacatacactatactaattacccaatcataccgttgctttcacgcctttttgtatatttttaaaatgacttactaaaatattgagtgtgattatcttgaaaagatatcaaatttctatttaatcaaattgaataaattttgagttcaatttattatatgcataaaaaatatgaaaaggatatgactatgaggggatcatatagttttatgaaagtagatgaaagagaataacatacagtaaaagtaggttttagattagagaaagaaaagcaatggattaggtcgatgaaccgcgaccaccacggccaaatcgtagtacattgattctcttgatatttttgcgtaggcttgattggccttcctccttgggcttttagagaggagtcacccatctcaaaacaagtatcaccaaatcctgagtttaaggaagcaaaaatattgctttcaaaaacattaactagattttcatttgccaatgaacctcgttgggtaggaataaatagggtgtccacagatgaaggagtatcaaccatagaaagaagcctcagttggtgcagcatttgaaaaggctagtaaatttggcgtttattgacgccagtagagagagagaagctaagtatagtggcagatggcgttgctgggggggcatactcgtttgtccgtgatataacgtgcttaacaatttcattatggtctctacatttttgacgaatgaatgcctatcacctagggttttcttgtgttttaggaaacattcttcctcaaaataattctccgcatatcagatatatatcaacttaactgagaatagcgattagtgcaatagtttcaaattaaagaatgatgtcctacaagtaaacagcctattaatttctcagggacaaatctgtcagtaaacctcggaaacaggcgtttcggtatctaaatacaatccaaacttagtcatatgtagggtttactgtttaggtaagcgagcgaaattaaccgaaaaagtgttatagcccaacattgttgcattgattatagctcaaaactcatgataaaacctgtcccaagtgtttgccaaaaaaagacatgttccaagtaaaattactaggctttcctaagaataaaataaatctcaaaaaattgagtcgactaaacatcaattgccttcaaaagataggttaaatctattagtcaacaatccggatacaaaatcatcgtcactctctcccttcacgtcctcctaaagatgattcatcacaagaacaaattaaaccaagaaattagatatttatattgaatatcaacagtaattacaattatgaatttatgagtatagtatattaattagtaaaagggttcaaggagagaagaatacgataccttatttttctcttcagctactggggcagcttgagtggcacttccagatgaaagtgcagaagaaaaaacggccatgggagaagcagcagatccaccggcaccagcattcatgatgagatcatccatgtttttgttctggcggaagactaggccagtatgattcaatgttcaaattggctgttttcaccaatgttgacatctttctcagcctagtttacaagtaaacaaaatagtttgagtacatgttaattaaaacaaacaacctacaagttaattaaggctccagtaggattgatgtcaagattgagcctagaaagtacatacggtgacatggtcatggaggaggagagctgcgtaagtgcaagctagctcaccggtggccattgtaggctagctcgcgtcccacgaaagatctacaaaaccatcaatagagctcatcgattcataatctgaacttcaagtgaaacataaaaacaaaacgtgtagagtctctgaatcgaacctgtaaccaaacagaagattaggggttaacgtacgaggtcactatttatttcgatagagttattagggtttctagaggattattaatgtttcgaaatgggcacgtgaatatcatgtgcggcccagagaaaatttaggactggaatttcatggcctatatagataaccaaaattgttcttattaagcctcagaagcccaataaaaggcccaattggacaacgacaaagcagaacccgagtcgttaccacacacacagtcgtcactcaccacctcaccgttccttatccatttggctgacgcaaaatcgaatcggaaccctaaaatctctccgaaagcc

SEQ ID NO: 14505 - DNA, 3000 bp, Unknown
  misc_feature (1)..( 3000): cDNA_ID_2730148_gDNA_ID_2684126_Annot_ID_137189 3000 nt of promoter + ATG
ttctttgctgaagacgggaaaacacgtgtgtcagatataaaaacatggatggggaagttcaaagacaagaatgtggcaaaatgtgctgctaggatgggcctgtgcttctcctccacatatgccactgtagatgtcatgcctcacgaggttgacactgaggttccagatattgagagaaatgggtatgttttctctgacggaattggtacaatcacacctgacctcgctgacgaagtaatggagaaacttaagttggatgtgcactacagcccttgtgcttatcagatacgttacgcaggtttcaaaggggttgttgctcgttggccatcaaaaagtgatggaatcaggctagcccttcgagacagtatgaagaagttcttttccaaacatacgatcttggagatctgttcctggacgaggtttcaacctgggttcttaaatcggcagataattacccttctatccgtactaggtgttccggatgaaatattctgggatatgcaggaatccatgctctataaactgaaccgcatccttgatgatacagatgtggcatttgaagttctcacggcatcatgtgctgaacagggaaacactgcagctatcatgcttagtgcaggtttcaaaccaaaaaccgagccgcatctacgcgggatgttgtcttcagtcagaattgcacaactctggggtctcagagaaaaatctcgtatttttgttacttcaggaaggtggctaatgggttgcctagacgaagcagggatacttgaacatggccaatgctttattcaagtctctaaaccgtctatagaaaattgtttctccaaacatgggtctcgttttaaggagacaaagacagatctggaagtagttaaaggctatgtagccattgctaagaatccttgtcttcacccaggggatgtaaggattttagaagctgttgatgtaccccagctgcatcacatgtatgactgccttattttccctcagaaaggtgataggccgcatacaaacgaagcttctggcagtgaccttgacggggacctgtactttgtggcttgggatcagaaactcatccctcccaacaggaaaagctatccggccatgcattatgatgcagctgaagagaagagtttaggccgtgctgtcaaccaccaggtcaatatctacttccccactttttttctgttagctgagatgatgacgcttaagataaaatggacaagtgattccagtataactctctgatatttctggaagtggtggaaactttgtttttggatgcttgtagtgattacttttgcttgcttctgagttcatagattgcgtggcataggttgttaacagcatactgtgttcatcctgtaggagctaagatgatgacatttaagaaaactttgtcatatattgttgattctgatttgtatttttcgcatgccttactgtgactgtgactgtttagttactatcaagggcagtatcatgatgctagtagcttctgccaatgtagttatgaattctttgttattttttcttgctgtgcttgccaagtcttgggtaattgattgcttttgttacaggacataatcgatttctttgcaagaaacttggcgaatgagcagttgggcacaatttgcaatgcacacgtcgttcatgctgatagaagtgagtatggagccatggacgaagaatgtttgctactggcagaactagctgccactgcagttgatttcccaaagacagggaaaattgtgtcaatgcccttccacctaaaaccaaaactctacccagatttcatgggaaaagaagactaccaaacttacaagtcgaacaaaatcttgggtcggctttacagacgggtaaaagaggtttatgatgaagatgcagaagcttcctcagaagaaagcacagacccaagtgccatcccttatgacgctgttcttgaaataccgggatttgaagatttgatccctgaggcatggggtcacaaatgtttgtacgacgggcaactcattggtcttcttgggcaatacaaggtgcagaaagaggaagagattgtgacgggtcacatctggtccatgcccaaatacacaagcaagaaacaaggcgaactgaaagaaagactgaagcattcttataattcccttaaaaaggagttcaggaaagtatttgaggaaacaatccctgaccatgaaaatctcagcgaggaggaaaaaaacatcttgtatgagaagaaggcttcagcttggtatcatgtaacttaccatcccgagtgggtgaagaagtctttagagctgcaagatccagatgagtccagtcatgcggcgatgctgagttttgcttggattgcagctgattatcttgcaagaatcaaaatccggtcacgggaaatgggaagtatcgactcagccaagcctgttgattctttggctaagtttcttgctcagcgtctctaaaaggttatgtttaatgccgtaaggccactctgccatgtatctgtggatttttttgtgtgacgaaacatcttgtctttgcaaaaactgcttgctgttcaggatttgtatagctcaactgcttgccattgtttgtgtaatgtattctactatattatcgtcaaatatgctcttattattttcaaaacaaatttgatttgctcttattatacttgatgttggttaactggtttgattaagatgaatcaaatgagagtcttgagacttttataatcaaaatgtgaaatacataaaatgtacttattatatgattaggaaaatatctgaattggtaaatttttattgactcctgtatttatctgtgattataattaaacagttaaatgacttataaattcattttttagtgacattatagggctttccttataaggccttaaaggcccattgagaagctaattccgataaacattgacattctgaaacacttgagctgcaacaacactttttccttcaccagtctcttcctcgttttggtgagaaaacgatg

SEQ ID NO: 14506 - DNA, 3000 bp, Unknown
  misc_feature (1)..( 3000): cDNA_ID_2730144_gDNA_ID_2684126_Annot_ID_137190 3000 nt of promoter + ATG
cttagtcgaaatccaaatctctataatctcacgtgtgttgtagtggttatataacacagccagcttctcatctctagcccatgatagagtcaaatagtcaaaattaggagagggagggttaaacggcagagacaaacgcggtccaaatctctcggttgtaaaatcaaaacatagtaaataatctctcggttgtgatatcacttcttcttcttcttcctctattgttacctcttgaccgaaaaagtatgaatttcccttcaaggacacgccactgtaataaaacagttcacccctgtggggattaacatcaaaaaccctcctccatgaatcagagctaaaatcgtagacatcattgtcgcgtccgcgaccggttctgtacttcttggcatcataaagaaacctcaagattttgtggttacggttgttgtcgtgtccaagagcaaacacgtcatatctgtggaatgtgtttctaagtcgaatccatttggtttgacacaaatacggattccataccacaagtcccgagttgtcttcggcgatgcataaaagagaggttttcatttgagaaccgtttctttctctatctcctactttttcctttttttaatagtatctcatatcgagacaatggatggaggttctttagaacaaataatggcagatggtttcagctatggcagtttctccctaatggcctactaactttatattctctccggcctctgcattgcttctatgactgagagtatattgagataaagaacataatagaggtagatgagagagtacatattcatcagatgactagcattttctacgaaatggtgttttgacaattcaaaatctaaaagaaatcaagagagatcaaatcccaagtttaagctcatgtgtaaactatggaccttaagtactctattgcatagaacggcaggccaatgaagtcttcctctataagacaaatcgatgatattttcatcttcagtctgaaaccaagatttcaaaatgaacttcaaacactatacttgaaaaagtgagattttgtcatatatacactcatacttgtatcaactatttcttcaaactaaaatcagttttgttcaaaagaaaacctgatgcaagaaacaaacaaaagtattgaaaagtgactaatcttgcagttgaactaaacttggaacataagaagagcacacaagtctgcctggtttccgctgggaattcggacttactccaatgttgacagatttgaagtatccatcatctccaacgatgtaagccatttggtagcgacaggtcttgatctctttactatcaaaaagcacaacaactttcttctcctcgtcaatgaagaagctcttagcttcaaagtacatcgaaaaatgatccggtaaaccattgactagtgacatatccacagtcaaaaaagagctccaggataccgcattgggttcaatcttagtcgaaatcctaatctctataatctcagctgtgacgtagtggttgtataacacagcgagcttctcatctctaacccaagatagagtcacagtttcaaaactaggacagggagggtaaaacagcagaggcaaacacggtccaaatctctctgttgtaaaatcaaaacagagtaaacaagtttcaatctctgttactttcgtcgcttgtgtcacttcttgaccgaagaagtaagtatttcccttcaaagacactccggtctgataaaacggtatatcacagtcaggattgacatcaagaaccctccatgaatcagagctaaaatcgtatacatcaatgtgagttcttcgactgctttcgttgctctcttcatcatagagaaacctcaagattttgtggttacggttgttgtcgtatccaagagcaaacctgtcatatctgtggaatgtgtttcttggtcgaatccatttcgtttgccccaaatacggattccacacaaagacattcgagttctctttggcgatgcataacaataagccatcgcaatgatagacttgagatatctcgacttgatcatcattactaggtatacttattagcttcatagatggatcaacgaagtcttctttgtcttcgttacggattccttgaagatctaatctcaaagaacaaactctagaatctagaatcatgaactctagaaattgattccttgctgctgtttttctaccaaagatctgatttttcgataaagcattccactttttacaagtagatcgcactgagattagagatgtaaatggaaccctagaaagaatatcacctaccaaatcatctgatagatcggaaattgtcgtcattcttcaaaactttctccagaaatttgtgtattgttcttctccttcagtctgttctctgttgctacctttactgtgtcaatgtcggatctctcgattgtattttcttgataacggtttggtttggcccaggttgtttaaatgggcctatgtacaataatggaaacaaataggaatatattttaaaagcccattaattagacaaatagcacgtgagcagcacaagcacttcttctccagtctattttccccctcatcagtctcagactctctttcgtttactcgccgaagtcaaataaaaacgagagatggtttcagctatggcgggttctccctttttcgcatactcactaatcctctctccagtctccgcattgcttctatttctacctcgtatccagtattagattgaaaaagatctcactgtgtaagtctccagaacctcactgtgtaagtgcttttgtatttattcccgcttgattccaaaattattcaatcaacaatgtattaggtgatcgatttcaatagtatttgtagttggaatcatcgatattgtctcttaatttgatatttatggtcttagatcttccaacggagtagcgaattagggcttttcttcaatattttctcttatcagccttatcatgtgggggttatttctgtttagtatgtttctttttcaggagaaatg

SEQ ID NO: 14507 - DNA, 3000 bp, Unknown
  misc_feature (1)..( 3000): cDNA_ID_2730133_gDNA_ID_2684126_Annot_ID_137193 3000 nt of promoter + ATG
tgtctattaatttatggttagagatactactaaaatatctactcgtatatttgcatattaaatggcctatttaataggcgtgggcaggaaatggtatttgataatgtaattaattagttatttggatatttatttatagagtaagacggcagaaaaaagtccgtgaagtaacggtaagaggaactgaatcaaaccattctcacatttctcaagactctaaccattgaaattgaatttttttctcttttggccaaacaagaactaagaagaagaaaaaacgactataaatagatggcacaagtcattcatcacaaaagagtagctagacctagagaaagctagctaaacaaggataaaacaaaatacgtaaacaccttgttttgtattataccaatagaaagagttaaatcagaatttggaggaaggtgtacggaatccatccaccgtgagaccacaaattgaggtaacatgatgatagaagttttgttgtagcgacgagaacaatgttccgtatacttcatatactgcttaaaaccagaagtgtttatgcgacaacaaccttcatcactagtccaatcctccgaatcctgatgaatgatgaactgtcaactcttgtgtccgcaagttaccagatacaaaacaagagtgtttttgactccatagatagataatatcagaatcaaagggattcattgccacttgaaaacattcgaatatactccaacagatgcaatgttgatttccggtgtcaacaactgccaacattcatcctctaagtgttaatattcagtctccaaatcctcaatattcgatgtagtatttcaatgcagatcccatctcctcgtgaagtagtcaaacatctcttaacattctaacattaaattgaaatcatttagtaatatttgatattttttcttcttttctttgacactgccaattacgatttatgagcaggacttaagattgcatatacaatcaaatgaaagatggagtcacatcacaagaataaaaagatcaatgatcaaatgaaagattttagttttcaggggattttgcatctttcaatgttttcgattgtatcttccggagaaaaaagaatcagagatcgtaattcacacacgaacacgttcgacttaagaaatgttgattacaaattttcacgatgcaaaactgatttatatttaattgaatcaaagaagaatcattttgagatacaaagaacaacaaaagccaaaccaatctggtagtagcaaatcaaaccaaggtgacatacaacaacattcaaaatactttcacaaatttaattaatcatcaaacggtgacaacagcttctttctcttcttgtttactctcctcctttactggttcagcctcagcttttactggttcagcctcagcctttactggttcagcttcagcctttttctccgcttccactgcaacctcaaccttttcgggtgcagctacggcaaccgcctccacctttgcttcagcgttttctgttgcagcgttctccactttctcaggtgcaactactgcagcctcaccagcatcagcagaagaagactcttcgacggctgcaacctctggttgaacagcaggagttgtttccttggtcggctcgaccggaaatgtctccttagcttcgacagaagttgtttcagtggtctcagccactgtctggttctgtttctcaccgctttctgtgttgttctcctgtattaattaatcataccaaaagatcataaccggttaagcccggttcggtaacaaaacctaattaaattttcatatttaaaacctagagattaattgttaccttggctactacgttttcagagacaggcttgttaggaacagagccttcttcgttttgcatgtctgattccttgggtctactcgcacagccacccattattatatatttttttggtttttgtgattttgggttgggtttaggctgtggagtgtgcaaaaaaaatttacacaaacttttttatttttctcttcttttttattaatgttgacccgaggattgagcaaatgaagagaacataatcatggttatatagatgaagatgattccgatttttatggagagcctttggtattttttcttgtgtgtgttgaagtattcaaattggggatggctaagaatagagtttagcagagaggtaagagtaaatttagatagatgtttctctgtatttgaaaagcttcattgatatcgtcaaacttttggaagttttgtggacctctctcgtctcttgttgctagctctatttttagccggtcctagctccagaattttaattcgattttttgaattttgtaacttgcaaagataagaggattacgccgtgtaaacgatgatgaatatcctaatgattatgcagctttttactaatacataatttcatgaaagaagttttgattaggtttccaaaagtcaaagaaagcgaaaaaatctaaataaattaaaaaagacaagtttccaaaagtcaagaaaagcgtaacaccatcccaaaaacaaagtgacatgcaccgaaacttccattcctttccacgtgtcattacatcattcgttctatgacatttctcatcaccttcttttacaacagtcattcacttctcgcttttacccctgcatctagttaatatcccaaagtcgctcaagggcaaaaccatactttaacaatttccaaaccgcgtaacgtacttggtttgccgcgtgtacacaccacgcgctgccatcaccatatagaactcacaaaaggaaagaaaaaaccaaatcaaagctcacatctgccttcttcttcactttaccaaaatcatcgaatccatttttagggtttttgttttctctctaaatttttattgttatcttcttcgcgataccttggaatcgcatctctgagatagataaataattctgattcgtatctttaaatcttgggttcttcttcttctcgcgattcgtttaaaagagcagcatcaatg

SEQ ID NO: 14508 - DNA, 3000 bp, Unknown; identical to SEQ ID NO: 9678
  misc_feature (1)..( 3000): cDNA_ID_3017665_gDNA_ID_2684126_Annot_ID_191116 3000 nt of promoter + ATG

SEQ ID NO: 14509 - DNA, 3000 bp, Unknown; identical to SEQ ID NO: 9668
  misc_feature (1)..( 3000): cDNA_ID_3042953_gDNA_ID_2684126_Annot_ID_191115 3000 nt of promoter + ATG

SEQ ID NO: 14510 - DNA, 3000 bp, Unknown
  misc_feature (1)..( 3000): cDNA_ID_3017681_gDNA_ID_2684126_Annot_ID_191109 3000 nt of promoter + ATG
gacattgaacaaaattgcaacgatcgttgatatagcaggttacccactttggttcatattttgatatatatggaaacaaacctgtatccagcagttggagtaatcttgatcttaagtttctcctcgtaaggaagctcgaagaactgatgcgtcatctctttcaccttatttataagatcatccgatattccatgaccaatctgatccacactcaccaaccataatcagacatctttattataaaacccctaaaaaagaaactcaaatttcgaaaatttgttaccacgtagaagaatccgacgtcccgacatgccctgtccagttttccgactacttccacaacccccgcatcctcagccatgtcgaaatcatcacatttggccagtaaaggactgatgtctgcaacaacattatcacattaactagtttagttagtgaagatttttgctgaaaataatgaatatacggtttcttacgtaccgataactggtagtagggatttgaagtctgtcaccatttcaatattaaggaaatgatagaaacgctttgctcttacgtacgtaaagactactttgcgatgatatattaccataaatggttatctcatttgtataaatacacattaaaaattgtcccttaggatttctaaaggccaaacggagcagcccacgtgggaaatcatagagtgatctgttatcagacatatatttttgtcactcaaataaactgtagtgatcgttattattcggttttataactttttaaaataaaattagtaatttcttagtagctttaatgctttgtgattggtttgttgaatacatttttaaaagtttattcgcattttagataaaaagtaattaccaaagattatacaaatgtttatcatcacgtgtaagttagtttggaggataatgataaataaattaaaaagtgagtgatccaaatcccttgataagagtttgagcattatctagttatgtttgtggcattgtttattcttatcagatcattgcggaaaaaagaaaacgcataaactcaattcactaaataagttcgttagttaattagtcaacaaacatcaaaagcaacaaaagtagacggcacctagctccaacaacagtaagaatgacacgctggtagctaagacaaattccaacaagacggccgccggcgttagtttgccactacatagcccggcccaccctaaggtctcggatccaattcacttgtcagcagggccggctcaatgatatttgagtcttgtactaaaatatttttttgacccacaaattaatcaaaattattttttggccctctaatttaatcaaatttatttgttaggccttaaatctaataactttttcattttagcccttaatttcagttaaaaaaaaattggaccctgagcaaatgctccacttgcacaccccatcagccggccctgatcttgatatttgagtccacgtactaaaatatttttttggcccacaaattaagcaaaattttttttggccctctaatttaatcaaatttattttttgggaccttaaatctaatcaattttttcaaattggcccttaatttcagtctaaaaaattttggaccctgagcaaatactccacttacacaccccttgagccggccctgcttgtcagatatatatcagatttttttttagtaaataataaatcgtcttgctaaggaaattctaattgtaattcacggggaagttaaggactatatagtgcatgctcgcgaatcataccagtttgattttgtttcaagtttgatgttgttgtggatgcatgtttgagggctttacgggtttaaaaagaatagtttttgtcacgttaacaaaaaaaaagtttttgttaaaattggataaaaataaagatgatttgtctcattaagtttgatttgcattacctttttgatacttaaaaaatcaattaaaaggctaaaagcaattgaagatagaataaggaaaattcttcttgattcgagttcaggctaattagttagcagagttccacttgaatttttcaatggcttcaaaataagaagatattttgattgaagtagtcaaagtaaaacaacatgagagaattttcttgtatacacttggaaaagggtcaaagttcatctcttatttttattaatatatactgattattatttgattgaactaaattcaatattcaagtttcttctccatatatattttggcaaccagtatacattatttcagtagatgaaagtcaacattggtgcttgttgttgcatcttgcaagtatggtattggtatggtccagtgcttgttctacgaggtcgagtgatccaacacacttaacacaaagaaaaagaaaaagagagtaaagtcaatactgaaacccatatggcccaaaatttgttcgaagcccaatacataatttggaacctaatttgagaagtccattacagaacatttagtggataaaattacccaactattaatccaccattcataattgtctcgtgcgtttatcagaaccacaattgttacttgttagcttggatataattgactttgttcttctgatattaactcgatactggtcgtactgtctaaggttaaaatcaaatttgatggccctgaaataatttaaaagatctttaactgtattgggcctaagctcattgacgattctcacacttggttttaaatctgagatatgttcttgtttcgtttttttttgtttggttttatcatttatgttgggatcagtttcgtttagggtttctgttgaagtaacggtgtataaataagtttatttggatagatattatgagattatatatctatgattatcttcaaaagttattaactttacacaaattaagttagttataagaaaaacaaaaaaccataatgtaaatggagctcctaactacatttatgagctctttcgtttaattactttttcctctccctcttgagttttctgttcgatcacaatg

SEQ ID NO: 14511 - DNA, 3000 bp, Unknown
  misc_feature (1)..( 3000): cDNA_ID_2730122_gDNA_ID_2684126_Annot_ID_191108 3000 nt of promoter + ATG
tccattgaccacaaaaaaaaaatcctgaagttgtggaaaatttccatgaaactcatgtacccaaaaaccctttatttttttctacactcaagtttcaattaactcttctacgattcctttgaaaattatggtaatgtaggatttcatggaatttaaacttcaaagttcttcgatccccttcgagtctccaatacctactagttccataaaattattttgatagttaagattgacattagatctcactcatatattattacttcattacttaaacatggtatcattccaaaatattatttgcttccataagaacttttgtaattaaaagtcaagacaaaatatgcaactagtaccagaaatactaattcattagaaatggagttcaacaatttgtatgattatcagaaattctaatttattcactagaaatggattcaaacatttaatttatgttgaaaacataacatattaccatcgatctatatacatgtatagtgattgtcacatacacaactatacataacttatgagaaatatcttattctacgaggaagagacgacagaagaagaagagagacgagagatttgatccatgaggaagagcatgcgatcgtgatagtcacgtgcctgttctaaagactcgacctccagctccgccagctgcgagcagagttgctcttccgcctcctccgccacaaccgttcgctgccacaacttaatcatttctgtcttcatctccgccacttctctcgagagctctatgttcctcctccttagctcatccatctcttccgccgccaccgtcacgcatcctcctcggttcgccattaagattctttgtgtaaaaggatttgattgtggttctaactttgtttcttgatttgttgagtgttagggtttgattatgtttctttaataggcgctttgtgtagcttttgcatgtccaggttcaatgtatctgcttcttgatttttatttctcctcacttttgatttcggtcaatattttctccttacttgaaacttaaacatactcatggcttatgtatgcatagaccaccccaaaagagaaaatttactatttttttcgaatgttcaatttttttttttcgtttttttatcacagtttcgctaggttcgatttaaatattttttatatgaaacttaaaccaaattaatttcgaaatttccggtttatccatgttattaactagttttaactttaaaattaataaacaaattgccgtctatacaactataaattgataaatggataaatatatgttaacgtgtaaatagaatagtaattaataattctaatgccgtggtttacacaaattcaatttaattatttataaatctctggtccgtcaaatttgtaataaaaatgtgttggtctgatctctgatgtatgtatgtggtatatattgattacattattgagttagtagggcttgaaataggtgacgtctgaagccaatcactatagtgtttctcactttcttgtgatattgtgagtttgtgacaaggatttattctttagattattaactaacaagttaataatttgggaaaacgctgccgcttaatattgcgttacttatattatgattgaagaactattatgggatatttcacgacatcatacatctacaaccactataaaatagaaaattagtgtactatcaccaaaaatatatttctcctgttccatgaaatttgatgttttagatttttttttgttccataaaaattgatttcttaggttaatattattattatttttattaatgactaatagagagaggaaagaagtagaaattatattattaaattaacaaaaaaataatataaataacataaaagttaattttcttaatttgggtgaaaaacccaaaacatcattcttttaggaacatagagaatatataatagacatttacaacttatacatttgttgataacatgcagtatgttagtttgaatacatatttttcacaacagtaataataacagttgttagaagactaaactacattgtaagaatcgctttctcttgtaatgatacaatataacatataacatttaaaataaaataaaaatctgtaggttttaaaatgttagctacgtagtccataacttcaaaaaaccaatggttttgaactcattccatagtgatgattgcaaatacatattatctggtttacaaaaaaaaaaaaaaagtgttccaattatctagaaatgttgggcctaatgcttaaacagtaagcccatatacttaaacatccgacttggcgcatttgcttcaccttctctaccaaaaaagcgcgtgagattcaggttcactgtatacattaagagcctattgtcttgtctcctgtaaaaccagaagaaaacaaaaattcaacaaaggataacaaggacgtggctattcttcattggctgcattcacaagagtcgaatattaattagtaatttcacagtatagtacattaagattaacgagacctattgtctcctgtaattgaggcaacaagataagggtaaaacgagaaaaacaaaagagaacaaagacgtggctatttatcattggttgaattcaatattaatttaattagtaatttcacagtgttctcaaatcgtgatcgtgtgtgtttcttctacctctgaaactctttttgtttatgttgatcatcatcatcgtcatctgcgtgtaaaacacactcacgccatcgttgacgtctcagatcttcacataaaagcttctattatcaaactctcttcctcacggtaaccctaactatctgtaatttatctctctacactttcttcatctcttaatcaccttaatcatcttaagctttgtatttctagatccttctcccaaaacaacgattcgtgatctccgttctcatagatcagtttcggatttggatatttcttagggatttgtgtgagatatttttagaattgtttcgatttagggatttgtgtgaagaag

SEQ ID NO: 14512 - DNA, 3000 bp, Unknown
  misc_feature (1)..( 3000): cDNA_ID_1029469_gDNA_ID_2684126_Annot_ID_191105 3000 nt of promoter + ATG
aataggccatttaatatgcaaatatacgagtagatattttagtagtatctctaaccataaattaatagacacgtgaatttccccattaaccgccaagaaaagacaaaagaaattgtagaaaatcaataaattagctcaagaaatctgtaatcatttttaaaattgacaataaaaataaataaatataccgtttatttttcaagtaacggagttagattgatttctataaatagttaaaaatgaccaattcatcttcttcttcttcacaaactttctttctccaacaaatattattcagtgccgagtcaaaattagtgttgagaatttgctgcttctgatcaggtctgttttatttaatctctgtgaattttattacttcttcttgttggatctcataatgcgatttatcagctgcgattaaatctgtttgattgaaatttatgcctgattaggaaaaattatctctaatagtggatcaatttcgtttttttaattcgggttttcttgggttatgcagtgagtgaagaaagtttgaagctttgagtaactttgaaacaatggaggtatttggaaaatctcatgtggttgttggctctgctaatgttatttacttatctgctatattgggtcacgaaggacccaatcacaaatgtgattggaaatgcgagaatgagaatgtgtgtgggaatatgtaccgttgcaaactaactgggttgactcatgtttgtgacaagaactgcaaccaaaggattttgtatgataatcataactctttgtgtcgagctagtggtcggattttcccgctttctttggttgaggaacaggcggttaaaggagtgaggaggaagcttgatgatgagagtcaacaacaaccttctgaaagttgtgttaagcgtcgtcgacgtgatgctcagtttcattcttctccttttgagaggtcttttgctgctgtgagtcctttttgcagccaagctggtggagatggaatggagattaactagttcttttctatctcacctagaataacttgcttttctttttcgttttggacaagtatgcaataagagatatttactcatgtgctcttacagagagtctaggcttagctctctgtctgaagaagcacttttatcttagtattgttgaactctatgtagtatttaacgtaggagagactttatgattctgctactttgttctggacgttcttgttttcgctattattaggtgaagtagaataacacccttgtttcagctttctttctagtgctgtctgatattctcctctcgcaccttttcttagctttgtatcttgtttttgcttgcctcttgtaccattggtcattcttttaagtttattgcgacaggtttttgtcacattgctgaaaattgcagtgtaggtttccaccaagtttttcaagaccaatttctttctggtttgtcatcttgtagaatattcctcttcatcctctcaatggagacattgttgtatcctatactttgttcaaatttaacttacttccttgcagtgattgatgagcactagaagttctgaaagttttttctgtttgtgcaggtttcacaatcttgccatgcaagagagtttagttaccattatttgactgttatgtttcttaattctcagtgtttgaggagtaagtctaacaattggaagcttgaatttttctttgtaggtaggtctatgtttgtgctcagcaggcagcagaggaaggacggttgtcgaaagaaatgatacccgacgtaagattgcggatgaagacacaagtaatctaatatcttacatcaatggaactgcgtgaaagaaaggaaagggttggtgctcttctttgcattcaaaaatggatgattctggtacgtagtagcttatttacaactacttgttctttacttaatatatccagacagtgtaataggggctaaaagaaacatcaaataatatatgcatttcccatgtaatggtaattgttggaatggaaaatgttattttgtcagtgaggaaaattctgaggtggatttatattgaactatatcatataagacagaaaggcgaaggtgtggtggttgatgtgacaactatcttactgggacacagagaattttgcccaaaaaagttggcaaagtatcaattgttggctcgtcctctgctataaggtacaatgctggaacatttctccttagctattgattattatgatggaggttatattcaacttagagcaaaatatgtgaagtagatcttttgttgtttgaagaaatcaatgtaatatctaaattatgacatattcttacagtcttctgtgcctttcaatctgctacaatgctttcttcaactttgcagaaatctgtacacattctgattaatctttgacgttttcttaatcgaatatgaattaagtgttgtttcttctgtatcaaatccaggttagaggatgaaccgagcagccaaatcttcagaagttcagaaccacctagtccgaatcataatcagaatcaaaacagcaaggtgtggcagtggctccctaaggttagcatcaagatccaaacctaataccttgagcatcatcaatctacagagttctccctccacattcagcggcattttcgtttgtttttatagtaaccactaagctcaatctactgaaacaaaatatctcgttgttgatgatattatacaaacaagtaaaatgtctatttgagcttctttcatgcttcaaacatcatctaaattcagacacaaaacaagcttctctatacacacccaacttttttacctaaaaagaatggagaaattgagcaattttcagaaatcagaactgagtaaaatgtggcaaagacgataaatgggcttttttcaggcccagcatatcatatataacccaatgggagatgagaaggagggagagataagactgagaagcagagaaccgaaagaagaaaacaaaactctcgaagtcgcaacagaaaagaaacgagagagat

SEQ ID NO: 14513 - DNA, 3000 bp, Unknown
  misc_feature (1)..( 3000): cDNA_ID_2730133_gDNA_ID_2684126_Annot_ID_191101 3000 nt of promoter + ATG
tactaaaatatctactcgtatatttgcatattaaatggcctatttaataggcgtgggcaggaaatggtatttgataatgtaattaattagttatttggatatttatttatagagtaagacggcagaaaaaagtccgtgaagtaacggtaagaggaactgaatcaaaccattctcacatttctcaagactctaaccattgaaattgaatttttttctcttttggccaaacaagaactaagaagaagaaaaaacgactataaatagatggcacaagtcattcatcacaaaagagtagctagacctagagaaagctagctaaacaaggataaaacaaaatacgtaaacaccttgttttgtattataccaatagaaagagttaaatcagaatttggaggaaggtgtacggaatccatccaccgtgagaccacaaattgaggtaacatgatgatagaagttttgttgtagcgacgagaacaatgttccgtatacttcatatactgcttaaaaccagaagtgtttatgcgacaacaaccttcatcactagtccaatcctccgaatcctgatgaatgatgaactgtcaactcttgtgtccgcaagttaccagatacaaaacaagagtgtttttgactccatagatagataatatcagaatcaaagggattcattgccacttgaaaacattcgaatatactccaacagatgcaatgttgatttccggtgtcaacaactgccaacattcatcctctaagtgttaatattcagtctccaaatcctcaatattcgatgtagtatttcaatgcagatcccatctcctcgtgaagtagtcaaacatctcttaacattctaacattaaattgaaatcatttagtaatatttgatattttttcttcttttctttgacactgccaattacgatttatgagcaggacttaagattgcatatacaatcaaatgaaagatggagtcacatcacaagaataaaaagatcaatgatcaaatgaaagattttagttttcaggggattttgcatctttcaatgttttcgattgtatcttccggagaaaaaagaatcagagatcgtaattcacacacgaacacgttcgacttaagaaatgttgattacaaattttcacgatgcaaaactgatttatatttaattgaatcaaagaagaatcattttgagatacaaagaacaacaaaagccaaaccaatctggtagtagcaaatcaaaccaaggtgacatacaacaacattcaaaatactttcacaaatttaattaatcatcaaacggtgacaacagcttctttctcttcttgtttactctcctcctttactggttcagcctcagcttttactggttcagcctcagcctttactggttcagcttcagcctttttctccgcttccactgcaacctcaaccttttcgggtgcagctacggcaaccgcctccacctttgcttcagcgttttctgttgcagcgttctccactttctcaggtgcaactactgcagcctcaccagcatcagcagaagaagactcttcgacggctgcaacctctggttgaacagcaggagttgtttccttggtcggctcgaccggaaatgtctccttagcttcgacagaagttgtttcagtggtctcagccactgtctggttctgtttctcaccgctttctgtgttgttctcctgtattaattaatcataccaaaagatcataaccggttaagcccggttcggtaacaaaacctaattaaattttcatatttaaaacctagagattaattgttaccttggctactacgttttcagagacaggcttgttaggaacagagccttcttcgttttgcatgtctgattccttgggtctactcgcacagccacccattattatatatttttttggtttttgtgattttgggttgggtttaggctgtggagtgtgcaaaaaaaatttacacaaacttttttatttttctcttcttttttattaatgttgacccgaggattgagcaaatgaagagaacataatcatggttatatagatgaagatgattccgatttttatggagagcctttggtattttttcttgtgtgtgttgaagtattcaaattggggatggctaagaatagagtttagcagagaggtaagagtaaatttagatagatgtttctctgtatttgaaaagcttcattgatatcgtcaaacttttggaagttttgtggacctctctcgtctcttgttgctagctctatttttagccggtcctagctccagaattttaattcgattttttgaattttgtaacttgcaaagataagaggattacgccgtgtaaacgatgatgaatatcctaatgattatgcagctttttactaatacataatttcatgaaagaagttttgattaggtttccaaaagtcaaagaaagcgaaaaaatctaaataaattaaaaaagacaagtttccaaaagtcaagaaaagcgtaacaccatcccaaaaacaaagtgacatgcaccgaaacttccattcctttccacgtgtcattacatcattcgttctatgacatttctcatcaccttcttttacaacagtcattcacttctcgcttttacccctgcatctagttaatatcccaaagtcgctcaagggcaaaaccatactttaacaatttccaaaccgcgtaacgtacttggtttgccgcgtgtacacaccacgcgctgccatcaccatatagaactcacaaaaggaaagaaaaaaccaaatcaaagctcacatctgccttcttcttcactttaccaaaatcatcgaatccatttttagggtttttgttttctctctaaatttttattgttatcttcttcgcgataccttggaatcgcatctctgagatagataaataattctgattcgtatctttaaatcttgggttcttcttcttctcgcgattcgtttaaaagagcagcatcaatgaatcagaatcttcatgtattatcaatg

SEQ ID NO: 14514 - DNA, 3000 bp, Unknown; identical to SEQ ID NO: 14506
  misc_feature (1)..( 3000): cDNA_ID_2730144_gDNA_ID_2684126_Annot_ID_191097 3000 nt of promoter + ATG

SEQ ID NO: 14515 - DNA, 3000 bp, Unknown; identical to SEQ ID NO: 14505
  misc_feature (1)..( 3000): cDNA_ID_2730148_gDNA_ID_2684126_Annot_ID_191096 3000 nt of promoter + ATG

SEQ ID NO: 14516 - DNA, 3000 bp, Unknown; identical to SEQ ID NO: 14504
  misc_feature (1)..( 3000): cDNA_ID_3017649_gDNA_ID_2684126_Annot_ID_191094 3000 nt of promoter + ATG

SEQ ID NO: 14517 - DNA, 669 bp, Unknown; identical to SEQ ID NO: 14503
  misc_feature (1)..( 669): cDNA_ID_3019126_gDNA_ID_2684126_Annot_ID_191088 3000 nt of promoter + ATG

SEQ ID NO: 14518 - DNA, 3000 bp, Unknown; identical to SEQ ID NO: 14512
  misc_feature (1)..( 3000): cDNA_ID_1029469_gDNA_ID_2684126_Annot_ID_137196 3000 nt of promoter + ATG

SEQ ID NO: 14519 - DNA, 3000 bp, Unknown; identical to SEQ ID NO: 14511
  misc_feature (1)..( 3000): cDNA_ID_2730122_gDNA_ID_2684126_Annot_ID_137199 3000 nt of promoter + ATG

SEQ ID NO: 14520 - DNA, 3000 bp, Unknown
  misc_feature (1)..( 3000): cDNA_ID_2032898_gDNA_ID_2684126_Annot_ID_137200 3000 nt of promoter + ATG
aagttcatctcttatttttattaatatatactgattattatttgattgaactaaattcaatattcaagtttcttctccatatatattttggcaaccagtatacattatttcagtagatgaaagtcaacattggtgcttgttgttgcatcttgcaagtatggtattggtatggtccagtgcttgttctacgaggtcgagtgatccaacacacttaacacaaagaaaaagaaaaagagagtaaagtcaatactgaaacccatatggcccaaaatttgttcgaagcccaatacataatttggaacctaatttgagaagtccattacagaacatttagtggataaaattacccaactattaatccaccattcataattgtctcgtgcgtttatcagaaccacaattgttacttgttagcttggatataattgactttgttcttctgatattaactcgatactggtcgtactgtctaaggttaaaatcaaatttgatggccctgaaataatttaaaagatctttaactgtattgggcctaagctcattgacgattctcacacttggttttaaatctgagatatgttcttgtttcgtttttttttgtttggttttatcatttatgttgggatcagtttcgtttagggtttctgttgaagtaacggtgtataaataagtttatttggatagatattatgagattatatatctatgattatcttcaaaagttattaactttacacaaattaagttagttataagaaaaacaaaaaaccataatgtaaatggagctcctaactacatttatgagctctttcgtttaattactttttcctctccctcttgagttttctgttcgatcacaatgaatagaaatcatcatgatcatctcgatgctgcggggaaggatatgtggtcacgtttaagtgatttggcggataaagctgatatgctatatgaaagagaaggaatatccaaagaccgcaagagtgtctcagaagaagaagaagaaaagaagacgagattcagtattttggtggatctcgtgggtaggttatgtgatcaagaggaacgtcgtactcttggatcatctcctacaaaaaccaacactctttttgagggtagtgaaaagagccacttggatcatcacttggatcatctcccacaaaaaccaaggtcttcccttgagtgtttttttactagagtatacacgcgacgaaaccataataacgtttctacttcttcatcgctcttcaacacggatgagtttgagaggacggagactaaaagccctacaatccgtaattcccaatcttcaccgtcttcgtgtctaatggagaacacaaaacgcaagaggtatcaaagtagtggtaaatccaagaaaccaaagtttgatcctttctcactgactgcggcgagagagacgccagagtggcttttagatgtgatgagaaagatgaagggagccgaaggaccgatcaaactgatctacgagaagactttgaccgcaactgacgtcaagccaagcgagagtcgtctcttaatacctttcaataagttactcagaaacgacttcttgactcctgaggagtctcgagccatagccatagataaagaagaagaagaagaagacaccaagaaaattggtgtgaaaacgattatcgtgaatcaattctctaaagaatggagtttacgttttctgatatgggtgatgaagaagaaaaaatctggaaatggaaccttgtactacactttgaatcgggggtggaatggtgtcgtctcgggtaacaagctcaaagccaacgacaatattagtctttggactttcaggtgtggtggagtcctctgttttgcccttgagaaagagtagctctttccttttaactctgaatctgatatgtttcatttctacttggaacatttaaacttgattttatcaagttttccattggcagagtagaggtttttggtctatagactatagtagtatagtaacttcttcttttcttttggttttagtagtagtaatttcttgcaagtaaacttaaggttttcctacgattgcatgtgatcttacactttattattggtagttaacttgctctttctctcttgtttactctactttagttactacatatgatttcttctttaatctagtacaaagtttaatctggtgtgatggaattgatccaattgtgcaagtgtttttggtgaattcctcaaaatgtgcttataaaatcaaaatcaggacaaaatttgttgccaagacatgtttttgtttgtttggcatgtaatataatctttagttctagactttgatgttaacacgtgtttagattcagtatgggacttgaaacattttcatttgttacacacaccactgtgatgaaacagatatggagataactatcaagtgctgcaaaatttactgagattccctacttcacctaatttgcctcagtatagaacatcttgatgagataactaacactcgagattgttctttgtgcagagaagaagaacattgttctgttcaaaaaccaagagaacatcagagttttaatagtaccaaaccctttttgttgccaacaagttctcaagaataaaattaaatagccgcttaaccatattgggcctttgaccaacataaaaccatattgggcctaagcccatataatacttatagacagacattgttgtggggaaaaaattgttactcctcttccgttggttctatcttccgcatcgtcgtctcctctgagagtccgtacgcatcgacgattctctcatcttctctcaaacacgacgacactggtaattttggttttccttgttttccacttcaatctaagatctgttgcttttagtttctgtttggtttcatactgtgatttggtttcgtttagggtttctttgtatcgacagatctttcgatttgaatctgaaacccaatctcttcgcttttttttcgattcagggttggtaaattagagttgaaagatg

SEQ ID NO: 14521 - DNA, 3000 bp, Unknown
  misc_feature (1)..( 3000): cDNA_ID_2730114_gDNA_ID_2684126_Annot_ID_137203 3000 nt of promoter + ATG
gccattggtgtgagtgatgcatgcattcgatcgaagtagtaattctaatttctaactagctgatatggttgtaatctctctcttatggaccgcgacgaatacagtgttacagagagttcaagcaagggaaacatggggacatcggaaaggtcttggaagggccaaaccagtggtaagagtttgattgattgttttcttttgcatctaagtttgtgttaaaaaaatattataacgaaagggcgacaagataaataaagtgtgtagatgcacatatatgaataagaatagtgaaacgatcgatagtagaatgatatatattaactgaatagaggctaaccaaagtaatcataaaacatttaaaactaattttaatagattaatgacgttttaatttttgtaaatatatatatatatatatatatatatatatatctttgaataacccataataaatgacgaaatcatttatctctttgactatttatctctttgtgtattttttgctacctcttttttgaaggccaggaaatcctcaagagtacaaagatttaatggagaagtatattaagctgtgcacaggtgtgtttttaccccttttttgtttatcagtaaaatttataagtttctaatttcatttcattgtctttctttcttttagatctttctagaaatatcttaaggggaatctcattagcccttggtggatcaccttatgagtttgagggaaagatgcttagagaccctttttgggtaatgcgtatcattggttatccaggtgtaaaccaagaaaatgttattggatggtaatcttttactaccaccacttttcatttcaactttattatcaagattcatttgtagtgacttactctgcgtcttctctttttcacttgcagtggagctcacactgactatggtacgtaagcctgaactcgaatcaagttcactctcttcatagttgttgtttttttttggtctcaaacgggttatttcacaggcttgttgacgcttataaatcaagatgatgataaaactgctcttcaggtatctatcattgggcttatttgctatagccaaattttgttattcttttcaaaattggtaaaaaaggctaaatcgtaaataagatgtgatatgacatgaaatatgatgttgtgaaaaataacactatgtttggtaacatcatgatgtgtaatatatatatccaccttgtaataaaaaaataaaagcgatcgataaattaatcagtttatttcgattttgtcatcatgttgtaattgcaaataaaagatataatttgcctgtttagttcacatcctctacactcttattataaaccatatatcattttgtgtttgaaaaatggttataaagttttctttttgtttgcaacttctaaaaggtgaaaaacgtggacggtgattggataccagctattccgatccctggatcatttatctgcaacatcggtgacatgttaacggtttgtttcttcttctatctccctctccctctttgatctctctttcttttgttttgacaattcttgaaaacattggggaaacatatatgcagatactatcaaacggagtttaccaatccacactacataaagtaatcaataactctcctaaataccgtgtatgtgttgcatttttctacgaggtactaaaaacttgtaatactctttgtattctcctcttttggatttggattcatgtttatctttaatatatatcttgaatgaacagactaacttcgaggcggaggtagagccacttgatatctttaaagagaagcatccacgaaaagaaacatctcaagttgccaaaagagtcgtctatggacagcatctgattaacaaagtcctgacaacctttgcaaatttagtggaaaacagttaatatggttgatgggctttggatggtaattgttttacctaagcatggatttcgagttttagtaaaataaaagaagttctaggcgacaataaaaataaatgaagaagaaattgtaatttggtttctaatattaataaaactacaggtttgtttaccaatcggctagttttagtaatttgagtaaaaaacgatgagattcctctaggtagcttcctctctcacctagctagtgtttcgtcgctggttttggagttaaataatcattgacattgatgttctttaattaagagtaccattttgaagttcgaggtttaagaaaccacattctatctcaagaaataaatcagtgaaaacatataagttaccatgcatatcatatttaagatgtaatctagtaaccataaattagaattttaaactttgaaaaaataacacatattctagttatttgttaaatgccgttttgtatgatgatgagttgaattttaaccgtattcttctcacgtaatgaagaaaacaaccaacggatatatttttaccttacatgcactcatcaatctcaaacaaatgcttgagtgatgtttggatacaaaacaattcctaccgtacccaatggattggattaccaattaagttgcacgtgataaaagatgatacaagatgattcgtccaatatatcttaagtaattgtttttatctaaaaatgtattgacttaaaacattattcatcaaactaattataaagcaactaaaaagtttcaagaaaatatctacataacacaatgacacgctatttctacattatccctgctaaaatcatctactattatttacattttttgccactatattttctttctaattttgagtttggatttgactagctacctaattagtcctagaaaagaaataaaaatcacacatgcgatcacacatgggccggtccgtttggcatttatgggtattgaaaactagttgcacacttgcactataggaaattatataaccattttatgataaaatatttcattccaaagagtttttgactttatatatttgttagagcaaatcgtttcccgtcattgtccaagtatctgaa

SEQ ID NO: 14522 - DNA, 3000 bp, Unknown
  misc_feature (1)..( 3000): cDNA_ID_2730110_gDNA_ID_2684126_Annot_ID_137204 3000 nt of promoter + ATG
cgtgtcgatatgtgatctttcttatcttaagatggtcattatttttggcttacacacatgtataatttcagcaaacttacgcggattctcaaagatggtctgagtgggaactcccagacagtgatggttgcaactatatcacctgctgatagtcagtatcatcatactgtaaacacattgaaatatgctgaccgagcaaaagagattaagacacacatccaggtgacaataattttcgttgaataattctatttcatgagacttttaattggtccagaagtacttactattcacttttcatgcaatttagaaaaatattggtaccatcgatactcatatgtcagactaccaacgaatgatcgacaatcttcaagtaagttaattacttttatctacttctgttacaaaatgaatatagtaacagtatataactcagagctttgctttcatagagtgaggtttctcagctgaagacacaactagctgaaaaagagtcgcagctaagcatcaaaccttttgaaagaggtgttgaacgtgaactttcttggttggatggtttaagccaccagatcagtgaaaatgttcaagaccgtataaacttacagaaggcgttatttgagcttgaggaaactaacctcagaaatcgcactgaacttcagcatcttgatgatgcaattgcgaaacaggttagctgctaaagcttctcctaattcagaggtcaatatgttgcattactgtaacctcttctttgttttataggcgacagagaaagatgttgtcgaagctctaagtagcagacgacaagtaatacttgataatatccgcgacaatgatgaagccggtgttaactaccagagggtaaacctttttctttatcatatatttcaactttgcacttcatcatggtcattgcttattatccttattatttttgttttacaggatattgaagaaaatgaaaaacatcgttgcgaactacaggatatgctcaatgaagcaataaataacaatggaaacaaaacgtatctgcatattcttaatcagtataagctcctggtaagtagaataaacagaacagtgccttattttcttgaccatgaagttcttacattacgattcacatttattgttgttttcaacaaatctaggggatgggtaatacggaactacagtttgaaatggcaatgagggaccaaattatttacaaccaaagggaagcccagagaaacctatggaatttgctcatgggtttaggagttgaagagaaacaagtgttcgatctcgctgcaaaacaaggaatcacaatcgaagactggagtagtatagcgttgtttccaggacttccttaccggaaacagacaccgagtttcataccagcaaacatccctttcgtgggccactcatattctaaatcctcctgcactttccagagctatcaagacccttcttcgaaaggacaacaatgggctccaactcctactttatgcagagaagaacaccacagctcttactacttcatgagacaggagccaccagcatttgtcaatcttaggaaaagccacgatggttgggttggtggcagcagaccagcttcacggattgacacaggaggcaatcatcgccgagtctcatatccacaaactgtgaacaattcttctcctcggatggcctcaggtcctactttttaccagactcctcaaagggtacgtatcaaaacagctccattgcttctttcaagttaaacgtacctaagatgttgtttcagttactctcaacctcacttgtttggctagtaaaacaacatttttttgttctgattgcaaaatctgattaaccaggaaatgttgctcaacacaacgagtccttatagtagtccgcgagtgggactcatcaacggggccaccaccccgtccgtgcaacctttctatggaagtcctcgtgccgtgactgtgagaaacggttcatacaacactccactcgcccccgctgcagtttcaactaaaggtgcgagaaaccaacaacgagtgtttggaacgagcccactctcaggaaccaaaggcgtcaagaactcttcatatggacagaacagtcacacaaagttgtacagaggaggaggcactaaaggtcacagtaaaggaaacaatactcaacgccaacaccaatgacatgagaccaaaacatgggttcgaattttcgagtcagttgaggcacagttttttaaacgcctcacactcagtctcactctcacatgactcgattttttgtttgtgtttgtacagctatttccactgtattgatttctttctgatacgattgatgtgtgtatatatatgggaaagaggttggtaaaaagtaagaagacaattgttccgtggtgaaccaaaaaaaaagctcaacaaatcttcagctttgttttcaccgaaccatttttgtttcaataacgtcacagcagaggccagaggggaaataaaaagagtagtttctgaaaaaacaaaaaagaagaagtagagtttcgcaaaacgtcaaaaacttaaaaatctccaaattgagtttgaagctaaagccctaagacgatctttgcccaaaaaaaaaaaaaaaaaaagccctaagacgatatctctcgaccttctgttctctccgccgtctgcaccgccgtgatcgaccttctccggcgcccactcagctttctccgtgcttagccgacgtaatttttcaccactacgtacgtctctcgtgatctccttgaaaaatcgaaccctggtttttgatttctctctctctctctcccttctcttatcatggtcgactggttctcaaaagtctgatgattggttgtgattagttccgattacttattagtataagtagatcgttgccttattggatcatcgaagctcctgttttgatttcccactgaaaaatcgatacttgggcatgcaaatacttgtttacttgaaacaatgttacttgtgttcttttagactgaaagacgaggacatg

SEQ ID NO: 14523 - DNA, 3000 bp, Unknown
  misc_feature (1)..( 3000): cDNA_ID_3017791_gDNA_ID_2684127_Annot_ID_191128 3000 nt of promoter + ATG
ttgtccccatataacatattatttaaatttattatatgcaattgaaaacgtgtaggtgaagacaacaacactcaactaatctgtggaccaaaatagatggtgaaaaatctaaataaaattcgaaacccttaaatgagaacaattggtggacaaaatttgggattcatgataatagcgcaagatgatgaaatcgaggacatcataactacattgaaaggatatattgcgggtgacttttgatttcgtggtattgacatgcctttatttgatttggaggtttgacttgcaaaaaataaaaattactttgagtggttttttgcataaaaccttttgatatattatatgagatttaaagacattgaaatatgtctttgaaatcaataatagaaagatgtttagcggaagtgactgcagccttcatgataagatgataaactcaagaggaacaattgctattatgccaccttctcgcaaaacttattctattttgccatcccttctattttagaaattaaatttaaagaaatttaatcaataattatgaaaagactaaaaccccttaacctaatctagtttttacgtattcttatcctttcttttgccaatccaataacatatctacacttctttcttttttttcatgcctccttcttcttctcttcttcttcttcttctttttttttgattattttagatttctcgtcttctccatcatcttcacaatgaaactctagatctcttattttccatagatattttattttccatcaatctctctttgcgtttcttcatatatctctcttcatgtttcttttccattgatttctaagattcacaaagcatagatctctattcatgcttcttctctatgaatatctcttcatgattttctcctttgtaatgcgaaatcgtttggtgaaacaaagaacacagtctacaaacttctaggaagaaaggtgacgggagaaacaataaacaagttaagaagaggcgaattaaagagggtggcggtgttagggttttgaattaaaatttcttttttttcagtaaaaccatttgtaccagttgttcttatttatatgtaaattatatcagttgtactattatcgtttagtaatactgtaataccatttgttccacttgtcccataatctatcgtttgaaccagttgtactatcatctcttagttgtaccaatcgtaagtaatttcattaagagtatttttggtatatcacatttacagtagcactttgaataactagtggcacgctgtttgtaccgaggttgtaacaatgaataagtaagggattttcgggaagacgaagtatcttttattagctgacgaacgagaagggtaaacaacaggccggttgaatagttacaagtgatttctatcgatcggcaacgtaacacgacttgaattgagaaaaaaacgaaccgtgaactaaaacgaaccgagaacaaaacgaactgagaacaaaacgaaccgaagacaaaacgaaccgagaacaaaaacgaaccgaaagacaaagagttttagtccgaatattgctctgattctctgggtattatcttctgtgtcactatttcgccaatagtgcattatttataggacaagcctcttaacctaaagattcttctgctcctcctgtaaattaccgttttgccccttgcgtttaataggctaaattgttggagacaacaagcccattaaacacttaagtctctgtttgggccaaatgatatgttgagggtgaagctcatgtccaacaataagccccccccccttagttcatcaggcgagaattttgtagagtctggtgagcggatttcttgaatcggaatatgtcgatttggcctaaacgaaaattacaccgtagatgtaaaatattatatattttttatttctacgctttgcgcgcgttttcctaggagtgcggaactccggtgattttacgccgtggatacgcttttagcagagtgcagaactctttccggtggataatattccaaggattttactgtgcataatttttccctatatatatgtctcctcttttttactctttaccttctcaccgcatcatttcaccaaaacggtaaataaattctctctcccttatctctttattttctcttgttcacgcttccttggttgtggttcgtcgagaacgtcttggttcggcgaagagagaagcttgaatcgaactggttcggtgagaagagaagaaagagctggttcgtgagttgaggaggaagagacggttcgtaagaagaggaagaagagctggttcggcaattgaggaggaagagctcgttcggcatttgagaggagatagagctggttcggtttgaggaagagatccggttcggtgaagaggaagaaaagatccggttcggtttggaagaagagatccggttcggtgaagaggaagaaaagattcatttcggtttggaaggagagatccggtttagcaagagaaagagatcttcggttcggtagaggaagaggagctccggttcgacgagagaaagagatcttcggttcggtagaggaagaagaaattcggttcagcaagagaaagagatcttcggttcggtagaggaagaagagctttggttcggcgagagaaagagatcttcggttcggtagaggaagaagaaattcggttcagcaagagaggagactacggttcggtgaggaaccggtttggtttagaggttggagcttgccggttcagccaaagaatccggtttgggacgatggactgtggttggtgtgacttgaatggttatgggaccaaccaggatgcttatcgtggaataaatgacgggttgccggttgatgattttggaggacgtgatttagtctagtattctggcgaagtcgacgatggaaatttgggagacattgagcgttttctagaggcaaatcttgtggttaccactcatggtatctgaaaaactttgagtcagcttgaaaattaccgtagagagatg

SEQ ID NO: 14524 - DNA, 3000 bp, Unknown
  misc_feature (1)..( 3000): cDNA_ID_3017756_gDNA_ID_2684127_Annot_ID_191138 3000 nt of promoter + ATG
tcttgggatgatttacttcagatagtcaccacaaaataacccaaagtaggtcaaaagtagaagagaaattaatgtttaaaactgaacaaaggctgtaggagaggttttgaaaaggtttgtatggagagaaaacaagaaattatggctaagtttctgggaattctagagagaagtgagagtaaaatcttgaaatgtttggagagaagaagtaaaatttgaaatttttgagcaaagagagagtgtaagtgacttagcttgttgagtgtggttttatagacaagaagatttgatcctagccctccaaacaccttagatcttcacccttcatttggtcaaggggacatgctttcactatttgcagaagaatctctgatgggctttggggagcaagatttgattggtggggccgagtaaatttgaattcaaattcgaatttgaattgtgttgacctcgcacgtgtgaactcggccgacatactcgacgcgcgtgtcgagtacagttttgggcctgatgggctctttttcttactcggcttcagctcttccatcttgaggtccagcttttcaatggtttccccttgagatccatactgtttcctgagctccataagctctctagcaataggaccaacatcaaaatggttcctcttagtctcaacctctgagctaggttctccttctatcataagaggctcctcgggctctcctaggtggtgagtcgtaatggagtacgaaataaaattttcccacccactcaacaactcagcatctaaatttctttcttcaatgaagaaaagatgcccttctatggtgggcttcttcatcttcttaggaatatcaaagctcatatggagattcttaccaaggttcaagtcgatcttacccatttgcacgtcgataagagcgcccgcagttggtagaaatggtctcccaagaatgagagggtctttcggttcctcatccatctctagaaccacaaagtcggttggaattttgactgatccaatctttaccggtaagtcttctagcatcccatgaggcactctcactgatctatcagctagaataagatgaatgctgctaggcttgaacttatcaaatcccaatctctttgcaacagacaaaggcatcaaactaaccgaagctcccaaatcacaaagactattgttgaacactaaggatcctagtgaacaaggtagactgaaggaacctggatcacctagcttctttggtatcaccttcctttgaatgatagcactacactcaaaactcaattcaactatttacttagcttcttgggatctttccataatcacttccttgggagtatcaaccaagggtatcttctcttccaactctttgatacacttgatgaacatcatcttatgtttctggaagatcttttcattaatctgtgcaatactttctggaaatgccgaaggttcatagggaggtggaatagggattgggttgctcgggtcatgtgctcgttcgacaagccgagcaaagaagtcgagtttaatttcctgtcttgatcttggtcgcaaaacctccccttcttgaatcccactgtcctcagtggcagaattactaactgtggagatagcatgggcatactcctttggattttgaacagcttttccaggaagttgtccagggtgcttaggagctgaagtataagcaatgtagccctccatgctcttgactctattgttaagtgcatcaatctttatattcaagtcgttataagagcaatcaatcctagtggtaagctcagctagcttcttatccatggtcatggaacatgaagcctatccttgcacaagttgttgaagtagagtcttcatctctgagtcttgtgctgaagtgtgctgttgttgctgggtgaagcctggaggtccaaagttgccacattgttacttctgtaagagagattatgatgagggggcttgtagttgttgaatcccttgttgtagccaccttgattctgtaggtagctaacctcctcaatagtaaggttctccccatcttggagttgtgtaagctcttcttctgtaatgtagtggacatttctctgttgagcaagcaccaaataacaacggcgccaaattgatacaagggttttctgtgtcaattccctaaatgcatcttatgtcattgcagcatttaaggtgtcaatccaaatgggtgtaattgctatcaatcatgatatgattagagaatactaagtcaagcgaagtgtgaataggtttggtgtgtttctactaaacctaagcaacagattaacatgtaaatcaaatttagaaattgaactatactaagcagaagataaagaacatgagtgataaaaccaagaagtaaatgcaagaaccagagagtaaaccaagcacaaagagaagcactcagtcgagtaaactaccaacaggtcgagtacaatactaaaaacaccaattttgcacgagacgaacagagtactaaaaacacgagttttgcacaataaaacaaaacagagctcttaagaatgaggtaattggtcttagtggactcctcaatccattagctaactaacaaaatcaatcaagctatccctagacaatagattcaagaccaaatcaatccactttcgtgacaatgattctcataactttataacttcctaatctcaattttcattgatgaaacataataaagcaggctttaaacaccaatctattaaagtcaataagcagtctaaacatccaaggtcttgggctagaatctacaaatctctgaaattagttggtttagacatttcataaaacacttgttaggtggagaaagtctgaaatcaattttcaattgatcagaaagaaaatagcattaagaactcctaaaacagaagggaatcatgcatataaacacttagttagctaaagaaaagaggaatccacctaaacctaacccatcctcaagaactctgaagaagactactcaagaacaatgaagaacatcatagaaccac

SEQ ID NO: 14525 - DNA, 3000 bp, Unknown
  misc_feature (1)..( 3000): cDNA_ID_3017734_gDNA_ID_2684127_Annot_ID_191144 3000 nt of promoter + ATG
gaccaaaactcacagggtacaatatataccatatactagcaattcctaatatcaaacttgttctctcatcttaccagtccgatatttgtaaaacaaaaaaatcaacctctttgagtttctttatgtgaaattgtctaaatctaaagtgacaacaagaattgattagtaaaaaactaagagagaagagagaatgaaggcatatcctcaattctgaaaacatcatccatcatcagctctctctcaagctgccccttgtacatctatagaaatacgtgtatcgaaagaagaagaaaagatttttttttcttttcttttcttttgcaggtttatgaatcaaggctgtgataccatatagatgttggaagaactgatgatttattatgttctcgacattacaatatatatacaagagagagaccagctagggtatacaaattgtaataaagaagagtatatacgacattacatatatgaacatttaacctttgcaatcaagtatatgattgatcctcttaataaatgtaggatatgattgatatccttaatacatcttagcacatcctacacaaatacaatttatcatcacatcgccatcaccataaccaagcaatataaaccgaaagatgatcgactcacgttgaattccatgtaggtggcgttcttgtccagccattgcttgtccattaccacaaaggcaacacagtaaagcaaaccaaaggcccattcgctttctagatattccaaaaacttagttaaaaatcaagtaaaccagagagccatgatcatcataaccaaatatttccatatttcacctgacaacatttgtaagaataccaaccgtataaaactcctaggttttgctgcaaatgtagtaagtattaaaacaaggtttcttgcttcacaaacaaagagcaagatattagggacactcacatgcttctaggtcaagcatttgcatgatcatgaaggttatgttgacgcccgctacagcgaatggatattcccaagctgctcttttgcctccctgtttcttcaagagacgctgaaacgaagtctacaccaatgccacccgaaaaacatcaaaaaggttatgaatctctcaagtagaaagttatgagagttaagtttaccgagaaagtctttgcaaagaatcgaagattctccaatgaaatgaatccatctcctctgataacaacagtcacaagaaaaccaaattaagcactatctgacatgtatggttactcaagcaagagagaggttaacctgaaatcagtggatggatcttttctttgccatcccatatttttccactggtctgagatcaaatcttgaagcttttcatcagcatacgtagctgatcacagtgctctcaatgcatcctgatgatcgggccgtgatgcatcatagtaattcttcattcttttcctcaacctcttcagtctttcttcgtatgaaaaaaaaaaatcagacttagaaaattgaatgttgtcatacaaaaacgagttaatggagctgttgtttctatttgtgttaacctgcaatggtgtcaagttagagcaaatgcgttcataagctctcttgcggttaaagcaaacacatgttagacttttcttgattctccaactaggcgtgctactacaactcgcatcctctgcatccgcgttaattagttctgtataaacaaacaagaacatgttaagattctcaagatttaaatccctacaagaacacgatgccaagtccctaagaaaggctccattatctgctccgttgttcataagctttcctagagaattacacgaaagcatttcgtacttaagtactaacaaactatagaactatagtagcttccattgttggtttacaaaaaaaaataaagtagcttccaatgttattcaagaatcaagcttcaaaacacacttggtcaagtcataagaaaatgaagacacaaatgacatgtagctagacagcaagtaaagtataccatattttggtccggtttggtatggcttcggttattgagaaaatacattagaggtttacttctacagtttgtgttgggttatcgtaagctcagctcagagatggaaaaatctagatcggtattattttttctttcatttgcggatcaatttttaatggttttagttcggtttaaattggttaaactggactggacactcctatgacaggttaccccaataatagaccaaatatgtgaccccattgccatatagaaacatatgtgattattattggaagtgagtgcaacttgcctactccaattcataaactttttgttttagattcaatttcatacatctgtcaaaatttgctcttgaagctgatctagacaatatatgggaccaaacataaattcggttctacaactaaattatagtagtatagtttactaatttacctaaaacagttacgaatcatagatctactgaagtttgtttgagtcacgtggcagaccgattgaatcaaaagaaattttcacagaagtggacgaaaaaagatttgctctcaccgtttgtcaaagtgagaactggttttcacgttttgtgttttcattcaatttcggaccaaattaccctgggaaaacttaataatggcacaaaccaaaccgtgcagcagttcgtatcggttgagttgatggcgtaaaccagaccctacagcagttggtttcggtttagttgatgcgttcagttttgaaaacgacaaaaaaaaaaaaactgaaacgaagaaacccgagaaaacgaaaaagagaagagagtaacggagagatttgcgagagaatcagaaagcgaaacgaaattcagtatccattgcttcaaaattcgacataacttcaaattgttgggtagttgaattgagccactgaactcccacatccggggaagtgaaagttactgtttttcccggcgaagccaagagaaagttactgtttattccggcaaaatttgaacctccagcgagatagcatctttagctatg

SEQ ID NO: 14526 - DNA, 3000 bp, Unknown
  misc_feature (1)..( 3000): cDNA_ID_3017874_gDNA_ID_2684129_Annot_ID_191155 3000 nt of promoter + ATG
gataaacgagtcgaacaaaagctttacgacctctctgttccttgtcacgatcatcaaaagcgtagataagatccttaagctgagaaccacgaagttgaccggtacgaacgccgaggacgaagctaatagcgtccattaggttagatttgccagaaccgttgggaccaataatagcagtgaaatccttgaaaggaccaaccaattgatgacccttgtaagatttgaaattctccatctcaagctgcaagatcttccccgatggggattgtatcgcaggcatgattgggggagagatctcgagtttggtttcagagaaagtagtggagaatgaaattaaaccaaattagggtttctagaaggttgggggtattctcggagaagaaaattggcgggaattgaaaatgttttgagaggcgaaacaaatctttctctcaagggatttcagaatttcatctcttccccttaatccggaagttgaagccgaggagatttcacagactcacagtgcgtttaattttttaatcaaagggctgggccgaatgatacggcgtagtttcgtatgggctcgactaaattgttctatcttatgtttttaaaaaaaataatcaagtttttatgatattttgcaagaaaaactatatatactcatgtttatagattagtagtgtcaagttttcattcggttttaactttgtaaagaagatttttgtattgtaacctgtttgtgtgttttctaaatgatttgttaaattggtaaagtttaggttttgttcatctttttatgggtttctagattctgatccagaaaatattgatggatgtttgtgtagtatgtttgttcatttttcccctttgtttaccttgcttggtttttgtctgcataatgtttttgtactcgccgactaatgttttcggaagtgttcatatacttatcggctttttgtaattcaccttaaatctttttatcaatgaaatcctattaagaaaaaaaaaatagtcgtgttaaagatttaggaaaaatattgtttcatagtgtgcttagaatccattgaactaaaaaaggaatgtcaaagggttattaaatcattgctattgctaaccattctttagttctatgatcattttgtagcttaaacttgaaggtagtcaaatatagccggaaaaagaccacgaatgacatccaatctcgtccatgcacggatcaaactataaacttgcaagtttttttttaatagtgtgaaaaaaactattatgcagccaattacattattttcacgattttctagtttaatcactcaagtcggtatcccatgagttataggaatcaagggaagttgagctagttatttctggttcttccatgaagattctccatagccaaatggtctttgtacaacgattcatggagtttaaaagtcgtggtggatgctccacaaaagtgtggttaaaaagtcttgctaatttatagtttgggaaaaatgtcatttaatcctccaacttttaaaaaatagccattttatacatcaacttcgtatatggccgtttaaaacatgaactaaacgttgattaaattttaaaacatgatctttcgttgaccaggccaaaatagacatgccgttatcagtcattaacggaatttctaacgtccgttatcatccgttaactttattagtcaagttttaaattgtggccattttaaacatcaactttttatgtggccatttaaaacatgaactaaacgttgactaccatttaagacataaaaatatcgttgaccagaccaaaatagacatgtctttatcagtagaacctagaaacccgttaataactgttaatctgtccaaaacaacgtcgtttgagaataatcgaaagaacataaagatttttcccatatgaaatctccatatcaaaaagttttaagtagaacccaagaacatagtttgataaagagataatcgcagtgtcagtaattggaagcaaataaaggtattttcgtttatatatttgttttaaatttgaaattgaatcatggaagcaaattgaagactcattataagattgttcgtcttgtttgagcggttgtagaaatagatttggggaactggggtttcatttagaaaacaatcctgattttcttttgattattctcaaaacaaagtcgttttagggatactaatagagtcgttaacaagtgataatgaatgttataagttcttttaatgaatgatgacaacatgtttattttggcttggtcaacgaatttctcatgttttaaatggtagtcaacgcttagttcatgtttaaaattgccacatataaagtcgatgtttaaattgaccacaatttaaaacttgactaataaagtcgttaacggatgataacggacgttagaagttccgttaatgactgataacgacatgtctattttggcatgatcaacgaataatcatgttttaaaagttagtcaacatttaattcatgttttaaacagccgcatacgaaattgatgtataaaatgaccattttttgaaagttaggagattaattgatatttttccctttatagtttacaggtacatacgttgataacacaaatcgtataactttctaacggtacagaaaatagtaaaccgtacaaaaataataaaaaagggtaagatgtagaagtataaaactaatagtacaaattaaaagattttggttccacttgtatgtataagtgattacatcaaaatggtattactaagtcatcatttagatttgatgaagtttgtattcgtgtcataaaccgggcgtaggtggagttattgtcagtttggtagcgttttacgaccacacataaaaacatgtttataaattgttaaaaaacaataagacatgtcataaatctaaatgccacaagtagaattatcgaaataaagcttttacataaatacacacacccaaactaaaaaagaaaaaaaaaagaaagagagagagagaagaagaatcgtggagatg

SEQ ID NO: 14527 - DNA, 3000 bp, Unknown
  misc_feature (1)..( 3000): cDNA_ID_3017870_gDNA_ID_2684129_Annot_ID_191156 3000 nt of promoter + ATG
caccgatagtgaagagatcaaaatcgtagtggcggtctgattcagctccattatcggtactggcacaaacagaaaaccggcgagagtggtaatagcggtggtttgagagtagggcgatacggggacggagagaatagagagaggttagggttttaggaagcgagagaaagctagaggaagaagatgatggtagatgaattgcgattgggagttttttgcagaggaattgaagagatggagaagatgatgaaattgtactggtaagcttcggggtcgaagccatctccacgattcttcttctctctctctctttcttttttttttcttttttagtttgggtgtgtgtatttatgtaaaagctttatttcgataattctacttgtggcatttagatttatgacatgtcttattgttttttaacaatttataaacatgtttttatgtgtggtcgtaaaacgctaccaaactgacaataactccacctacgcccggtttatgacacgaatacaaacttcatcaaatctaaatgatgacttagtaataccattttgatgtaatcacttatacatacaagtggaaccaaaatcttttaatttgtactattagttttatacttctacatcttacccttttttattatttttgtacggtttactattttctgtaccgttagaaagttatacgatttgtgttatcaacgtatgtacctgtaaactataaagggaaaaatatcaattaatctcctaactttcaaaaaatggtcattttatacatcaatttcgtatgcggctgtttaaaacatgaattaaatgttgactaacttttaaaacatgattattcgttgatcatgccaaaatagacatgtcgttatcagtcattaacggaacttctaacgtccgttatcatccgttaacgactttattagtcaagttttaaattgtggtcaatttaaacatcgactttatatgtggcaattttaaacatgaactaagcgttgactaccatttaaaacatgagaaattcgttgaccaagccaaaataaacatgttgtcatcattcattaaaagaacttataacattcattatcacttgttaacgactctattagtatccctaaaacgactttgttttgagaataatcaaaagaaaatcaggattgttttctaaatgaaaccccagttccccaaatctatttctacaaccgctcaaacaagacgaacaatcttataatgagtcttcaatttgcttccatgattcaatttcaaatttaaaacaaatatataaacgaaaatacctttatttgcttccaattactgacactgcgattatctctttatcaaactatgttcttgggttctacttaaaactttttgatatggagatttcatatgggaaaaatctttatgttctttcgattattctcaaacgacgttgttttggacagattaacagttattaacgggtttctaggttctactgataaagacatgtctattttggtctggtcaacgatatttttatgtcttaaatggtagtcaacgtttagttcatgttttaaatggccacataaaaagttgatgtttaaaatggccacaatttaaaacttgactaataaagttaacggatgataacggacgttagaaattccgttaatgactgataacggcatgtctattttggcctggtcaacgaaagatcatgttttaaaatttaatcaacgtttagttcatgttttaaacggccatatacgaagttgatgtataaaatggctattttttaaaagttggaggattaaatgacatttttcccaaactataaattagcaagactttttaaccacacttttgtggagcatccaccacgacttttaaactccatgaatcgttgtacaaagaccatttggctatggagaatcttcatggaagaaccagaaataactagctcaacttcccttgattcctataactcatgggataccgacttgagtgattaaactagaaaatcgtgaaaataatgtaattggctgcataatagtttttttcacactattaaaaaaaaacttgcaagtttatagtttgatccgtgcatggacgagattggatgtcattcgtggtctttttccggctatatttgactaccttcaagtttaagctacaaaatgatcatagaactaaagaatggttagcaatagcaatgatttaataaccctttgacattccttttttagttcaatggattctaagcacactatgaaacaatatttttcctaaatctttaacacgactattttttttttcttaataggatttcattgataaaaagatttaaggtgaattacaaaaagccgataagtatatgaacacttccgaaaacattagtcggcgagtacaaaaacattatgcagacaaaaaccaagcaaggtaaacaaaggggaaaaatgaacaaacatactacacaaacatccatcaatattttctggatcagaatctagaaacccataaaaagatgaacaaaacctaaactttaccaatttaacaaatcatttagaaaacacacaaacaggttacaatacaaaaatcttctttacaaagttaaaaccgaatgaaaacttgacactactaatctataaacatgagtatatatagtttttcttgcaaaatatcataaaaacttgattattttttttaaaaacataagatagaacaatttagtcgagcccatacgaaactacgccgtatcattcggcccagccctttgattaaaaaattaaacgcactgtgagtctgtgaaatctcctcggcttcaacttccggattaaggggaagagatgaaattctgaaatcccttgagagaaagatttgtttcgcctctcaaaacattttcaattcccgccaattttcttctccgagaatacccccaaccttctagaaaccctaatttggtttaatttcattctccactactttctctgaaaccaaactcgagatctctcccccaatc

SEQ ID NO: 14528 - DNA, 3000 bp, Unknown
  misc_feature (1)..( 3000): cDNA_ID_3017863_gDNA_ID_2684129_Annot_ID_191158 3000 nt of promoter + ATG
ttgtacatgcgtctattttattggcataatatctgagaactcgttggagatgtatttttggctgcagttgctcaagtacaatgtcatttgaccttaggaactaccaagaatcgtgattggttcaacaaccctcgggggattagggtttaggtaagtataagaaccctaactttgtaagtatagcaagtactgaatgatgtttgattgttaggtttgtaatttttgtgtcacaatgttaaaaggtatttcacagtggtaaggtgctttatttgcgatttgatttggcataggaccttataagttctgacactgtagagaacctatggaaccttttcttatgtgatactataagaaactcgtgattttagctgcatctgattgacgttttatgttttgataatagtttttggagacatgttgtcaaagtagaagtaaagacaaatgtttctttaattcgtcggactagaaatcaaatcttcaaaagccatttttgtcgtcccaatcgactttcaaaaaagctttaaattagaacgacacaacaatgaatgatttaacccacaaaaagcttgaatccaaaaggtttgacttttcagaatttagtcttaaaattccgtaatcctatatattaacggataagatccaacagagcttcagaatttgtccttaactcatattcttcttattttctatattataattcgagggttacgtgtcatatgcctactactgacatcacttgcgtcttccttttctcttgtcctctttcgtaatcattaaagtaagtaccttttaaaaaaaataaagaaaccaacggtgggagaggaagcagagagagagaaaataaaaaaaacagaaaacgagaaaaccagagattcatcaattcattgattctttagttcttcttcgtccgtctaaccttagaaacttatagctacagcgagagaagacgaagaagaataagaataagaagaaagaaaattgaatggcggcaagagccaacaacaaatacacctctatcaacttcaaccacatccttcacaaagatcctccttcatcttcttcatcttcctcctctgcttcttattcctccgtcgctcgttccaatggccgtatgctcgtcctcaccaaatcttcccccaaacctctaagatctccctccgctgctcccaccaccactacgaccgcacctcctatctctacagctccgaggattccttcaaatcaagccatctctgatccagatccgagtcagatctctcttcgtcccttaggtcatacaggatctagttcctcgctttcttttccaattcggactcctgaaatcaacaaggctccggaggtaaatgctccaactccggtttcattgtccccgaaacctgatcggttcgtgccgccgcatcttaggccaggttttgttcggaaagacgagaaacctggactcaactcttctcgagttagagatccgaatccgaatctgaatcagagattgcctaaccaggaacagccacggcaggaatatttcggttatggacagcccggacggcccaaatcgggcgggtatgagaggatccgtacggatccgagaataaccggaaaccgacccggcacctccggatggtatgttcatccctctcgtaataatcgttgttctagcattactagagagtgtctaggcttcttagctctgcctcaacggaattatcttgagatttattctacgttattgatagtttttgcctttcatgctgataattaagtaaaattggaaatgagattattctggttgtttggatttttgctgaagaagtagtcatgggagccgaatccaccatgtgtctgaacattaggattcgtttgaccatagagaatgtcatcttcacgtggattcgattttgagatgagaaagtaatatgaaggtgttttttgtgtggagaagctactcttgtttgtcctttactctttttttgtgtgtttgatccaaggttgtgtacttaaagctatatatattatatgatggaatcatatctgttcattgctcatctcaactctattctgtataattttctgggggaagttgtaactaaagttcatttgtctgtgcagatgagcttgctgggatgatgcctagttaactcactcgatgatggaggtggaactttacttacttctgaacgttgaaaacagtgacttgtcatttctcacttcttttgatcaaaccagagattatcaaagaccaacccccaagattcagtagatttgtagaagaatgttgttttgggatcaggctgggtgatactatgacacaaataacacttgttctcttacttgtctcactcatgtttcaaaaactttgtttatgtaactataattctgttatagcacgtgttgtttaggtattaatctatagattctattaccatttggtttataagaaaaacatttgtttctggatgtatgtttcagcaaaagaaatttccacttttgtttatttcaccatttgcaattgcaagaaaatctaactaacaatagcaaaaatatagacaaaataagcaaaatggaaaatatgtacatacttttttgggagagatccacttgtaaaagacaaaaggtgactataattgactaattgaggactgagaacatattgggaaggattttgtggccattggtttgaagaccaatacgttatttttttttatgtcattttttcgaacgtatttgaaaacccaatttaaaatgtattttttcgtgtaaaaaatgatgctaacatacttgtttgattttcatctaaacaaattgcaaagcagttttcataagcatcacgctaataataccattgatgcaattaatgaccaccgatcgctgaatcaccgcgaaaacgaaataacccgttaaattacccatttgcccctccgtctccattaatacacactctctgctttttttgagatctctctcagcacaaagcaatcacaaatcaaagctttcagagatccaaaa

SEQ ID NO: 14529 - DNA, 3000 bp, Unknown
  misc_feature (1)..( 3000): cDNA_ID_3017839_gDNA_ID_2684129_Annot_ID_191164 3000 nt of promoter + ATG
gagtctaccaaattgagcaaagaggaaacagacgaagaaaatcagaaagaggaaaacggagttgccatggaaattgatggtgtggcaggggaacatgtggaaaaggttgttaaagtaggcagtggttcggataatgcttgcaatgaatctgctggtgcaagtatggttcaaacacaagatgttccaatagctgaagctgacaacaatgaatccaatgtagtaaagaaaatggaaattgatgaacgcaaagataatgctgatatgacaagtgatcttacgggaacaattgaatctgctgattcagcaatcccaaatagtcccactgaagatgctgctccaggtgaagttgaaccgttggatcataatgctctttttgatccaacttctgatattaccaactttattgatttcagtggtgtatcatcttggtcaggaaatatacaagaccttaaaaccgaaaccgggaatgtatctttgaaagaggataagaaagttactgacatggcagaggacgttgtcacagcagatatagaaactgaatcgaatgaagcccgtgttggtgttggggcagaatctccagctgctgcaactgattgttcaaaagagacttctgatgcaactttgggatctgaagaaaaccaacaagataaggatcatcaatgcctcgacaagaaaacagcagatgtacaagatacaatgatagaggaagatgacattactcatgaagctccaagtttcgacccaaaccaaaaggaaaatgcagaaatggaagaaaatcacaacaattttgtttatgctgatgatgaagctggttctgatgttaagaccaatggtgtgaaacgaaaggctgatgtcctgagtgaggattcaccaggagaaggtaggaagactgtttcattcgccaaggtgtcttttgccgaaaggccgtcctttaaaattggtgcatgcatagccagggctgcaagtcagatggcaggatctccttcagttttgaagggtagtaactttggtgatgaaactctttctgttgagagttttgtatcccagcttcattgcgcagccacagaccctgttaaagagaacgttgtatctgacattgctactggctttttcttggatttccgaaactcatcagcatcgcagcaagttaccacggaaaaggtaagcaagaaaagaggtagaccatccaattctaatgtagcaggaactgaagcatttgagtttgaggaaatgggcgacacatactggactgacagagtgatccataatggtggtgaagggcaaacaccggctactgaaaagggaaattatcaagtcgtgccggttgagttgaaacctgctcaggttcaaaggactcggcgaccatacagaagacgacagtctcagatcagtattcctcattcagccactaagaaaccggcagacattgatgagaatgcaccagctgagattataatgaacttttttgaaactgatacaatacctcctgagaagagtctgagtaaaatgttcagacattttggccctatacaggagttgcggactgaagttgacagggagaaaaaccgggctagggtagtttttaggaagggtgctgatgcggaggttgcttacaatagcgcaggaaggttcaacatatttgggacgaaggttgtgaagtacgagctcagccgtaatgttactgaaacattcaaagttcagccttatgttgtgtctttagctgaggaggatgcagcggtatgtccttcctcttagatggagttttggttcaggtaaatctgcttcattgcctcttctctgttttaatatcttttgtactgcttctgatatttactggtgtgaaagctgatgtgttgtttcctttggatgcatagttgttcctttgtttttcttatggtattaatagcaaagatgttttagtaccccctggtagattcaatctaggaagtaaagacccattaacacatagatgacgactaaaattgatgaagccatgtctttgcttttgttgtgtttgtaaactgagtttgatttaaacagaattgttgatcttgtggttcaggtgaaaagaaacggcaggcatcaagagaagtaaacaaagaagtggctcaatggattggaggaggctcttgcttgtgtgttttattaccttttaggcagagagatcatttaggattgtgtaatatgaaaagacatgtatttttctagagacaagagttgttggttatgtataatttgtctgtcgaggctactagagacaggttaatcttcttcttctttctttttttggtcgcaaaacatttgatttgttgttattaaaccaagttatattaggagcctgtttgttggttgaagtgattttgatcattattatatttggtgcttgctggttcagcttggttattacatgtataaaccggaaagaaccgaaacaaatcaatggctgatttaagaaattagtcaacgttatgaaagtaacggcggcgttagattgactgttacaaaaacagtaacaggagggaatcccaaattatttcgaccaaattttttgaaaagcagctttccgatttcacgctctttcctcttccctccaatctcactctccactattttttgtttgtttcccctaaattttacaaaatagagagaataatgaaaaaaccctagcctgccccgccgtggaggagaattacaccacgacgagctcgtaatcgccgctgggtttctatgtttacatcgctaagagattaaccatcgagcgtggtgagtatgtcctatctctcatttatgtttgtgattttgttttttttcgcttgtaagttcttcgctggtactattcaccagtttctagggttcatattgtgaggatttttgaaccgaattgatattttatgttgacaaagatcttgctggtaaaatggaataataacattgtgcgtcagatttggtattggggttaggtaaatttggggatcaagcgaacagtatcatttggaaatg

SEQ ID NO: 14530 - DNA, 3000 bp, Unknown
  misc_feature (1)..( 3000): cDNA_ID_3017827_gDNA_ID_2684129_Annot_ID_191167 3000 nt of promoter + ATG
cactacacccttcaatatgtctctattcatttctcttatgcattttctcttgatacgatcgcgactaccaatcccgcaaatgaaaaacttataataacatcaccacaattttttttgcactgtcatggcccatgcatgggtttcagcaatgttgttgattgacttgtcctacagtcctagccgagccaattggtgctttagacgtcaaaatctattacaactacatggacttcattttcttagaaaaatgttttgtggagcagtaatgagatcagcttgattaatgacttcatgagatcttaacccaaattttgaaatttttttttactgttttatacatatgtttataattgatccccaaaactgtatttttgctttaggacccaacaacaccaaatactgtataaactaaaatttagataaatttcagttattctttaacctagctccaattttggtaaattaaattgtcaaaccagataaaacaaatgtctggagtgtaaatagcaaacgaacaaaagaaacgtatggagttggacagttgttgttgaacctggggtctgatttagtaaagagcttaggctgggccaagtttgggcctaacagcaacactaaaaaaagatagattcacttgtttacgtcaactatgtttcgcaaattcacagagcgtattaaatttaaagaacgggataaaaaaaaaaaagagagagaaagaaataaaaaaaaattatatggagcttttgaagttgacttagacccaaaaagtttaagaaatttagcgacactataaaggcctaaaggaatcctatcctccaccttcataaagataaaagattagctaaaagcttcttcttttccatgatgcatgatcaaaagataatttaactagttcatgcaaaaatacggaaatacccattgttgatagaaacttatgtttcataaactaataaaacatttttaaaaataactgaccaaaatgaacattttgaatgctattatccataaagttgatgtcaaaaagatttggggaaaaaggtactccatctgttcctttttgtttgattgtttagaaaaaaaaattgtttcaaaaagattgattttttagattttcaatacaatagttattagttataattgataaattgtaaacttcaatacaaattagtaaatatcattaatttagtataagataagcttaataatgtcaaaaagatttaagaaagtaacaaactttttcctctcttttcctttcttttgattgcctttagtttgtgtcttgactcttgatttttccaagttggataataatgcaggcttcatgataacattcaatattcattgccgtttacattgtacacataaacataacataacacacacaaaagatgtctccatcacatgatagatcaaattgtacgtcacacagtgttgtttactttaattttgtaccaataattataaaagctgatatatactgtatttgattattttaactaattacattttgaaaataaaatttttagaaacgtacgtataagttaagagtatgattaaaaaacaatttttgttaaaatccttttttgtgtgttaaaatatttagaactttttttttaacacatatttagaactttcttaataatgaaatggatgtataaaacgatatatcgaatctagtattaatgtgtacataatataataacacaaatatacccgaatagagggttgaaaattgaagaacacgtcaaaatatagaagccatccgagattatcgagaataatgttgggaagatgttgctaatgacaaagtttgaccgttcgagctcgtcgagcccttcggttacgtcttccaagactttgtctagttgcatggcattttccgacattcctaaaaagtaaaaactcaaacactttgaaaaactccccaacggccgatgcttgtcttatcactttcgagccaatatttgaccattctttgttttgttttgcttagtttacaagattgattgaacacagtatacaaatgataatagcgtagaagtaacaaattgtaaagaaaaatactcaaatagcatgccatcaacgaaacaaacaaaagatcatctttaagaaagaaagaaaataaaaggaaaggaaagaagattgactttttaaattttaaacttctgagggttatgacatatgccggaagaaggtgataaagtgcaccgtgcatatcatcatctcaatgtagaaatcaaagtttacatatcaatttttttctccaagaaaatataaaatgtaatccattaatttggactcatgatgccactttctcataactagcagagctcatcattccttttcatcatttacttcccttcccaacttttcttcaccaaactatgattttgcagaagaaaactcgaaagtcattgttaattaataccatttttattttactgtagacaatatttcccttataactatttatagaaatactccaaaatactactagtgtattaaaaacagataaaattcaaaagcaaaattttaccaaaaaaaagaacttaaaaagcaaatagtatcattattgtttaacaataaagtttacatttccatagaaatttcaaaaaatcggatacccataattttcgaggtggactatcataatcaactctaattattttatttttctagcattgattagtgttcacaataatggcataaagcagacgcattaacttttgtaattggggttttacctttcgttttcactttaattattttaactaatcctttttacaagacccataaagaacaaaagtcaaaataatcgatagtctcaaaaagtcaagaatctctcacacactcattatgaacacgcaccaccaaacaacacttccattgatcctcataataatctccaccaatactcatttccctcttggattcttcaaactcctctctgaaagttctcatttttggtttacatttcctttgagtccactgttacttactaaa

SEQ ID NO: 14531 - DNA, 3000 bp, Unknown
  misc_feature (1)..( 3000): cDNA_ID_3017819_gDNA_ID_2684129_Annot_ID_191169 3000 nt of promoter + ATG
ctaacccgttatcaagccatttcttaatggatgttctgtcaaatgtctgtcctgaagctactattaccggatccagcatgagttctgttgacaaaggacaccggaaatacgggggtatcgagatacctttagccacttcaagaaactcagttttaagcatgtgttcacggatgcacaagacgagttctatcaactgttcggtttgttccatatcttcttctgacttactggcctgggatcttatcctctctttctccacagtaatgctttcctttaagagatcttggtttgatatcaatccaagcatttgaattatgctttccagatgattgttatccaaagaggtaatatcatctttctgattccgtaaagcattctccatgagttccattaatgtcccctcttgcttaaaactctcagtctcctgcacgcagcgctgaaaccgttccaagagattagtacaagtggctgcatataagacacagagggctaaagaaatgaagaaattctagtttacctcaacactttgtacgcttgaagtaaccggacttgactgtgataactgaagaagtatgcgactaatctccaacgaacaagtctggacctttcccaacaaaacctcgcattgaaacacctgcacaacaacgatgtagtgaataatgctgaaagctgcagaaaaactgaaatggtagcttatatcatcaacttacaccaaacaacttgctcaactttggtgaccagtcctctaagaactcccgagcctggttaacaacagaatcaaggtcttcacatcctttatataaacagtcatcagaaggtatcttgcaatcaacaacttcatcgagcaacggtttcaagagcttcaacaagagaaccatatttccaatacatgtttgaataggattaaatcttatagtctggcacgcaaccagatgaagataccgagatatactgttaagaagacatcgaacaggaacaggatccatttaactatcaagctgaagaacacaaaaaacaaaacacacacatatcaacattataatctttcatgacttttaaaaagagtgttggttccttgatagtgttatcaattggattagtaaaaatattcagacttttctgtgtattatatggaaaaaaagaaaggaacacaaagttttctgatagaacagacatagaaaagcattgactttttgacttattagtctgagaagacagacatgactagattcagtcaattcttgtggaaaactgaagaaaaggaagtaaatttaaacagagacttgacttgagcacattctctcaacagatgtttctgctttctagtttcctttttcccttatatttgattaaactaatttatccagtctaataaagtgtggagaaaacaacagagttactctgaatctgataaacctatcaaatcgaaaaagaatctcaacaaagaaataagacagaacagtgaaaacccacaagtaaggaaccctaacttagtacaaagctaatgtcgaatttggaaaaagattgtaacaaaggaatgtaagaaggtggaggtacccgagaagattgaagtgatactgaggctggaagaagaaaaggattcgaggtatcaagggaacaaggcggcgatcattcgagcttgcaagaggaataatgaagagtttcctaaattatctaaagattggttctttgcttacacaaagagaagagagaagagagagagaaagagactgatgcaagaattcaggcaacgaaacagagcagaaaaaagggaaaaataataaaatagtaatggcgaggggccccaagttggtttttttgcagatatctctactgtttctgtaatgttggagttggtacatcttaaagctgtctcttttttctttctttttatgtttctgatgatatataatattaacacttaagtaattttactcatattgttgccttgacaaaggaataagttaagggttgaaatttgtgaattttaaaaatcattacttttgagattaggaattatgtcaaaggagaagaagattcattggtccttggagattataaggtacaatgattaactttgttatgttctagttttgggtaatatatatgggtttctatctacatcaatatttcagatttgcttttttctttttgtcaacatacagaattcagatttttgggatttccctatttttcctacggcaaataaagtcaaagaaatattaggccgtatgaaacaaattgatgggttaagcccaattgataggctaggcccgttattgttttgtaaagaactgaaatctaatctgtctatggtctttctcagtttagaacaacaaattcttgtttggagatatatgctaacttgtgttaatgtgttgttctcgttggggttacttgtttctccaatagacaatgattactcggtaatgattccactaattggtcagttattcaccgtacgatttaacaacttagcttttgaacctttggaaagcagagtttaaattctataattcgtataaacaataaaaatattgaaggacataacgaatagcagagtttaaaagttctaattatagaatttaaatccggaagacagaagcgccaatcatttaacctttcacaattagcaagcaatttttaaccaacaatgttaaaaatttataaccaaaacgaaacgtaacaacaatcgaaaaaataacaggacaaaataattatttgtttttctctcttgattgagagaaaaacaaaaaaaaaatttgaaaaataattttttctttgtaactgatctttccatacttttgattctctgtttcgcttcggcggaatcagagaatcgtttcaagttacaaattcgcaacaaaaacgtgttgtgatatcgagtatttattcgtttacggggaagaaacatttcaagtggtataagcatttcctgattgtttgaaactttgaatcgtttaataaatttaaaaataagaaaaaaggatttgtagagaa

SEQ ID NO: 14532 - DNA, 3000 bp, Unknown
  misc_feature (1)..( 3000): cDNA_ID_2175403_gDNA_ID_2684129_Annot_ID_191174 3000 nt of promoter + ATG
tcaagatttggttgcatctaagattgctttgtggactacagtaagtttttttttttcacccttcctctgcttattacatgaaagttgggatgattttcactaaatttggtagctagccaggtgaggtcatctaagagtttttttccttgccttttttgcaggttgttaatccatttaccaaatatcctttatcaagaaatattcagagacttttcatttatctctgtaattttgtcataagcttattcataatataaactgaaaattgtgtggccttaatagaaagaaagcacatatgctttgacattatctccagttgcaatgagtcttgaggagttaataccatcaaactatgggaagtcacgtttctacgcaatcgccattagaagtgcattagccatctctactctgctcgttggtcttgcgattcccttcttcggtaaggacaaacgaaaaatatacatgtaaagaaaataagtgtcacttcttttgacactcagaattcttgcaggccttgtcatgtcactgattggatcattcttgacaatgctcattgtaagttacacatttgtttcatccttttctggttatgtaaagcaaattctcatattgcagtttcatagtgaatttgcttagcctgacaaagtttctggacacagacgctgatactaccgccagcttgtttcttgagcatcttaaggaaaaaagtaacccctactcaggtatggcctgctcacttactgataaccaaaccgaatatcgaaattcctcaaactgaaatcgatataacaatctgtggtttgtttgcaggtgacaatctgtatcttaattatgacagtaggagcagtatgttcagtcattggcacatattcagcccttgcaaagatcattgagaagttgaacacctaaaactgatcaatcttgagattcttattttgtttctcttgagattttgtttctgtcttaaatcaatggaacatctcaacctatatggaacattccaaacacataattgtattaaacatcttctgcatttaaatgttaccaaacagtgaactacaagaaacaattataatactggaacataaggtgaagttctgttccataatggttaagtagcaaaagcaaagaagatcactccttattcagtagaaatctttcctccagctaaatcttcaggagttaggttaagagaatccatggatcctttcttgaattcttccccttgagaagcaaggaagtcctccacgcttcctggttctccaaaccaaccacgacggtctgcaatcaaatgtagattatcacaccctccacatcgtaccaccacaacgccgttttcatatgattctcggctcgccatcttcatagatcttgtatcacagaccttgcaagtgaagaccatcatgaagtcatgcctcgggtttatttttaactgggacttgtacttcaccatcatttcctcagagggcgtcgcaggggagggaactttggccgattcagtagcagagtttgacgagttgcagacattggttacagaagcttcatttgcctcacggattacagataactgtctctgaaataatcttccataaacatgacttctgctgaagagtgagtttgatagcgacaactgctctgttgagactattttcaaaaaaaaaaagataatcaagaaagatcaatttaacagtagttgtagttgcacgaagctaaaacagtctgtaccataacaggacatcataggaacctcctaggataatgtttgcatcaaaccgtagactaatgctaacacatcttagtcaggaaatatataaccaaacttgaaaacttaaccagcgtctagctgaaatgccaatgttcacagctactgcttaatgcatagagatatgttgaagacaaagcacttatgtgagcattcataacttcaggtttcgtagaagcacttctctaactccaaaatgtaacagagcaaagacgatattagatgatatacacatgagaatacgagtactcatcatcactaatgccccaaatctctaaaagctacaaaaacaaccctaaaaccaaaatctccccaaaatcctcttctagtgtaaattcaaacataaaaaccacaaatttacatgaatctcaaccaaattcatcaaaagaaacatcaaggcaagtataaattacacagattaagagaccagtttaactctagtgcccgattttcaataactctttaatttttcttaaagatgacaaagttgagaaggagagagatgaaaccttgagacaaaggaaaacgatgttgttggttgctgaaaagagacaaagcgcgtctcaaagcaagtaacctagcggccattgacaacctgagggagaggaggaactcgacgcttctattttccgtgaaattttggaatcggagcacaataaaagaagcctttttaatcattagagttagttttcgttatggtcaagtcaaaatctaaacccaggttcgaaccactgagtgagccacaagtagaccgacctttttcttcttttttttacgtgaggaaaaagaaatttgtgaattgaaatcttatctagaaaagaaaaaagaaaaaaaaaatcagaacaagcaggagaataatgtgtgtgatacaggatattgagtaaggccacgtggacggctgtgattagaagatcaatggacggctgtgattcaaattaagtgtgcgtagagctgaagctaataaatatcaagtgtcatcgtattttcatgttatcgttgaagttgttgttattcctttctctctgaaaacattccgagattcatcctctgcatagaacgtcgattcttgcgaggtgaatccagaaatcccttgttttatgaacattggatttcatttgttatttacatcgtaataataagtaatcggagttgttgatgattgctttggttgattgattgtgttgtggtgtggttttactgtattaaaggtatcagagcaaagacgtttctcggagatg

SEQ ID NO: 14533 - DNA, 3000 bp, Unknown
  misc_feature (1)..( 3000): cDNA_ID_2106795_gDNA_ID_2684129_Annot_ID_191175 3000 nt of promoter + ATG
cacagttactccgtttggcaaataatttatgctccctcattacttccaataccagttttaagtgctgcaaatgctccttctttgatttgctatagataaggatatcatcaaaaaacaccaagacaaacttccttagaaacttttgaaacactgaattcatcaacccttgaaaagtagctagtgcattggtcaatccaaagggcatcaccaaatactcgaaatgaccactatgagtcttgaaagcagtcttgggaatatccttctccaccattctcacttgatgataacccgctcttagatcaaacttcgagaagatcactgccccacccaactcatccataagatcttcaataagaggaatagggaaacaattcttcactgtaattccattcacctttcggtagtccacacacaatctccaagagccgtctttcttcttcactaaaaccacaggggaggcaaatgaacttgaactaggctggatgataccgctctctaacatatctttgacaatcttatcaatctcatctttttgatgattagcataacgatatggtcgcatgttcaccggattagtgccctcaatcaaaggaattggatgatcatgatgtgtccgagaaggaggcagccctttaggttcagcaaacacatccttatactcatcaagtaattgagaaatagcagaagtagtacttggtggtgacacctctgttgttaaagaagacaactgcaacacctctccctcatcctcatcagcgtctgcaacacacaacatagacagctgaacttcggagtctctcagtttgttcaatttgtcagccttgatagcacgcaccgacgaaggctgaataccatgtatcatcacccgtttcttatcccatttaaactgcattgtcaacaatgtgaaatcccatgtaataggacctagaggtttcaaccaatgtacacccaaaactgcatcaattcctttcaaaggaattaccataaagtcagctacaaaagtcgtgttatgaatctcccacttaaaattctgtattctcgctatcaccttcagattgtaaccatcagccacccgtactcttgcattatcactaggtaggagtgagcaacccaacttctttgccatttgaggatccataaaattgtgagtggaacccgaatcaaccaacataaaaatggatctcttctgacttgtacccttaactcgcatagtgttgtaagttgagataccctccatagcatgagttgagatatgagctacttccccaactaactccttatgctcttcttctgcatccaagaacacttcctcagcatcttccatttccaaaacaaacaattgtgttttcttgtgaatcttataatgttcagatgtgtattgttcatcacaaaaataacacaatcctttagctctcctagcactcatctcttcagtagataagaaccgccttggctgattttgttgtgtgtctcttggtttttcctgaaacgctggtttattgccctgctgctccatgtctttcttaaaggagaactggccctttgaagtagccttattgttcttccaagaagtcgcattgttctgcacaggatgagcagtttcatagagacgtcccaacatcaaacactgccgcaccgtttggggttgaaacattcggatatgcatctgtgtctcaatccttaacccaaccaaatacgcactcactaaataatcctccgtcatccttactcgagtccggatcgcctcaaactttgcgtgatagtcatcaatgctagcagctgtttcctgcaacttcttcagctcagcaataggatcctctccaaccatctcaaacctctccctgatcctagctttgtacacaccccactcaggaacctgcacttcatcctcaatcatattctggtgccaagtagcagccagaccatccaaatgaatagaaactacagacactcgcatctcttcaggtataggatccaccgcaaaaaattgatcaaccttaaacaaccattccttaaccttctcaccactgaatctgggaaaatccaacttccctaaccttgttactcccgaatgattgttagcgtgaccttgccttctcatgtaatccacgtctgttgctgaagcggatgaagcacgagctgtttgatgagtctcacccagatttgactgcttagatggagacagcatgtggatcgcctcaaacatctccgagatatggcgctcgatcttcagattttgagcatcgatcttgctctcgatcttctccatctgtgactccatcgattcctctgcttctaacgccttctctcgacgagcttgagctaactcctgagctcgagtctcgatcaccatctccgagaaacgtctttgctctgatacctttaatacagtaaaaccacaccacaacacaatcaatcaaccaaagcaatcatcaacaactccgattacttattattacgatgtaaataacaaatgaaatccaatgttcataaaacaagggatttctggattcacctcgcaagaatcgacgttctatgcagaggatgaatctcggaatgttttcagagagaaaggaataacaacaacttcaacgataacatgaaaatacgatgacacttgatatttattagcttcagctctacgcacacttaatttgaatcacagccgtccattgatcttctaatcacagccgtccacgtggccttactcaatatcctgtatcacacacattattctcctgcttgttctgattttttttttcttttttcttttctagataagatttcaattcacaaatttctttttcctcacgtaaaaaaaagaagaaaaaggtcggtctacttgtggctcactcagtggttcgaacctgggtttagattttgacttgaccataacgaaaactaactctaatgattaaaaaggcttcttttattgtgctccgattccaaaatttcacggaaaatagaagcgtcgagttcctcctctccctcaggttgtca

SEQ ID NO: 14534 - DNA, 3000 bp, Unknown
  misc_feature (1)..( 3000): cDNA_ID_2105807_gDNA_ID_2684129_Annot_ID_191173 3000 nt of promoter + ATG
aaaacaatatgaacgaatgattttagtatttaactttcgtcctcatgtagccatgttgttattttcaaaccataaagaggacttaagagtcgtcagataaaacaatgatattttcgtattcgtcgatgcactaataaccaactcgattggacaacatatcttacttcattcacgattttgatgatttcaccgaacaattttttctttctttctcttttgtcttttaattatgtcattttcttactggatatgttcactggtcgagttgggtcttggcctaacacataagatatatttatgatagacatatcttttttttttatctttttttgagttcaaagtagacttacatatgtcaaaatccgagactcccctaactcatgaaaaaagtgagacgaattcaactactttgccgaatttacctgtcttagaaaatcaatcaaacccttgagttgtttgcttgatcataccttctcttctccttgtcactttcactcaatacaattgacacaaatcatcactcgggaatcaagacccaacacttttgtcttggttgtcaggggctgggttaaatactactaggcccagtatcagcccacgtaatgttcttctttactgttttgtctatgctctagtttttgtttatacattttctttgtattcctcattctcctaacaaccctattgcctgcctattggtatcagaatagaccaccactgcacgagaaaaaacctaaacttgatcgcgaggaaaaaattgtgtaactaaagtggtcgtggagcggtggaggtaaaacattactacatagtactgttacaaaacaatatcttgtaataattaaaataaaagataaagtagtaaaaatattatttttttgtcacatcattacaattttcctaatttatgtttagaccattgctgtttggcatactaaaggtataagaaagacacgccacagagatccagtggtatacaatttttatgctttggaatcaacttatttgctacaatgacaaactaccaaagtttatttaattactttacaaaaagaattatttggataatccaaaatcaaagaggggaaagttggatttacatttccgattaacattttaacgtaaaaaggaaaaatgtgaaacataaagtgggcaactggacattcacggcaacagatcaaaaacccttttttaaatcaactacttagtaaaagaggaataaattaacagattatcacacacactgattgataaattaggagcaaattggttttaacaattcaaaagaaataaacaaagcactaagttagttttggtgctgacgagagtggacggcaaaaaaaacagaagatcactattaagaaagttaaagttaatagtgcaaaatattaatgtagggaaaaaaatgactacaataatgttcaaagttaaaataaaggacattttgttggcaagaagaaaaacattagaaacaaaaacagaacaaggcaaagctgcaaagtcaagttgagtcggtgaaagagaacaacaaccaacctttaccccactgccatcctccctagttttgaacatgtgcactttcttcgttatttaccatcacttttgtgttgtcatattcatcttcttctattcagagaagacatttagccaaaatttatgtaatttccgagattaagaactggttttcctttgtttgtcacttcaaaccagtgatcaacaatgaaaacagtaaatgttacagtggtctataccaagattctaaaagttgaaaagtggaagagggcatgctaatttgaatgaatacccaatatttaagattctagaagctcctttttatctatatatatcaactaaatagtcggcatgaagctctcaaatacttggtccacctatttatagagtacacaacttttttggaaacagctaattggaaaactctgtattatttagggtttggtactagttccttttgttgtgcaactatcaataaataacatataccttctattgataaatccaaatccaaactctaaagtgagtcgctgaaaatgaaagtagtaaaattttgtggcctctcatctcactgtattcatatttcgtttgttgagtgccgactctactatccacctattatgagattcttatgttaaaacttacaaaatatatttacctagattttgtctttgtccatactcttccatgtctcgggatcagaacaaaacaactagtttacgtgcttttttggaaggtcttatagtagtaataccaacagagctacagataatggattaaatacatgtaaccaacaaatgttatattacttttataaaataattataaatcaatgaaaaaaattccttatgaatcgctaaattttcaagaactcaaaaccttattcggttttcataatgagcaatgatgaatacatgttatacgtcgaattattattttggattctcaagccggccctttgctatcttattttctcctttacaacattttttaaccccattgtcaaagagtcggctttgagcccatgattgtaatgaatggatagcttgaatattgcgaccacactaataattcccgtcaaatatttgtttaacttaatgtatgacacatgtattttacgagcaaataaattcaaaaaatttaagcattagcgaaaacattgtttctccgctccacaagacactaaaacataaataatgaattaaatcagtcattctacagaaaattaatcaccgtagtcggttgccatcattccaaaaccttaaaaaaaacccatgtaaaatgatcattaacaacaacaacaacaacaaccaaaccaacaaaaattaaagtaaaaacagagtccaaagcctcgtcacatctgcccataaatacccttcaccgactcaccatcttaccacatcaattctctcatatctctctctcactttcgaatatatcttaagataacagagacacatactcttaagtttggtgaagaataagaagaca

SEQ ID NO: 14535 - DNA, 3000 bp, Unknown
  misc_feature (1)..( 3000): cDNA_ID_3017823_gDNA_ID_2684129_Annot_ID_191168 3000 nt of promoter + ATG
taccattttggcatccgaagattttccatggagaaggtgcaatgacatcaggcgctacgtttgtttcgacattcaatgatgttgatgagtaatttgtcgatgaataatttgtccagtccacagagtttttgcgacggttcctctttgatacatcaagcttcacaagtcccttctcagcatgagatacaaaaaattcgcaatccggaatcggaaacccctaatgaaaacatgagtcccatgaagaaaagtctctaaaatctttcattgtaaagaaaatgttaaaactgttaaaaaaaaccttttgtgaagcatcctgcaatgatcggatccatttggcagcttcttcaggactacttgctcccaactgttgaaagtcagaaacataactgattattaagagtttaagacaaatagaagtctgagaagtaaagacaaaagctttgaaacaaacctttagttgatccaaatggttcgaagtgttgtaaagcgtgaatatgaaaagaatctgaaacaacacatgaaaatatagtaatacttaaactttctgtgaaatatagaaattgtaggcttattagtatcttaaagttggtacctttctatggaaactctctctaccattgtcggtaacgcgaatacaacaatctagagatgctcttctctcaggttcctacacataaaacataattttttgctattcaaatggctcattcgtttatatatcacaatatacttaatacatgttgttttgcatctatacgtaattcataacacatgaacaaaaaagaatcccacaaaacaaatgaaagtgtgaaaaaagtcaaaagacaaacctcattgtgatcagatggtacagatttaaaacttgtaaggttgttctcgtgaagaacgaagtatcgtttacgggaaaattgaaggccaaatcggttgtgtcggatggtataaagccaaccttccattcttccgtcggtttgagacactcccatttctctacaaatccttttttcttatttttaaatttattaaacgattcaaagtttcaaacaatcaggaaatgcttataccacttgaaatgtttcttccccgtaaacgaataaatactcgatatcacaacacgtttttgttgcgaatttgtaacttgaaacgattctctgattccgccgaagcgaaacagagaatcaaaagtatggaaagatcagttacaaagaaaaaattatttttcaaattttttttttgtttttctctcaatcaagagagaaaaacaaataattattttgtcctgttattttttcgattgttgttacgtttcgttttggttataaatttttaacattgttggttaaaaattgcttgctaattgtgaaaggttaaatgattggcgcttctgtcttccggatttaaattctataattagaacttttaaactctgctattcgttatgtccttcaatatttttattgtttatacgaattatagaatttaaactctgctttccaaaggttcaaaagctaagttgttaaatcgtacggtgaataactgaccaattagtggaatcattaccgagtaatcattgtctattggagaaacaagtaaccccaacgagaacaacacattaacacaagttagcatatatctccaaacaagaatttgttgttctaaactgagaaagaccatagacagattagatttcagttctttacaaaacaataacgggcctagcctatcaattgggcttaacccatcaatttgtttcatacggcctaatatttctttgactttatttgccgtaggaaaaatagggaaatcccaaaaatctgaattctgtatgttgacaaaaagaaaaaagcaaatctgaaatattgatgtagatagaaacccatatatattacccaaaactagaacataacaaagttaatcattgtaccttataatctccaaggaccaatgaatcttcttctcctttgacataattcctaatctcaaaagtaatgatttttaaaattcacaaatttcaacccttaacttattcctttgtcaaggcaacaatatgagtaaaattacttaagtgttaatattatatatcatcagaaacataaaaagaaagaaaaaagagacagctttaagatgtaccaactccaacattacagaaacagtagagatatctgcaaaaaaaccaacttggggcccctcgccattactattttattatttttcccttttttctgctctgtttcgttgcctgaattcttgcatcagtctctttctctctctcttctctcttctctttgtgtaagcaaagaaccaatctttagataatttaggaaactcttcattattcctcttgcaagctcgaatgatcgccgccttgttcccttgatacctcgaatccttttcttcttccagcctcagtatcacttcaatcttctcgggtacctccaccttcttacattcctttgttacaatctttttccaaattcgacattagctttgtactaagttagggttccttacttgtgggttttcactgttctgtcttatttctttgttgagattctttttcgatttgataggtttatcagattcagagtaactctgttgttttctccacactttattagactggataaattagtttaatcaaatataagggaaaaaggaaactagaaagcagaaacatctgttgagagaatgtgctcaagtcaagtctctgtttaaatttacttccttttcttcagttttccacaagaattgactgaatctagtcatgtctgtcttctcagactaataagtcaaaaagtcaatgcttttctatgtctgttctatcagaaaactttgtgttcctttctttttttccatataatacacagaaaagtctgaatatttttactaatccaattgataacactatcaaggaaccaacactctttttaaaagtcatgaaagattataatgttgatatgtgtgtgttttgttttttgtgttcttcagcttgatagttaaatg

SEQ ID NO: 14536 - DNA, 3000 bp, Unknown
  misc_feature (1)..( 3000): cDNA_ID_3017835_gDNA_ID_2684129_Annot_ID_191165 3000 nt of promoter + ATG
gggtaaattattgtctaaggtttaatcttcttgaatatgtacgtatgataatttgattagtcccgtcttgatattgaattaaggtacccttccgcctacgttgccccgaacatgaccttcaatcaagtaagtctcatgaattctaattcattaaaaaataatcgatattcttctatgattttccacttaattatgaatttcttatgtggttgtttaatgaacagaaagttggatatgtcggaggaacctatatgaacggatactatgcacaaatgcaaccacaaccgcaatcgcagccacaaccgcaatattaccaccatcacatgtatggtggaggacgagttatggttggggcagcaagtccaatggtgcctttctacactgtctatccttatcatcaatctcaagccatcgggtttccacaaccttcattttcgaaacctctttctttttccactcctcctatatcaggtatttgtcattctatttctaaaccttataacggaagctagtcactaaaaagatatcgaaaattacatatctggataattaagtactatagcaataatcatttgagaaaaaaaatatacatatcagaatcaacatttggtttcacatacgtacttagttaatataaatttgctgcttttttttttttctttttttatctctctttacgacgactacaatttacaaattagtaatattatacattcacgtaacgtgtcttcttcacatatagtgttgttctttaatcttaaccatctagcttctgtctatccatcatttttttgtttactctatatatatgcaccaaataaaactgatgagacatacgcacacatgcatacacaagttgatcacgttattaagttgatgtcagtcatggcctcatgtgcccatgatgtaattatcacatggatccaccctcagctagctaggccctgctttggcacgtgatccctcgctgtagcacgtgtgtctgtaataatttagttggatcttggtgcttataggttaataaaaaacggaaaggtctcttacatgcaagatgttgtgatcttcgtgtgtcggaaaatctattaaactgattttataaagatttgcgtttttgactctgttgaataggcacagttggaggagagagcatacagaagaaggccatacattgataggctagaagctgttaatcaaacgattgactcagcccaaaattattcattttatccatctcactaagctttatttttttctagagacttgtatttgtaataatttaatttcgttacatttaataatttattcattgaagctaagctgacaagttttttttttatataaaatcgctttataatgaagtgttctacttaaatacgaaggacatgatgagatacaccaatctcttcggttagcctagcaataacgtgaaaccaaactcgagtcataggacatgaatgtatgtgcttctttcttgccggtgacagtggtggatacaaacgaatcctccatagatagtttggattcggcccaacaaactcgtgcaatcatcatattaacatctaagaaaagagtagctatgattgtaaaacgaaagaaagttataagtatttaggatagttaattatatatcaacatataaagttaattataattatagccattttatgtattaattagtttttaatataatgaaaagagttcttttagcacattttaactcgacgtgaacaaatacgaaataaaaaggttcttttagatatctttgaaagttttgatcttaaaaagtgaaaacaacaagctattgggttaaaagtgaaaaattcagggatcataagttggttttctcttcgagtattgcgttttcttcttcaccacactggtctctgatgaggtgaagccggtagatgagggagagcatgtgctgagagtcagtgagacagttgttgacttagttgaggttgaaacgaatggtgagacagccaactctggagttgagagtgaacatagtgaaagtcatgaaagtgcaggagaataggagagtgtagtatctggtgggaatgaggtgactgatgagaaggaaaactgtgaagttgaagataacggtggtgattttgatgctaaccaaaatgttcaaactgaaaagtcccggtaaagttcagtggatggtgtcatggtgaaatggtttctgttgtagaaattgaagcataccttctatcccaaaccagaaaaagtcacaaagacatagatgagtctttttcatcacgttaatctagcaacgacactaacataaaccacgaatctacgtatcatggtttatattagtaaactgatcttaagctaattttagatgcatcatgtttggatttttggcatgaacaaaaatatttggaaaaacaaaaaatatccaaaaggaaaagaagaacaaaaaaatgtccatatatgtattgaattattttaatttagaaaaaatcggaagtttacctcaaaaaagagccacgtggataaatcaagacggtcgattaaatggatcatagggatgcaatatatcataaaaccaaccctccccgaaaatcgtgaacaggcaaaagagttattcggtagctctcctctccgaatctaaaagttttccgaagaacttaaaacaaatatgactgatacgctcgagctcgactgacgaattcggcgtagtgttcacttttcttcttctttcttggaaacccacactcgtctgagtcgtctctgttactgacacccattaaagccctagcctttggtttcttttctccaaatcttgcaagatctcttgaggtaatttcgccaatttcattattctcgttgttaatttcacttactgtatcactgaaatctggaatctttcatgctttttgtgaataccctttgctctgatttctgtttcttgtttaaagttttcgacttttttttttataataattacggacgtcttgagtaattttgagctggaatcagataattcacatg

SEQ ID NO: 14537 - DNA, 3000 bp, Unknown
  misc_feature (1)..( 3000): cDNA_ID_3017851_gDNA_ID_2684129_Annot_ID_191161 3000 nt of promoter + ATG
ttgttcactgaaaatagtttgtaagagttgtaagacatttatacttgagaaaatctgctaataattttaaaagttttgtatggattttgattgaacaaagaaacaaatttaaggtagtctttttttgttgcctaccagatttttatgattaacttttgtctaccagatttatagaagtctattgtctaaacccaacacttccaatgtccctagaatattttgtccgaatgatgactcggattatatttatgaaggtgcacactacaaagatacgttcaaggacccacttagatttgtcctccctatctctcacgatagtgctgtcagatttctaatttataattacctcaattttttttttttggtcaaactagctttttataaatgattctactctccaacaatggagaaatggttcaacaagtacatcaaagatgctacaaaggccaaagaaaccactgctacaaatggcatacggaaagcacgaaagaaaaagataaaaacatacataacagttaagcaactaaagttggagacaccaatagtgctgaaacatgagatgagctttcggaaataagagagcacacttggtgatctgctgtccggagatgcaacatcctctagtggataaaacgcatcatgaaatacggctacgatagcataggcgacaaagcaccaacttcttgagcctacgagatgtgagaaaaacctcaacttcggagaggtgtggggttgcgaaaaccaccacttctcgatgaacaaatctggagtccaagacccaagatcatttcttgttaagacgtcatatgtcttttcctttatcctgcgtgaaatttcaagaaaccaaaccaaagaaacaataacatgaattgctcttaaccaaagtttttgaataacatcctcataatgaggtaagagaagcctaagcttatacagaatcaaaccaacctcatactgaggtaaaagaagctgaattcgaagtccaatcgaaaacaacacatcctcataatgaggtaagaacaacttgagcttaagcaagatcataacagcctcatactgaggtaaaaccagcctaaaactagtagaaatcatcacatcctcatggtgagggaactgaagtataaacgaaggcatgttccaaaagaaggtaaaaaattcaaagaaattactacctttcagagagacaaaaccttttgatagagtgactagaggatgagagaggtgtggaatagagaaccaaagctccaaacaagcgagaggaaatacttggtaccacgaactgcacacagcagtaatagatcgtaaagcaaaacccagatctagagggctcaaagcctgaacaagatctgatcctagatctgaagacctcaacaacaaaatcgagagaaaggagttggaagctccaacgagatagtctggtgggtctggagggtcgggaggttcagaaggagagaccaaactggtcaaatcttgcggtagagcacacggcggcggattcggagaagggaggagcaaaggtggagcaggagcccgagcaagcatcactaaagccatagaagaaaggaagaggagggagaaagaggaagattctcgccggtgggcgagaggccacaccaacggcggcaaggagaagaagaaaccctagtcgtcaagttgagagagaaaaaggatttttttataattacctcaatcattccatgaaattcccactcttttgagaagaagtacatttaaaaaatttaagatcttattttcatagtgaaaatatatggagcataggcgacgactagatgtaaattatcttatggatggggttatacttagatactcctgctaaagtttatctgtgtccctaaaacatagaaggaaccaaaactgacaaaccaaaatttttatttgggtcatttgaacaaattatagtctgtattgaattaggcgacaacaaaaaatctatagtgaataataaaaatagataagagataattccatttttttataaagcattttttttctttctagtcaattctgagtggattataatgtactattatgtaagtatgcatacagacaataggtccgaccaaatgaatcaaatgcataaagacaaaagcttttcatggttatcatttttattgcgtgctcatcatttgttcaaatagttggtagtttctaatgtaaatccaattctattttcttcaaaaaaactggatatgtgtacatcatgcaaaacgaaacgtaacaagttctggacttgaagttcatcaatgcatgcatatatatatatagctttggacgaaaaataattaaattcatgtttggaggatacctccacgagattgataaaattatcgatctcgatgtcccaagtcccaacaccgttctcagtctcgtgtctcctcttgtccttcaacgctgccttcactttaaataattaatgacaatgagggaaaacatatgataatcacaatggagaatatatatcacgatcgagtgatatgctaatgtttaattatgataaatctaaaatggaatatgtcaaatacgacccaatacatcatcgagtgatataaaaacgaattaaaacaaactgaaaatgatactcaaacgaagaaaaatagtattttggccacccactactactcaatcaaacaatacacattttcatttttggttcgtcaatatcgcagcttttcatcattccactaagctcagtaatttagtgggggaaaaaggttttcaaattctagtttcttagattgctgactctgttgaaattctagtttctcgtaattacacaaagaattagtctttgttattatttctcggaggttgatgaaaaagagattaataaacagagttttgaccaagacaaaaatactcataaagacaaagaagacaaaaacgtaaaaatgagactgaagattatttcataataaatactttggctcatcagccactatacttactaaaacaatttactctctctctctctctgcaatg

SEQ ID NO: 14538 - DNA, 3000 bp, Unknown
  misc_feature (1)..( 3000): cDNA_ID_3018002_gDNA_ID_2684130_Annot_ID_191188 3000 nt of promoter + ATG
aagagagagaatttagagagatcaataggaagtcaaagtgaccttgagcggtggtttgggattaattttcgttcgtgctcttaactgatgtttacatcacttcccatataatttcatatcaaagttatcactaaaccggccaaaatatatgttccgtttgaacgcttccgcataaaaaaaaataacatatgataattttaccattgtttatgatttttttaattacaaatgtttgattttcttttttttatatagaaaaaaagtgtaataaaatttagggtgaattgcaaaaatgacgtttttaggagatgaaataaagaatatagcactacaaatctataatgtagtgaataacatttaggtgtggtaaaaagatcacaaactccttctaacgaaagagatagtaagcgcgtggaataggcgaagaattgaatacgagtgggtaacgtgacgttgttttcatccaagcaattttcagtagcatcatcaaagaaaagtcctgcaaacaaaacaaaaaaatatagatgagggtgaaaatagtttagcagttaatacgacaattcaaaatgtaaagatacatatatttcgctttcaagctttactttgtttgaaaaaatatcaaattgtttataagtacagaaaactaaaccctaagaatggtagggaacccaaacaacaaaatctgaaacccccaatttagattttgtaaaatttgaagttttgcctctgtaaatcaaaaccccaattcaatttaatcaaaaaccctataagtcacttcaggaaattaattgcattgcttccatcgtcaatatacctctgctgattgttggcaaaattagaagtttcagaaaaggtggactgcaacttattagagctaaaactctgtttgaaagttaacagttggtgaaagagaagaattgggttcctgcgaaaagaagaagatgatgagcgtgtttctcaaacaaggataatgttgccattattacaaaaaatacaaacaatatacgttacttttttgtggagtgttagtttcttaaatataatatttttgtagattataagcccaaatttctctaaaatttacatacttctatctaataatagagttacatacttctatctaaaaagtataatagagtcacatacttctatctaatatgtaacaatataacataacacgtaatttgttttattatgaaataaaaatcatgtaattataaaataaaaatacatgtgataaaattgtctagtgattaatcaatggttcctacacaatgttctaaatattttagtaaattttactagctaatagatggaaacttatcgcatgttacaggagtagttcatcgtggccttagtaagttattgataaagttgtccattttatgtgttgttgtcaaattgtttttgttttttgtatttttttttgaataagttgttatcaaattataatgtctaatactactatagaaatttatcacttttatcctctctttttgttatgtctttttcctttcaaaattgcataccattttgtattcttttctcaccaaacttattcaaactaaatttccaaacatattatagagaactatcaaaatacaaatagttacataaacaacataagtacaaacaaaatcacgagaaaaagtgaaattatattacaaaatgctatatttttttctcacactctatattaatgtcaaatatgagtaatttcaatcaaaagccatttttcttttgcataattcatgtttatttttttatttttttcatcttgcataattcatgtttaaaaggatatatacatgggtctactacattcacctgacattacgttttatgtgtttgtcttctgaaaataatcatcaaaatatttcaggacttgtttacgttttcaggagaaaaaaaataactgtacccttttcaatatagaaataacatttgtagaaatcgtggattttccttaataaacaatccaaaacacgaccaccgttgtctcctcgactcggtaacacccgatcgccgacttgaaaattagaagaaaaatgaaaagaataataaaaaaaaaaaaggaatgattattgaagctgtcatatatgtcgaccctatcacagtcaatccaatagcctatattcgccaactgatatatccaacggctcacaaattttcacaaacttttcaaaaaagtataaataaaagaggctgtctgacagccatgtcacgttatactttttccgtatgatcgaaatgattcgtctttgtcgaatttaattatttccaaaattgatgactctaaagaaaaaaaaatagtttttcagataaacccgcctatataaatagttcaacactcggtttatttcttctcccctctttgaattgcctcgtcgtcttcagcttcatcggccgttgcatttcccggcgataagagagagaaagaggagaaagagtgagccagatcttcatcgtcgtggttcttgtttcttcctcgatctctcgatcttctgcttttgcttttccgattaaggtaattaaaacctccgatctacttgttcttgtgttggatctcgattacgatttctaagttacttcaaaagttgtttccgatttgattttgattggaatttagatcggtcaaactattggaaatttttgatcctggctccgattagctcaacgattcatgtttgacttgatcttgcgttgtatttgaaatcgatccggatcctttcgcttcttctgtcaataggaatctgaaatttgaaatgttagttgaagtttgacttcagattctgttgatttattgactgtaacattttgtcttccgatgagtatggattcgttgaaatctgctttcattatgattctattgatagatacatcatacattgaattgaatctactcatgaatgaaaagcctggtttgattaagcaagtgttttcggttttctcgatcaagattcagatctttatgtttttgattgcagatcgtagaccatg

SEQ ID NO: 14539 - DNA, 3000 bp, Unknown
  misc_feature (1)..( 3000): cDNA_ID_3017958_gDNA_ID_2684130_Annot_ID_191201 3000 nt of promoter + ATG
aaaaaaaatagaaagtattttctaatggtaattgggatttacattatataaagcactaattgctgagataaaaccattcatcaggtatatatgtaaaactattctcgagataaaacaagaaagtgaatacacaattttcttgcctctattcataagaaataaacctgttttcattgtgtttatttaacaccaaaagcactcaaaattgaggcttaacattcagacaaaccgtaactatagaacataagaaaaacctaactattgaagaggttgcattatatcacaagtttaaaacaccaaagctcaagctgagtagcaaaaataggtctcttcttccgccaccaaaacctcaacaggaacgtctacaaaagccttgaccgccacaacgaccaccggaaaaacgaccaccgacgaaaagaccacgaccaccaccaggaccaaagacaggagtaccaaaacggctataaggttcctcatcagaagatgatccatccacagacatgctctctgcctgggctttacagagccaattttaacttcattatttgacctaaacaatgagatcaacagatccatcttctcttccattttatgaagacgaataccaaatccttccaacatctccatcgcatcagatattttcatctcagtcgtcatgtctttcttatctttctccaaattgtctgtaggcgtcgtgtccttaatcacagaaggagatgcttcagctttggttgcggatttattgtccatggagaagatgattagtagaacaacgcactagagctaggttaaaagagagaaattggagatcggcaaaaacccctaatcagctgcttaggaagaaaggtatttataagagtcttttatattctggcttggggcacaagagtcctttccttttattttatttacttttcccgttgttcattttttcaactaagcaagctttatctgggccgaggtgaggcccattaattgaattaaaagcccaaaataacaacaaaacattacctgattgtcggaaaatcagacggaaacaaaagaaatcaaaaatccgatggggaggaagaagggattgccggagttcgaagagtcggcgccggatggattcgatcctgagaatccgtacaaggatccggttgcgatggtggagatgagagaacacattgttcgtgagaaatggatccatatcgagaaggctaagatcttacgtgagaaggtcaaatggtgttaccgcgtcgaaggcgttaaccattaccagaagtgtcgtcatcttgttcagcagtatctcgatgccactcgcggcgttggttggggcaaagaccaccgtcctatctctcttcacggtgagtttttttcccggcgttctctctcacactggtgaaaatgcttagattgaaattcttagggtttcgtgtttttttccttagcctttgaattttgaattcagttactctttagtgtgtttgattgaatttgatttgaatttgatgtagagtggtctcaaaattcttcatgaatacctttgtgaaattgattcttcctttagatatatgtattgaattttttttgtttgtattgattttgtcaaaccaggtcctaagccagtagctgttgaagaagctgaatgatgttgtgtgcgtgattgatctttggtaagtaactggtgttgattagttatatagtgtgtattgcttagaagaggagaaaggttagactttctagcatgctttgtgtagacactatcttataactggacatgttatgtgaatctgtttgtggtaggagaaaattggaatatggatgtttggatagttatatgtatgaactgatcaggtcttagagtgacttagttttgcggaagttgtggatacactggttaattattgatatcaatctgactgcaatcacaaaggttaaagcttagtcatggactttcttcggtggttttagaaacaggacatgttttggaatgtatagaaatgaaattgatagatcttggagtgactcaattttggagacatatgggccgatattatagataccaatccgcttgcaattgcgtccatctttaatctgcaacagagctaaacctagtcacagaatttcattgatgaattaattatttgagatatgagatgttgtggactgtatgaagaaggatagagctccaacatttaggttttgattggtttaaacaatagttccaatagggttaaggcatatagtcaaaatctcaagttcaaattggattgatgatttttgtatttggttcaaagattttaaaggttttttcttgctccaatgacacaggtgagtgagagctttgattaccatacatgaatggagtctctgttgcaagttaatgctccacatcaaggttgttacttgatttatgcttttctgtttcgtaaaacatatattactaattggacttgggagttccaattggttaagctcagcttcgtttttcaaatgatttatatatatttttggcttgttgtacattgcgtccctgtttgtcgaaataatgaaattcccaagtacctttttgcatgcttgcaacttagtatatgtttttaagactttatctgataaaactaagaaagagttaactctaaaaacatcatactttccctttatttcaaaactgtaggaacatctttacttctttagtgttgtctaaatggattcatttctgaaatagttcatgaaatttttattaacctttaagtagtagttcaaacatctacggagtctattaccatatgttaaatggtgacaaagacaggtaaggaccacagacaaaatgagtcagaaaacaaaagactaacaaacaaaaagataaaacttagagatgggtaaggaaaagaagccataaaagacccaaaaacataatccaagtctaaccaataagatcgcaaagatatggatcaacttcggtacatgatgccaaatcatcactacagtgtcttttttccttgtacaacccaaccaaaa

SEQ ID NO: 14540 - DNA, 3000 bp, Unknown
  misc_feature (1)..( 3000): cDNA_ID_3017950_gDNA_ID_2684130_Annot_ID_191203 3000 nt of promoter + ATG
taaatattaacgaggatatcggtaactaccatatctaaatttaccatttttttttttttgtgatagaaaaagaaagttaatattttagtaggaaaaaatggaaaattgggaattctctgatgatatattatagttctttttttctttggtcctaaaacttcaattgatatcacactctaatttttatttttttgtatttctcggagaataatttgtagactacacattaatgattaaataaaaagttttttattttcgatggagaaatcaaccatctaagtacggagaacacgtaaaattgggactatccagaatctcataggttaatctcaaccctcaacttatgattttgagaaaataacacacttttttttttttaacggcaaatcgattttattatatagttaaagtttacatgatacataagaaacattcaaaagcaacctgagaaaataatacacttattctatcaaaactagtagtgatttttttttttgttatattaacgagtttaattttcaaatcattagattattttttaagtcactacatcatagtatatatatttatcatcttatatgtataaaatgaaatttcaaaacttgataaacatgatccgattaagttgagaccttccagtttgagtgtgtcgataaacataaaatttttgttttaaacagtagattaaacttttaaaaagaccgtacaacaaaaagaaaaaacaaaacgcaaaaacgttacaaaaagaaagactaaagaaacaaaacaaaataaaaagcataatgagtagtattaatgagttatacattttcccattaacattttcacatttccccattaacgagttaatgagtcaaatctacttcttacgagtaagacgtctcttcttcttagatgatgtttctccaccatgaccaagaacagatccaatatctttcctcttattatcaacaagacaatttccatccatagacgaaaccggaacttcaaacctttccatttccttgagaacagcccgaagattatcggcttcgcgtaaagcaaaactcaccgtcttgcgttcaatcagtccttcaacatacttgtacaaaccgcatttcactccctctttcctacaaaaatcaagaactgcctcttcgtgcaaaacattgatggctacaccgaatgcagaaactggccagtacttgtctcggagacgaacaccagtatcactttctttcttcatgaccgcacgagctatctttagttcagagctatactcagcaaattgagcgttaaacgctcttatcatagccgattcagcagccgtcctaccttttgatgtcgctcgcctctttagcttctcgctgcgttgcacttccacaacggcttcaataccggcttttgttttcatccattaaacttcgtagatttgacggagattcatctcgtggcttagaggacaaatccctagtgagtttgccttggctaacacgctatcgcgtatatgggaagatactaaattatataatgacactgaattgaggcgagtgtgtgaaaaaagtagactattcagttgctgccttaataagtacgctgcttcattttcccaagagggataagaagcacgctgtttcattttcccataaagaaaacgaaagaaccgagtagtttagacttaagttatttatggattaaatataattctgtagtatattttaaaaataaaatgttactaaattgtattaaaaaaaatatagctttttgtatatatataagctgtttttataatttagcatagcatttgaaataaaaacagatttttgagtgtagctgacttctgaaagagattcattagccacacgatgcaaacctggcttgtagggctttgtcatagtgtcgttaatatgttacataatatattagagattaattaatagtatgttgtttttgttttaaaacttcctagacgaaaaccaaatcatgaaataaaatattgtatattgcaagtaaaagatacatttaattgttatcatataggaattttaaactgcatgtgtgaaaattcctctgtttttatagaactaaatcaaatgttagcattaattcaattatttttttaaacgttgttcaaggattgcatattttctaatacgtctgaccagtgtggttagagtctaaatggagtattcttgccgtgtaaccaaacaccgcatccatagatcttgatctccatttgggagattgcctctctagttggaacaagtgaactatcatcatcttttttctaacttctcttttttaaaatttttttttgaaaattgggtggttttcaaccttctttttcataaaaaaaatcagaatcattagagttggatacacgtctcaaaataacattctatatctctcgttgacatgttctccatatgctttaaaactaattataatcactcgcagtattaacttaccttatccgcatatatatatgttcatcgaatgaaaactatgaaggtaagggtcagctatatatgaagagatggagttgatcacttaacttaatgtccccaaacacaaatgaataattttctataccaacttgttagaagcatctattagggagtactattctttttgcttttggcacagagaacaacaaactttatacgatttttagagttaagctctttgaaataaaaccagtcggataacagaactttgaaatgacgcttacttatagccaaagtttcccatagggaaaaaccctaattaggctaaaggaaaaataattttgtattgaaatgttagaaaacggcgccttaatgttttgagttaatgttgtgaaattgcaaatgttagaaagttcagggttttctagacatattagtattttattttggccgttgacaatatatgggtttcgtttctttaactagtatccacttgatcagaacgtgatataaaataatattttggaacttaaaaagatgtcaagggtcgtgttatcctccagaaataggaaaa

SEQ ID NO: 14541 - DNA, 3000 bp, Unknown
  misc_feature (1)..( 3000): cDNA_ID_3437565_gDNA_ID_2684130_Annot_ID_191206 3000 nt of promoter + ATG
caaaaatctcttcgagagaattacgaagaacacggaaattgggggcatgagacacaagacagatacacttgtctgcgtatgtattcggcggtaagcgataagcttcaataatatcctcacagactcgatcccgaaatgcaatgcaactgacaaatatttttgatccatcaccctctgtgcaaaaattattaagataaaatcagtaagagatcacccaccacagttaaagcaggtgtattcaaaacaaaccaacttaaatccaacatggcagagaaacaagactagataaatgagtgcaagacgacttctacgctaaaataattccactgcaaccgaaacaacatcgcacatagagcagctacaatgcaaagcatacaaaactccgagtatgcaatatacggataatcacatacccgtcaagactatgggatagctccgtgggaaacttgcagggtcactggaaacaaaaccagaagaatggaactccaccccagcaggaagaacacactgtccaaaagaaaatgaagcgtaatcataaaaatccgcttgtttaatatatctagtcttatctaacgaaagaaaacaaactcttaaaaggcttaacctaatcaagcaagttaaactcttaaacagatgactcatttcaccatggagcatcaaaagcaaactacaagcacaagaccaaaagcaaagaaatataaccacactttgagagaaatttcaaaagctccttattggtagaaggcaattcaacttcaatattccaacttaactaatctagagacctaattagaggtacctagaaaacatcaatccaattcagcacgtttatctccagttaataacttcgaaatgcttcgtttagcaaatacagaagaaacctaacaactagacaacgctgattccacatttcatcgccgtttaacaacaaagaaattaccagcatggacctaaacccaatcaaaatcctaatctcgacgagaattacaaaagatgttgtgaaaaacttaacagtaggaagctgaggaggaggggcagggtaaggagattgatcagtaggagggaactggtcaagaagagcaggcaagtagaatgtttgcattccatggaatccaagatctccatccacggttcgcatctctggaccaagtccgcacacgacgaagtactcgaagatccgtcccattgtcttccttcgagatctaaactagggctctagagcatgatctggatttccaaatggagatcaatttttggcggatttcgccgatggtgatgatgatggagaaaagtagttgcttcaattcggcctcctttgtttttttggccaagtcgttcgtgggaaaataatcctacgggtcgaacgcaatttgttttccatttcacacaaattacaacaatcaaatttttgtagattttattttattttaaagtttgcaaagtagcaaactaataatattaattttagagttaaaaaataataatactattaactttattttttaggttacatttttttaaatgtgttcatatgtttaattttatttaagcttttaatatataacaaaaattaaaactgaaaaaatagtaaaaccaataaccaaactctaaaactaactaaaattgcacccatttcggtcttttatactttatcttcttaatttcttgtttttacagttattttttggaactttacgaactaattaatatatatatatatatatatatatatattattttcgtcaattaatatgtttttcttaacttttgaattctgatattcaattttatttgttactaagatgaccaaattataaagcaaaactcaacaaatatttgaaactacaagggtggtgcttctttgctcttgccactgatccatctctttattagcattaaccccatagtataaatactacatctcagatattcttcaaactagtaaatagtaatgcaggttgttgtttatattatatgacaagaaagaaagtccaagattttttcggggtcctcatactttttcagttcatatatcgaagagaaaaaaacgagaggattagaacatctccatcaaacctcaaacttttaaattttgaagttttttaactccaacaaaccttaaaacctttatttttgagggtgcataacacccttaaaatctttcacatattttcattgagtccttatagcttgcatatatctcacaataattctattaaattcaattatttcaattatattcatataaatttaaatacattaacatcaaaattgaaattattaaaataaaaaaacattacatttaaaaacaattttatacagcaataatattatatttagaaatttaacacacataaaattaacattacaatagttaataaatacatgaacacacaagttttattttatgtttcttttctaatttatatatatttttgtatagcatgtaaaaaattttgtttttcctaacatatcttgtttgacataatgtttttgaaatgtatgttgtatagttattttatgattacatatttatttatttctaaatttttatcatgtaaattaaagttgtatcatatatttttattgagttaaataaaagaaatcaaattgacaggaaaaaggaaaaataaatgtaaagcaagaaattataaaatttgttaaaactattaaagttttttactaaaagctatttttattgtcctccatatatacttttttttttaaaaagaacatttatagggagggtttaataaaaatgaattttatgtgtaagtaaaattcatttttttttttttttttttttggtaagtgtaattcatatttttcaaacatttacttcaaataaaataaccctctccttcctcgcagcttccgtctcgtataacgaaagcctcttgactcttgaccactcctagtctgccatttttctttctcgtcctgtttccattctctctccgatcaaaaccagcccaattcgatcggagacatcacagaatg

SEQ ID NO: 14542 - DNA, 3000 bp, Unknown
  misc_feature (1)..( 3000): cDNA_ID_3017946_gDNA_ID_2684130_Annot_ID_191204 3000 nt of promoter + ATG
tccatattggaaggatctgaatctccgacattgtatcgatgtgatgcatacagagaagaattttttggataacataatgaatactcttatgagcgtgaagggtaaatcaaaggacaacataatggcaagaatggatatagaacgattttgttctcggcctgacttacatattgatagtaagagaaaagctccatttccagcttatacattgacaaatgaagccaaaatgagtttattgcaatgtgttaaacatgcaatcaaattccctgatggttattcgtctgatttgagtagttgtgttgatatggagaatgggaagttatcaggtatgaagagtcatgattgccatgtttttatggagcgattacttccatttatctttgcagaactcctcgaccggaacgttcaccttgcattatcaggtaaaataagaatataatttactctttatatcatatatgcacttgagatgatgattttttttttccaggggttggcgcattttttagggacttatgttcgagaactttgcagaaaagtcacgttcaaattcttaagcagaacattgttttgatcatatgcaacttagagaagatcttcccaccatcattttttgatgttatggagcacctgcctatacatctcccctacgaagcagaattgggcggtcctgtccaatataggtggatgtatccttttgagaggtttttcaaaaagttgaaaggaaaagcaaaaaataaaagatatgcagccggatcaattgttgagtcatatatcaatgacgagatttcttatttctcagagcactactttgccgatgatatacaaacaaaatcaaggtaaccatgaattatcgatgtgatgcaagttttcaatgcgcaaaaataaccatgaattacctcttttggatcaggttaacaagattcaatgagggtgaagttcctgtatatcatgttcctggagtacctactatatttagttctgttggtcgtccaagtggagaaatacgtgaagtatggctatcagaggaagactatcaatgcgcacatggatatgttatacggaattgtgattattttcaagtaattgagaggtatataacaaagtcatactcccattttaagttaattatataaatgtttgtttactaacccttatatgttgtttttgtctttatatagtatgttcgaagattttctttctattaaatatccaggattgaacgaaaaagaactcttcgtgaaaagaaacgaggaatatcatgtgtgggtgaaagattatatatgtctaaatagtttataatatatatgatttgcatttatttattgttattcttatctctataatgatgtttatttctaaatttgcatacaggttacatattggaactctagtaatccttttccaacttgggttcaagagatagtcaatggacctttgcacaaagtcaaaacatggccaatgtattttacaagaggctattttttttcatacgcagagtcatggagcaggacgtaagacttgtaactatggtgtatgtgtgaaaggtgaaaattatacggatgcatctgacgcagcagatttttacggcaacttaactgatatcatagaacttgagtatgagggggtggtcagtttgaaaatcacactttttaaatgttcgtggtatgaccctaagctcggaagaggtactcggaggagcaatagtggtgttgtcgacgttctttcatcgaggaaatataacaaatacgaaccctttattttaggtacgtatggtatatatatatggtcatttagtttttctagttcatatacaaatatctaattctctaaatatggtgcatttacaaacagcatctcaagcggaacaagtgtgctttattcctatccatacacgaaaaaaccaaagcgggagtggctcaatgttttaaaagtaaatctaaggggaaacatattagaagaatatgaaaataaagacccgagtttattgcaaacagaaaatgatgatgctgttttaataacaacaatagaagatcttatactcgacaatttgacaatcaatcgcaaccccataaacctcgatttagatgctggagatgctgatccagaagatgaatttcgatgtaatttatcgtcttctgatgatgaagaacaacaagacgaagaacaatattagttttgtgtttatgatatgtacttaagttatttctagtaattatgatatgtacttaagttattttgaaatactatgcaaacatttttaaattattttgaaaaactatatttgattaagtatgttatgtttatttatatttttattatagataattactatttttgaatatctatggcccaaaaaaacacaaggcccaaacccaattattaaaaattaaataaagcgactaatttgtgacaatttagcgactaaccattgtattgggccaaaataactcgaggcccaaatagggtgactaatttgtgacaatttagcgactataaccattctattgggccaaaataactcgaggcccaaatatggcgactaatttgtgacaatttagcgactacataaaaattattgggccaaaaatttcgaggcccaaaattggtgactaatatgtgacaatatagcgactaatgtttaaatttcgagaactttttaggcccaaacccattaggcccaatccctttcaatgtcaaaaccctaagttccatctctttctcttcgaaacatccgcagccttcttcttcgatttctctcttcctcttcgatttcctctgcgaaaccctagcaaatttctctcttcctcttcgattttcctcttaatctctctaccaaacatctgcagtcttcttcttcttcaatctctctcttcgatttcctctttgaaaccctaccaaatcaatctttcctcttcgtttttctcttaaatctcttcttcttcttcgatttcatcgatttgaacctctgtctcatctagatctctccttaatatcatg

SEQ ID NO: 14543 - DNA, 3000 bp, Unknown
  misc_feature (1)..( 3000): cDNA_ID_3017899_gDNA_ID_2684130_Annot_ID_191219 3000 nt of promoter + ATG
caagcctcctcataagatctcctctatcccacggcctgcaaagaccagaaggcgatgttccagcaggaaccttcaaagctgaagacctatcaatggtagctaatacaatctttggctcaaccaatgctaacgcagatgaaggattttgacgcttcttgcctcttgattgttgctctacagaagaactacacaaaccaaaggatatatacataagctgacgcagaatcataacatgaacacaagctctgatgcaaatatcacaaaatcaactaacatctgaaatcaatccaaagagcaatgtatatgaacacaaatacaaaatcatctctgagattaagcaatttatccacacttcaatcagcgaaacaatggaactcagataatggagatgaatcgatgcacagtgtaaaacagtaaccagcaagaagagactgacctggtggaggaagaaggaagctgagatttcgatggggtaaagagtttatccatgatttggtggaatctcttctctgaatcttgtgccattgtttatcttccagaaaaatcgcagcttcctctagctcgtctttctgatttcgtcctcctataatcgtataaaccctaatctaatagattcgcttccaccttcttcgccgcggctcaggtgaaggagtggtgtttagatggcggtgacggaacaacacgaaaacgacgggatctgctgtcgtttagtcctcttcatatttattccgcaaatcggaagtctcgaatattttatctattttacgaatagatccctttattctcacttcatcccatgtatcacccaaacatttcaaatatgtaaaaagaatccaaaaacacaaaaaaaaatcatcaaattatttaacgctttatgatattagtcaaaattaatacgaaaaatactcacaaaaacagattttcctcaactagtcgtatttctttgaaaacaaaaattcaaatttcaaagtagcaaataataagtcaaaacaatatctattagatatccctcaagttgtggacaagcaaagccaaactagtaacaaacctagctgcactctcacactacttaaattcaaaccttaagcaccacaaagcagaaaaactaaacattttcttcgagaacaatccctcgatatcagaaattaaacaaaagaggattcaaatgggtggacaaaagattgttctgctttcgatcttcgtatgtttttacgtgttttcacttgtgtcatgtactgaatttgaagctggaggagaaaatggttggatcattccacaatctagtaaccaaagtgacatctttaaccaatgggcttccaagaaccggtttaaagttggcgacactatccgtaagtttttcttttgcttctattatgaatttatgatcatcgtaatgcatatattgagttttgttttgatttggtggaaaggtttcaagtacaagaaagactctgttttggtggtaacagaagacgaatacaagaaatgtcagacgaccaaaccggaactttactccaaccacgatgatacggttttcaaattggaccgtcccggtttgttttatttcattagtggtgtctcaggccactgtgaacaaggtcagaaaatgattattaaagtcatggaggtggaatctacgccgcaatctcctccaccttcctcgtctctacccgcttcagctcacaagaaaaaccacgccgtgaggaaaacgagtcggttcttaggtgccggtttagttacaatttcgattctggttattacggtttttagtcttgtgtagtatggaaaacaataccactcggttatggcggttcagccgtcgagttttattccggtttaggttttgttgcttagtttatttaaggtttttttattcatttgataggttgatttgattttggtttttggtcacttcagagctttaaaataattgaactcatgtcttattttataagtttagtatccattttaattctattaaattctaggtttattgaaatacaatgttttttacctttatctaattataaacaaacaactttcaattttctataacaaaacaaaatcaaatattttgacaaattttctaaatatacactttttagaaacatctaatattttttttagaaattcaataaccctactcaaagaatcaaatccaataatggaacacgaaattattttgttatataaatttttataacaaattatgaaatttataactcattcaaccgagattgggtcaaccctataaccttataaaatttccaattagcattttgctctagctataaaaacattgtcaaaacatgatcaagtgatgcatcaaaatacatagtttgtagtccggtctaatcgcccgaacctagtttacctatacatggactttctgttaaaataaaccgacaaaagaaaactataagttatggtcttatggacatatcagaacacaaatcaatcgagcgacaaatgaattttttttgcaagaagtggataccacgaatggattacttgtccgttcacaccttatcaaaaatcaaccaaatattattctttgtaccatttttaaaattttaaaacaagatacattcatctgtttctatcaaatgcattagtcaataacgcttccatccaacggcgaataagaggtatacacgtggtgaggcatagttgattcagcttttatacacaaaagtctcgaggaacaacgtgagaagctctaacaaaacgtgaaggccacaactattatcaaaggcacataaaacacacgaacacaaaaaaagacaaagacaatgattattcagacaagtttcgtacctatttgattctctacattcctctctctcacacaccaaactcacatacacaatctctctctctttctcaacatgtctatataaatacacccacgtctatactaactcacatcatagattcacaattttgaacaaagaaaatttctttggagagaaaacttagaacttagattgacatagagaa

SEQ ID NO: 14544 - DNA, 3000 bp, Unknown
  misc_feature (1)..( 3000): cDNA_ID_3017905_gDNA_ID_2684130_Annot_ID_191217 3000 nt of promoter + ATG
atctttgtactgatgacaagtgacaacaataccttgtagatttaaggttttaaaaaaatattgtatgccagtaagtgttattttttccaaacaacaagttttctgtttgaacctatagatggtgatacaagaacagaaccaatacaaaccacactagccaacatgttctagttgaagaagtggtaattttggtactagttttgcaattcatacgatggtatttatcaggaagtatcaattttggaatgtattaagagatccattgtattaaccaactatactgcaagcattgtgtgtatatggacttactccttgagcaagaccatccttgagaccagaagggccacgccatttgacacgttgagcagctggcaacttccctgatcgttgagcctcaaagaacaagaaggtcttatcaagagcacttccgtagttatagtactccgctgccgcggttgctgccgctagaagaacggacagcaataggcttacgccgaacaatgatccaccaaacttcctcatttctctatgtcaatctaagttctaagttttctctccaaagaaattttctttgttcaaaattgtgaatctatgatgtgagttagtatagacgtgggtgtatttatatagacatgttgagaaagagagagagattgtgtatgtgagtttggtgtgtgagagagaggaatgtagagaatcaaataggtacgaaacttgtctgaataatcattgtctttgtctttttttgtgttcgtgtgttttatgtgcctttgataatagttgtggccttcacgttttgttagagcttctcacgttgttcctcgagacttttgtgtataaaagctgaatcaactatgcctcaccacgtgtatacctcttattcgccgttggatggaagcgttattgactaatgcatttgatagaaacagatgaatgtatcttgttttaaaattttaaaaatggtacaaagaataatatttggttgatttttgataaggtgtgaacggacaagtaatccattcgtggtatccacttcttgcaaaaaaaattcatttgtcgctcgattgatttgtgttctgatatgtccataagaccataacttatagttttcttttgtcggtttattttaacagaaagtccatgtataggtaaactaggttcgggcgattagaccggactacaaactatgtattttgatgcatcacttgatcatgttttgacaatgtttttatagctagagcaaaatgctaattggaaattttataaggttatagggttgacccaatctcggttgaatgagttataaatttcataatttgttataaaaatttatataacaaaataatttcgtgttccattattggatttgattctttgagtagggttattgaatttctaaaaaaaatattagatgtttctaaaaagtgtatatttagaaaatttgtcaaaatatttgattttgttttgttatagaaaattgaaagttgtttgtttataattagataaaggtaaaaaacattgtatttcaataaacctagaatttaatagaattaaaatggatactaaacttataaaataagacatgagttcaattattttaaagctctgaagtgaccaaaaaccaaaatcaaatcaacctatcaaatgaataaaaaaaccttaaataaactaagcaacaaaacctaaaccggaataaaactcgacggctgaaccgccataaccgagtggtattgttttccatactacacaagactaaaaaccgtaataaccagaatcgaaattgtaactaaaccggcacctaagaaccgactcgttttcctcacggcgtggtttttcttgtgagctgaagcgggtagagacgaggaaggtggaggagattgcggcgtagattccacctccatgactttaataatcattttctgaccttgttcacagtggcctgagacaccactaatgaaataaaacaaaccgggacggtccaatttgaaaaccgtatcatcgtggttggagtaaagttccggtttggtcgtctgacatttcttgtattcgtcttctgttaccaccaaaacagagtctttcttgtacttgaaacctttccaccaaatcaaaacaaaactcaatatatgcattacgatgatcataaattcataatagaagcaaaagaaaaacttacggatagtgtcgccaactttaaaccggttcttggaagcccattggttaaagatgtcactttggttactagattgtggaatgatccaaccattttctcctccagcttcaaattcagtacatgacacaagtgaaaacacgtaaaaacatacgaagatcgaaagcagaacaatcttttgtccacccatttgaatcctcttttgtttaatttctgatatcgagggattgttctcgaagaaaatgtttagtttttctgctttgtggtgcttaaggtttgaatttaagtagtgtgagagtgcagctaggtttgttactagtttggctttgcttgtccacaacttgagggatatctaatagatattgttttgacttattatttgctactttgaaatttgaatttttgttttcaaagaaatacgactagttgaggaaaatctgtttttgtgagtatttttcgtattaattttgactaatatcataaagcgttaaataatttgatgatttttttttgtgtttttggattctttttacatatttgaaatgtttgggtgatacatgggatgaagtgagaataaagggatctattcgtaaaatagataaaatattcgagacttccgatttgcggaataaatatgaagaggactaaacgacagcagatcccgtcgttttcgtgttgttccgtcaccgccatctaaacaccactccttcacctgagccgcggcgaagaaggtggaagcgaatctattagattagggtttatacgattataggaggacgaaatcagaaagacgagctagaggaagctgcgatttttctggaagataaacaatg

SEQ ID NO: 14545 - DNA, 3000 bp, Unknown
  misc_feature (1)..( 3000): cDNA_ID_1021383_gDNA_ID_2684130_Annot_ID_191210 3000 nt of promoter + ATG
ttcctttctttttgttagttaatgactttgatattcggtttatattatttaagatttcatttcatcaaatattaattgaatgatgtttaagaaattagagagttaaatatctattgcatatatgtcagtagaatactacttgttttattttctttgtccttttttggttgttggcaaaaatggtttttctttgttcgtttgtaataatctcaatagtaacaatatatatactagtaattatcaaatccatatagtgatatacgcgaagcaaatgaatcagcggtagatgaaatctctcgtttgaatatttgatatttgactaagattgcggggatacatatagtacgcatgcatggatgtgaaaaacacgcaaatgtcgcgttgcaccggacattttcttaaattgcactctaacattctcatatcctaaactttaggccttattttcttattagagtatgtatttacaatatttacttgattattctcataattgacatattgaaatttgaagcccacaaaaaacaaagcttctatagttcttcttccgtacattacgttaatttgattcattcccagctgtaacacaatgatatatattcggaactatatagtataatcatccgtacaatattggattataatttaacacatactgtctatgggcctataaaggcggataggcctggacacgaagcaaatatccggaaaaattgtgatatttgttatttgattcgttttaatcgaatacttgattttatgatttgctttgattcgaaactttccggatatccggaattttgaatatccgaatttttttgtgatatttgcggatatctactttgatacgtataaatattaaaaaaatatgtaaactatataagcatatcagatattcaaaatttttatttaacatactttcaaaataagttataaataccaaatataacctttgttgttattaccggtcaacaaaaatgttatcaaactaattccaaaaactaaaatccgatagtttaattttgatgtcattgatcaaaacacaacataaaaaaaatgataaaacaaacatcttaacataaaaacataaggtagcaacaatacacaaactatttatgatatctacatatagatataactatatattctaatatatatcaaaagatacggatcaaagcggatattcgattttaaaaaagacaatatttgctatttgattcggtttttacgaatactacattttcatatttgctttggtccaaaatcttacggatattcggattttttgaatcaaatcaaatcgaataccgaatcgaagcggatcgaacgaatattttacccagccccaataaaggctataacacaccttgagaaagttcaaattcctcaagacatagaaagtagctaaaatattcaagaaacgtctccaacaaaagcccaaatattaacaactggaaatataaaaggttgtctacaaaaagctagccagcaatttttcaatgaattaagtacccgttaagttgattttttcacatattttgattcatttacacttttttgttgttgtcttatagaaagtaaagtatccgattcatttagacttttaagtgtccatatatatatggtgtgagatctcacaattcaaaaaaaacttattattgaagtgaaagatggtaagaactttaacaaaaaaaaaaagaaaaaaaaaaaaagatcgtaccttagtgacttgggtggggtgacatacgcagggaagcctaacagtcaagctccttatcgcgaaaggcccattaccttccaaagacaaattctggatcagatgaccattatatatacgagcttatttggaagaaaatcttcattcaacaacccatctattaatttccacctattatttaaaagagagatgagaaatgacgtaaaaaaaaaaaaaaaaacgtttttctagctctagaaatttatagatgggttgttgaatgaagatttatcattttatgtattcgatactatgttaaataaatttctttaatcgagtttgttttcatgcatgttctattaacaagtatgtagatcttggaaaaagaaaatattttgatcttgataaaattctttttcaaatctcgattagtttattgtttttccgaattttgcatttatactatttatgtgatgttcgtttgttagtcgttggcgaccgcgaccaaatgttgttcgtatggaagtcgctggatatagcgacctgcgattataatttttggtcgctatttatctttacgactgattataaaacgcgatgtctgaattcagtaaactcggcgacggtattgttttacattcttttacattttaaaactctattatttacattctctattaattataatgatgctcactaatataaagttttaaaatgtgatcaattgtttcaaactgcatttgtcttaacaaaattcaaaaaaaaaatataaattttttgaaataaatgttttataaatatcaaaaggtaaagctacactaatcttttgcattgtattcgagtaatataaatcgaaatgaccaaagtctctaaagaatgaataaggatcaaatttcaaagaaaagtgaagagtaatcgtcaactacaagaatcttatcctatgcgtactctttccttatgagtgacacaatagaaaacaaacccaactgattgatccttgtgaataagataaagtcccaatcaacctcttacttatcctgcgcatatgcactgtcctctatactatcatgcgcatatacaaatgtccattcttatcatgcgcatatacaaatgtccattcttatcatgcgcacctcaacttaataccaaacaaaaaaaaaagtttcacaaaactccaaaaggtaaagaatctgacccattcacatatgcgtttcaaaaacactatcatgtccaccacacgattaaaccaaagagaagagagagagagagagaaacagagaagaaaagattgaagcaatcgaatg

SEQ ID NO: 14546 - DNA, 3000 bp, Unknown
  misc_feature (1)..( 3000): cDNA_ID_3017938_gDNA_ID_2684130_Annot_ID_191207 3000 nt of promoter + ATG
agatattccgtaacagaatcacaaattgttaacggagaatgatatttacccgaaaactatatctgactcggctagtgatccgttatggagtttgagatgaaacttatctttggtgagaactcccatggagtagctatgatcagcatattcaatctcgtagtcacattgatgacaattttcacaatgttctgtcagttgattcctttggacttctacacaaaaggcctctgaagatctcactaagttatcttttctaggcttatatagttgatttgctccctaaaaccaaaatccagaaagttcatcactaaattcacagagagattctcctaaaatctaaaaaaacttgatctttattctttaccttagcacaactagtacaaggagcatcacattggatccaagtcaattcacttcccgtatcaatatcaagatgatagtattgtccatcttcaggctttccaacaagaatgcgtgtataatacagcctgcaacaaaagcaaaaaaagacaatctttgtttacttgtgctttaagaaacaaaccacacattcagattacagagtattagatacaatgcatacatacccatctggatacacattaccaccgacgggaaaaatcgtagtggaggagtcaatagaaccggcacttgtagataaaacatcgttgacttttacagggttgaccagctctaaatccattgattccacaaagttttcattctctaaacctaaatcttcctctaagatccgctcgtggaactctcgagctctcaatttgtgatatacagggaaaacaaacgacgccgtttcacggagattatcgtcgtcgtcacggttcctctcatcaggagaaaccctaaacatttgaacagagttgggaaaaacagaggcgtagaaagcaaccgcgagaagcgagattccgagaagacccagaactaatctcggcgaattcattgagagatccgagaacaagaggcgagattgttggtttcggtgaagtgggtcgggttgaaaactcgggtttgggttatcctcgggtgggatttcgagtgggtaatcgtggtcagtgagagtgaaagcagagattgttttgccttgtgaaggatcatcagatggtgggagagtgattatgactacgctgtggactcgttgttgttgttgctggtcatgaagatctggttccattctgtgatgtctccgatcgaattgggctggttttgatcggagagagaatggaaacaggacgagaaagaaaaatggcagactaggagtggtcaagagtcaagaggctttcgttatacgagacggaagctgcgaggaaggagagggttattttatttgaagtaaatgtttgaaaaatatgaattacacttaccaaaaaaaaaaaaaaaaaaaaatgaattttacttacacataaaattcatttttattaaaccctccctataaatgttctttttaaaaaaaaaagtatatatggaggacaataaaaatagcttttagtaaaaaactttaatagttttaacaaattttataatttcttgctttacatttatttttcctttttcctgtcaatttgatttcttttatttaactcaataaaaatatatgatacaactttaatttacatgataaaaatttagaaataaataaatatgtaatcataaaataactatacaacatacatttcaaaaacattatgtcaaacaagatatgttaggaaaaacaaaattttttacatgctatacaaaaatatatataaattagaaaagaaacataaaataaaacttgtgtgttcatgtatttattaactattgtaatgttaattttatgtgtgttaaatttctaaatataatattattgctgtataaaattgtttttaaatgtaatgtttttttattttaataatttcaattttgatgttaatgtatttaaatttatatgaatataattgaaataattgaatttaatagaattattgtgagatatatgcaagctataaggactcaatgaaaatatgtgaaagattttaagggtgttatgcaccctcaaaaataaaggttttaaggtttgttggagttaaaaaacttcaaaatttaaaagtttgaggtttgatggagatgttctaatcctctcgtttttttctcttcgatatatgaactgaaaaagtatgaggaccccgaaaaaatcttggactttctttcttgtcatataatataaacaacaacctgcattactatttactagtttgaagaatatctgagatgtagtatttatactatggggttaatgctaataaagagatggatcagtggcaagagcaaagaagcaccacccttgtagtttcaaatatttgttgagttttgctttataatttggtcatcttagtaacaaataaaattgaatatcagaattcaaaagttaagaaaaacatattaattgacgaaaataatatatatatatatatatatatatatattaattagttcgtaaagttccaaaaaataactgtaaaaacaagaaattaagaagataaagtataaaagaccgaaatgggtgcaattttagttagttttagagtttggttattggttttactattttttcagttttaatttttgttatatattaaaagcttaaataaaattaaacatatgaacacatttaaaaaaatgtaacctaaaaaataaagttaatagtattattattttttaactctaaaattaatattattagtttgctactttgcaaactttaaaataaaataaaatctacaaaaatttgattgttgtaatttgtgtgaaatggaaaacaaattgcgttcgacccgtaggattattttcccacgaacgacttggccaaaaaaacaaaggaggccgaattgaagcaactacttttctccatcatcatcaccatcggcgaaatccgccaaaaattgatctccatttggaaatccagatcatgctctagagccctagtttagatctcgaaggaagaca

SEQ ID NO: 14547 - DNA, 3000 bp, Unknown
  misc_feature (1)..( 3000): cDNA_ID_3017954_gDNA_ID_2684130_Annot_ID_191202 3000 nt of promoter + ATG
ttcatcttggtttgtttctgattgaggaaactcaacaacagtaaaaagttcaatagcattgatgagaggaggaagagttgactttgttgtcttcactagctgcaagaggcaacttcctcctttacatgtcaatgtcgaatcgggttgggggctcatagtatctatacttaacattttaggactataaggtccataataaacttttccattcagcaaaacattgaattctctagtctcgttggctaacaaagtttgaagctctgcgaagtgaaggtaaatgtgaaaccgtgtggtagaatcctctaagctccatggaaattcccatgtcccattatcattaacacgggttgcagccgatgccattgcaccttgtggtagatcaaaaccatttgaagtgtttacattgagagttgtggttacaattttccactccttatatgagaatgggaaccatctacggtcgttgacatcatcggggtacctatacgtatcttgtattagacatagctagacaaaacctcaaagatgtttggcatcaaagaaagattaaaaatatttttatatttactcattatcttttataccaagatccaagaaaaagattcatttcacaaattaaagtttacgtaccgtaaaacgacacctgaatcattaagataacctctaaaatagaggagcaaggagctcccaatggcactaatgtaagtatcacttctcaaaggtcgtagctccaaggttgatatcatcggtgtagttgttcctgtcttaacaagacaaatatccaaaggggttgaccttgacatgtgaattatctccacgaacacaccacctccggttgcattaaaattcactgttgtcaccttattagggccaataaatagatcaaagtttgggacagtattaagaccatcgtaatttccatataagaaagctgctctaatcaagtaatttgttccttgtgtgacattcaggttataacagttccgctctccatctggaaagtatcttagagttacaaaagctttttcgaagtttcgctcagagtccttactgactcggccattctttccactctcgatgaaactagaatccgaagtgaatgttaatccagtagatggattggtatatggagatccatcaggtaacagaccacaatccaaagtgatgaatcctaataaaacattaaaccaaaacaaaaatcctaataaggggatcaatgtaaaggaattatcagaaaaggaaaaaacaaattaagaaaaagaacatgaagagtgtttcttaatttcaaaggtttaaagataataccgtttggatcttgagcctgaacaacatgtataaaagcaactgtgatgatgaacacacataaaactccatgaaaatacttctccatttttcctatttctggaggataacacgacccttgacatctttttaagttccaaaatattattttatatcacgttctgatcaagtggatactagttaaagaaacgaaacccatatattgtcaacggccaaaataaaatactaatatgtctagaaaaccctgaactttctaacatttgcaatttcacaacattaactcaaaacattaaggcgccgttttctaacatttcaatacaaaattatttttcctttagcctaattagggtttttccctatgggaaactttggctataagtaagcgtcatttcaaagttctgttatccgactggttttatttcaaagagcttaactctaaaaatcgtataaagtttgttgttctctgtgccaaaagcaaaaagaatagtactccctaatagatgcttctaacaagttggtatagaaaattattcatttgtgtttggggacattaagttaagtgatcaactccatctcttcatatatagctgacccttaccttcatagttttcattcgatgaacatatatatatgcggataaggtaagttaatactgcgagtgattataattagttttaaagcatatggagaacatgtcaacgagagatatagaatgttattttgagacgtgtatccaactctaatgattctgattttttttatgaaaaagaaggttgaaaaccacccaattttcaaaaaaaaattttaaaaaagagaagttagaaaaaagatgatgatagttcacttgttccaactagagaggcaatctcccaaatggagatcaagatctatggatgcggtgtttggttacacggcaagaatactccatttagactctaaccacactggtcagacgtattagaaaatatgcaatccttgaacaacgtttaaaaaaataattgaattaatgctaacatttgatttagttctataaaaacagaggaattttcacacatgcagtttaaaattcctatatgataacaattaaatgtatcttttacttgcaatatacaatattttatttcatgatttggttttcgtctaggaagttttaaaacaaaaacaacatactattaattaatctctaatatattatgtaacatattaacgacactatgacaaagccctacaagccaggtttgcatcgtgtggctaatgaatctctttcagaagtcagctacactcaaaaatctgtttttatttcaaatgctatgctaaattataaaaacagcttatatatatacaaaaagctatattttttttaatacaatttagtaacattttatttttaaaatatactacagaattatatttaatccataaataacttaagtctaaactactcggttctttcgttttctttatgggaaaatgaaacagcgtgcttcttatccctcttgggaaaatgaagcagcgtacttattaaggcagcaactgaatagtctacttttttcacacactcgcctcaattcagtgtcattatataatttagtatcttcccatatacgcgatagcgtgttagccaaggcaaactcactagggatttgtcctctaagccacgagatgaatctccgtcaaatctacgaagtttaatggatg

SEQ ID NO: 14548 - DNA, 3000 bp, Unknown
  misc_feature (1)..( 3000): cDNA_ID_3434291_gDNA_ID_2684130_Annot_ID_191200 3000 nt of promoter + ATG
ttgttcacttcaggaagtctccggcagtatgtattttgctcatttttatactatcttgttatgtcgccgcgaaaatagcggttttggagttgtgtttaaagcagcgaaatcttggttttcttgaaggtaccgtaagaaacatagaaaggtgaatatgaaggctgtcaagtgttgggcgagacagattttaacgggattgaaatatctacatagtcaagatccgccgataatacaccgagatatcaaatgtgacaacatttttatcaacggtaatcatggagaagtgaaaataggagatcttggtttagctactgtcatggaacaagctaatgccaaaagtgtgattggtatgagcaatgctttttcttttatatagtttacaaattcgtttttctttgttttttttaggatctaaattgatagtgttatgttataaccaacaggaacaccggagtttatggcgcctgagctttacgatgagaactacaacgagctcgctgatatatattcgttcgggatgtgtatgttggaaatggtgacttttgaatatccttattgtgagtgtagaaactctgctcaaatctacaagaaagtttcatcggtaagttcgatattttcaaattgtttctaccattggttttatgatatcgaacaatatatgataatatgaatggataacttacttggtgagtcttttttttgtattctttacttaggggatcaaaccagcttcactatcaaaggttaaagatccagaggtaatgaaatttatcgagaaatgtttattgccagcttccgaaaggttatcggcagaggagcttttattggattcttttctcaatgtgaacggtttagttatgaacaatccattaccgcttcccgacattgtaatgccgaaagaaggatcattcggtgaacgttgtcttatgtctgaaggaccacctaatgctcggaatagaacgatgtcaatgaatcttgacgaagacaataaccttcctattgttatttcaagcaacaattcaggaacaaactgtattgaggttagacgggcaaagcgaggaaacttttttgtccttaaaggtgaagagaatgatgagaactctgtctcattaattcttcgtatagtcgatgaaaatggtaagagtcttttgcgtttatattttacaaaacatttcaccgaaaatgttagatgcatatacaatcagccaaaaattgcgtttggaaaattgcatattataccaaacttgattagttttgtcttctttttggcgtgtagggcgtgtgaggaacattcattttctattctttcaagaaggtgacactgcttctaatgtatctagtgagatggttgaacagcttgaattgacggataaaaacgtaaagtttatagcggaattgattgacgtgttactcgtcaatttgataccgaattggaaaaccgatgtagctgtcgatcatctaattcatccgcaacagaaccagagctccaaggataatcatcaaaacggtgcaagttctcaagctggtgaatccattagccactctttgtcctctgattattgcccacgatccgatgatgaggcaaacccgaccgtagctgcaacaacagaagatcaagaagcagagaaaccaggaagcttggaggaagaagaagaagatgagaggttaaaagaggagttagaaaagatagaagaacggttcagagaagagatgaaagagataacgaggaaaagagaagaagcaacaatggagaccaaaaatagatttttcgagaagaagatgcaacaagttgagtaaagtaaacaacagagcaacactctggttttggattcctctgttttgcttttctgtttttccatgttttattattttagttttggtcaaagagaaaaaagcttttgttgtttacttgtttcattgcaagtgtagaaagtttcctccataaaaaaaatagaaagtattttctaatggtaattgggatttacattatataaagcactaattgctgagataaaaccattcatcaggtatatatgtaaaactattctcgagataaaacaagaaagtgaatacacaattttcttgcctctattcataagaaataaacctgttttcattgtgtttatttaacaccaaaagcactcaaaattgaggcttaacattcagacaaaccgtaactatagaacataagaaaaacctaactattgaagaggttgcattatatcacaagtttaaaacaccaaagctcaagctgagtagcaaaaataggtctcttcttccgccaccaaaacctcaacaggaacgtctacaaaagccttgaccgccacaacgaccaccggaaaaacgaccaccgacgaaaagaccacgaccaccaccaggaccaaagacaggagtaccaaaacggctataaggttcctcatcagaagatgatccatccacagacatgctctctgcctgggctttacagagccaattttaacttcattatttgacctaaacaatgagatcaacagatccatcttctcttccattttatgaagacgaataccaaatccttccaacatctccatcgcatcagatattttcatctcagtcgtcatgtctttcttatctttctccaaattgtctgtaggcgtcgtgtccttaatcacagaaggagatgcttcagctttggttgcggatttattgtccatggagaagatgattagtagaacaacgcactagagctaggttaaaagagagaaattggagatcggcaaaaacccctaatcagctgcttaggaagaaaggtatttataagagtcttttatattctggcttggggcacaagagtcctttccttttattttatttacttttcccgttgttcattttttcaactaagcaagctttatctgggccgaggtgaggcccattaattgaattaaaagcccaaaataacaacaaaacattacctgattgtcggaaaatcagacggaaacaaaagaaatcaaaaatccg

SEQ ID NO: 14549 - DNA, 3000 bp, Unknown
  misc_feature (1)..( 3000): cDNA_ID_3017970_gDNA_ID_2684130_Annot_ID_191197 3000 nt of promoter + ATG
ttgatgattacatagcgaaatcgaagctcagtgagagtttaacctctacggtttggttagcgaagcacaagttaaccggcgaagaagcagtgatgaagtgtttcgacctctcgaagctcaatcgcaatctccgagactgtttaaacaacgaactggagtttctatcttctgttgatcatcccaatatcattcgtctcctccatgtttctcaagtactaacccaaaactgagtttttcaatatttcttgagtctatgaagaatatgattgatttgttttcttcaattttgcaggatgatgattttctcgttatggttttggaatattgtgatggaggaactttatcatcgtatattcaacgttatggtagagttgaagaagatatcgccaagagatttatgaagcaaattggtatctattgttatataggagaatgatttcactgcatttgcttcttcttgacttaatagtgtcatcaatgttttgatgaaggagctggtttggaaattattcatgataatcacattatccatagagacttgaaacctgaggtacttctagaattatagatactctggattcaagtttggttgtgaattgtgacaatagtatttgattggaacagaatattttaattgacggatctggtgatgatttggtgttgaagattgccgattttagtcttgcaaggtaaagttttttgaggaggaaagacatgcttatagtataaagatctttatatgtttcatgttcgtaagcagaaaactacatccgggcaagtatcttgaaacagtgtgtggttctccgttttacatggctcctgaagttcttcagtttcagagatacaatgaaaaggtgtgatattgtttttatgcagctccattgaatgataaggttttccagttttaaattcactgagaaacattgcaggctgatatgtggagtgtaggagcaatccttttcgagctacttcacgggtatccaccattccgtggtaataacaatgttcaggtgagatcttgaattagttagtagtattcttttatcaaaaagctccaatgcctttaacttaaaaaccttttaccactaaccataggttctaaggaacatcaaatctagtacagctcttccattctctcggcttattcttcaacagatgcatcctgattgcatcgacgtctgctcaagattgctttctattaacccaggtacagaaaaatctcatctgtttgcggctacactatgtacacatatcgctatatatattcagttcttggttaccattttctgcagttactcgtctctctttcgatgaattctacaaacacaagttcttgaggctatgattgatttgtccttgaggtaaaaagatgaagtcgtcttaaaacttctgttgaatccttgtatagattctcgtgcctgtatccatgtatataatttagttgaagcatgcattatatttgtatttcagctgagctagactgacatttaacctagcaaatatgtttttgattctcagagagctgccacactgggcatagaagattttccttttcttggccgtataaagaacagtagggtttgggtcaaggacacaacattttcttcaaggtatcttgaaatttatgtttccattatatccatagaagtggtggctcatatctaaattatactgcctttttttttttttttttctttcagatttgcggatctagttaattgattgtattattcatcagtattgggatacatccaataatattgagtcgtcttgtttcagacaacatggaacaagggaaagaaaagtggctacaattaacggaagacttcaatttgacctttcacaggttttttttgtccctaaccagtttaaatattgttggagtcatcattatattagatgctttattttcaaattaattgcaaaaccatcagccttcttcttcttttatatttttaggcaatgctaagagatcaatagttaagttcatactattgagtgtagaagattatagtttacaccattatgtttccatggtttctcagaattttgattttgttctattggtcacttctttcttgcagtaattgttctgtttctatttggtttcaactgttctttttctctgtttctagtccagtattagaatcttataaaaagataaaaacttaaattgcattcgtatttgctgttacaggatgcatacctcccacagaggcttcttgaaaacctgatgtatatttacaatactattgaaatggctcgtgtaactggagtccctacctcctaccttatttcaagaggagagagcatcaaggtaggtttcactaaattctgtcgcagcacactttctttgactaaggctgtctgagaagttatatatcttgggtctaggttctatctcaactacttaggaaagctaaacagaaaacctggttcttccaaatgctgagaagttggaacctgaacaaggaacttatgaaggtgcaactgtacgttggtggttttatatcccctacttacagttttacttattcttcgatcacttctaatattttgataaacatctccaatgatatatattcacactgttaacttcaaaatggtaaatcaggttttagaagcaagaactggtttctacgagccaattgctactctggattttgcttcgttgtactcgtaaatcatgatagcatataatctatggtactgcagcttagtattccatcaaacgcttttttttcttcttatatttattttccaacgtttgttgatgttatccatctattgttcaaagagcttattactgccatcttctcgtctttgaaggtgaaacctgaggatgcaaaaaaataaattcgacttacaccaaaattatgctaatcttaagaattattcactttttcattccaaagcccaaaccaaacccaaaagggccttttatcaaaagcctatttacaacatataaacccaaaaaggcctttcgtcgagaaaactaaa

SEQ ID NO: 14550 - DNA, 3000 bp, Unknown
  misc_feature (1)..( 3000): cDNA_ID_3017966_gDNA_ID_2684130_Annot_ID_191198 3000 nt of promoter + ATG
ctccaatgatatatattcacactgttaacttcaaaatggtaaatcaggttttagaagcaagaactggtttctacgagccaattgctactctggattttgcttcgttgtactcgtaaatcatgatagcatataatctatggtactgcagcttagtattccatcaaacgcttttttttcttcttatatttattttccaacgtttgttgatgttatccatctattgttcaaagagcttattactgccatcttctcgtctttgaaggtgaaacctgaggatgcaaaaaaataaattcgacttacaccaaaattatgctaatcttaagaattattcactttttcattccaaagcccaaaccaaacccaaaagggccttttatcaaaagcctatttacaacatataaacccaaaaaggcctttcgtcgagaaaactaaaatggctccgacgaagaaaggaaagaagaccaaatcggcggcggaatcaacgacggtcacagaatcttcaagctttccgacgtgtttgcgtctccttacaccttcctccgtcgctatcaccatccatgcgaagccaggttccaaagccgcctccatcaccggtatatctcctcttccattcatcggttttgattttgtgtaaagtctcggattttattgattttggtttcctctctatgatctggagatgtgagcgacgaagcggtaggcgttcaaatcgacgcgccggctagagatggtgaagctaacgcagctcttctcgagtacatgagctctgtaaagtttctctttcttcgcagataaattttcacttttcaagttctttgaaattgtttatactctgttttgctctcatatctggatttggttctcagatagtttgataatgtcatgtagaattgtgtctctgtaatctttgatgaatttgattagctcttgttgagccactagtcataaaaaatatgcacttgtgagcttccgtggactaaaggaatcaaaccttaacttggaggatctttgttaagatatatgtaacatagttgttgctctgatttggattgctatggtttatatgctgctttaagtagtgagaattgtttgctgctgattttgagagataagattaagagatgaattctatcatcatattcatatcctgacttctaaaatgttatctttgataggtattgggggtgaaaagaagacaagtctctctcggttcgggatcgaagtctcgagataaagttgtgattgttgaggatatgacccaacagagtgtttttcaagctttgtcccaagcatcaaaacctacctaaagatctccaagcctgtaactaactatatggagaaactaaatcatcaaaagctaaatggttcatgttcacttaaggtacgaatggtttgaagagtttcaggatttgtgatagagatcattggtctgatattactatgagtccatgattaatgtcatgtaaatctatagactattgcttattatataacaaagctgtgtttagtctagtccccaattgatctgaagtcatggatggttttttgatgtgtttgttaatccttattttcatgtaaagtatttaggatggttttcttttctctcttgatccttatttgtctttgtatatttcaaccgtttttgacttttgaaccaatcaaaagagaagaaacaataatgggccaaaagaagataaaaatgggctatggagaatcacaagtccaatttctctgctcacaacttgaacaacaatattttttttttcctaaaaaacttgtacaacaaacttaaaaaacaataatatgagaattggaacaaaatccttttaagtttgtaagtctaatttcaagaaccaaaatacaaaagtaatatcaatttctcaatacagttataaaactacttgatttgtggattttatacgttttaaataataatggttggatattccttacgatttttttaattgattagttatgcgacgacccgtgccatgcaggttgaagtcactttcaatgatcgttgtctcataaattacaaagaacacagctattttgtttctatttcataatgaaaagcgaatatttgtctgttcagataccgatcaggtaagcgatgcttaaagccaccaaaagggattctaaagtaatcaatgatttgattaagaaaaaagtcagaaaacaatatccatttgagtatttccatgtcaccaattggtttataacttccaatgatcacatgccgcttgtaatatacatcacctaaccaagcgatcgactccaaaaacgaaaccgtatttattattatcttaagactatagtctatacaatatacattacataatcaagatgcccaattagatgttttaaaacaacaaaaagatcaataggcccaattatatcttatcttaataaaatgaaaaagcaattgcatgaggaattatggatatatataaattacatgggctaggttttttttatatacatataaatagtttggagagataaatcaggtggaaccaagtttgttgtttgtgtttcgattgaacaacactttaattatttaatctttccattgtctttgcgtcttcttcgatcaatttatcaaattagggttccaaccttttttcttttttttccccgttgtgtgttaagtcggcggaaaaacttagaacagaacaaaccatcatttttccaggtaaattatattctaatctcatgttcttgttaatatctgatttttgatgatcttcctatgcatgtttgtcattgcgtctttctcttacgtgatagatgttcgttgacgcgatttgaggtttatttaggttccttaatagatttaacaaaaagaaattctcggtcaataatatttatttgagctgatcaatcatttgctggagttagtttgtgttgtcgtcttcatatgaatctaaagggtatatatatgttttgcattctttgttatagaaatttgaagaatagataaaaaaagattaataagat

SEQ ID NO: 14551 - DNA, 1458 bp, Unknown
  misc_feature (1)..( 1458): cDNA_ID_2730213_gDNA_ID_2684202_Annot_ID_137207 3000 nt of promoter + ATG
gaattccgctgtgatggaaaatgttggcaagtttgatggcacggaggatggtttgcaagtgactctattggaagtgcatcatgtgggtcgggttaggtatatattggcgacagatcttagcggaaagcttacggttttcactgagaacagaacggtttatggctctgttagcccaacgagtagaccgcttgtgttcttgaagcagaggcttttgtttctcactgagactggtgctggttcattggacttaagaagcatgaagatcagggaatctgagtgtgaaggtcttaaccattctctagcaagaagttatgtttttgatgcgtccgaacgggctaaagcttatggattcacatccgaaggcgaaatcattcacgtgttgcttctcggagacattatgaacttcaaatgtagagtgagatcaaagaagaaggtacaaatggaggagcctgtagcgttacaagccatcaaaggctatctacttatagtcaaccaagagaaagtctttgtatacaatgtatcgactcaacactacgtccgaaccacgggtcctcggcttctttttccggctgcattagaagatatcaggtcaacgttcttgagccatcgagaatcaactaaaaccacagatcaccagaagctagaaaaggtaactcctttaatagcaagcgaccgcgaaaagctgcttgtgatgggtttaggagacggatacgtagctacatacaaatcaaagcttccaatctccaaagcagaattcaacacaatgctttggagcagtcctgtcttcttcttcatacttttcttattcggcgcttggcattttttctctaagaagaaagaatctctcacagcttggggacctgacgatcctttctcctccacgacaatgtcttcttcttctacaacaactgcacaaaatagttccgcattctctgaatcaactaggagaaacgacgaccacatggatcttcggagaagatacgtttcgccatctcggtatcctcctggagcagcaacaggtgcttaccgttcagtagggtctaacgacccgagctcaagagctccagtggaaactactaactacagaacaaccgcacaggagatgaagtatcgtggtgggtcaggtcttgattctggcggatttggtaaaagaagagagagtttgtttggtaataacaaagctttagacgacgaaagttagttcctttttttttcatagttcgttatgttctttttttaccggtcaacgcttgaaaattttctaatgtgtaaaactccggcgaagaaataaaatttttaccggttgctttgtttcttctccggtcacttattgttagtttaatgcttcttaactgtaattttcacaatctcaagattaagaacagattaaaaaaaattcaagatcaaataaatgaaactgaaccagagagagacttgaggttaacacgtcaagatatg

SEQ ID NO: 14552 - DNA, 3000 bp, Unknown
  misc_feature (1)..( 3000): cDNA_ID_1695701_gDNA_ID_2684202_Annot_ID_137208 3000 nt of promoter + ATG
tcacgtgtctacgggaagacgttcctctactggttcgggtcgaaacctgtggtggctacgtcggatccaagactaatccgggaagctttgacgacgggtgggtcgtttgaccgaattgggcataaccctttgtctaagctgctttatgctcaaggtcttcctggtcttagaggtgatcaatgggctttccatagaagaatcgccaaacaagcttttacaatggagaaactcaaggtaacactaacacacatcaatgtagaagctaagatctgtaattcagacaacattgtgctatttggaatctcagtctagtttagtttaaaaattaccaaatccggagtgctttataggattgtggctaaagctaagatctttttttcttttatagaggtgggtgccacaaatggtaacaagtactatgatgttgatggagaagtgggaagatatgagaaacggaggagaagagattgagttagaggtacacaaagagatgcacaatttgtctgcagaaatgttatcaagaacagcttttgggaacagcgtggaagaagggaaaggaatctttgaattgcaggagcgtatgatgcgtcttttttatctggttcgatggagcgtttatatcccaggattcaggtaagtcttatgggaaattttcctagttttgagaacaagtttggaactagaaccttattgctcactttttgagttttgaatggtggttttagattctttccttcgaagacgaatagagagatatggagaattgagaagcaaatccgtgtttctatcttgaaactgatcgaaaacaataaaacagctgttgagaaatcaggaactctgcttcaggcttttatgtctccttacacaaatcagaatggtcaagaagagaagcttgggatagaagaagttacagatgaatgcaaaacgttctactttgcagctaaggaaacaactgctaaccttatgacgtttgttttagtcctcttagctatgaaccaagaatggcaaaacattgctcgggaagaagtcatatgcgttctcggacaaaccgggcttcctactctagacatcttacaagacctcaagactgtaagtcctcaagccccactcaaaaatggtttcaggaaacactgtttcttagcaatttcttgtttttgttaacagctaagtatgataatcaatgagactctccggctctaccctccagcaatgacattaaaccgtgacactcttaaaagagctaagctaggagaccttgacatccctgcaggaactcaactctatttatcagtagtcgcgatgcaccacgataaagaaacatggggagacgacgcagaggagtttaatccgcgtaggtttgaagatcctaagaaacaatcagctctgcttgtaccgtttgggttagggcctaggacttgtgtgggacagaatcttgctgtgaatgaggctaaaactgttctggctacgatcttgaagtattacagtttcaggttgtctccaagttatgctcatgctcctgttttatttgtgacgttgcagcctcaaaatggtgctcatcttctctttactaggatatcaagttaaaaaataccaagattggctggtattatggtttccggttttctccggttttaatgtaattcggttcggtatttgaatgaaaaggctaaaatggtcaaagcaaacaattatttttatattatcaaaccctgttatcttcttcctccactctctcagctctcatgagtctgcaactcctaaatcactgattttgtgttcatatattgggcgggaaacaaactgattcatttccccctttaattcccttttcttgttcttgtaatctgagatatactgtaattggaaaaagtcggataggaaagataagcatcaacggaaatacgcgctcaaggtgttcgacgaaattccgcacagagacaataactctataagagatgccactagaaccgattcgattcttgagaaccaccgcaggcgttgctgttggtgggtttgtgataataaccgcggtttcttcagcagctttaggagcatttcgatatacaattgaagagaaacggaagaaaagcggaatggcttgtagagtgtgtcgtggaaaagggttttacatatgcaaattatgcaaaggaaacgcaacgattaaatggtcaccattgtatgatcccgtttgtatcaatccatgtctttgccctacttgcgatggtcacaggttttttttcctccttttaactcttaatcagagaacaaaactctgagaagacatttggatatggtatctaataattttcttttagactaaaatttggaaactttgttttaacattgcagggtacaaaaatgtctcaactgcttaggaaaggagtactggtagactccttaggtttatgatttgatcatctttatgcttctgagaactcgaaaacggtttggtttttgtatacagcttttactaatattaaaccctagaataagctcttttattcctttataaatttcctatttttataaaggggacacctaaaatatctcataaatgtttgggaaacgttctccatcacgttttttgcttgccgtccctctgtttcatgaaacgtttagaggatgtttccctgttgtccccgtgaagtaccagcccccatcacgtttcaggtacgtgagacgcgtgcatcataggttaatagtgttgaatggtgtggatttgaggggaatataataaataatcggtcctgctttgtaataaatatggttgtgctgagttcggtaattctgcctaaacctctctacctagttagatgttattgttaatatggcctttgaccaagaacaacttcagccgtgttaaaaaacattgaaaccaaaatcaatggttatataagattaacttgcactactaggatttgatcacagaagaaagaaaggggtttattaatttggttactgtatcttactctttttactttcggataacttcaattggca

SEQ ID NO: 14553 - DNA, 3000 bp, Unknown
  misc_feature (1)..( 3000): cDNA_ID_2730206_gDNA_ID_2684202_Annot_ID_137210 3000 nt of promoter + ATG
atagccgaatctagaaatacttggcgggagatggaattgattggggcgaacaagcacattatatttttaagggtttccttcgacttctcttttatattttagggctaaacgaaagctctgattccttaaggccgtcagccaccgccgaagaggagcttcgttggtctcttaagaaagaaaagaaggggagaatatggcttatcaagaagcaatgaagcccaatcccacgaaggctggtttggaagaagtgatggcatctctgacatcagttcgatacttgtaaaaagtgtgaagctatccaaatccattacaaaactgtttcattacggcgatttttggagatagcttttctcgttttttgcatgttgatctgactgatctcagatatctcatcggaaccgtagtaaatacatcatcatctacttgcaagaagtgcatttatcctgtttgtatgaatccatgtctttcccctacttgtgatggtgtctagctcaacttaattactctttagccttaataatgaacagtcttatcgatcctgcttaattaaatattgaatggaagtttggtttgtggtaggttcggcaaattttgcctaactagtacataaatgattgatcaagtccactctttatagactgtagtatataaattattataattttgttaaccttgtaacatgattttaaaaattagaacccacttatttatttctctatcaggatggtatgttaatagaatgaactatagaacagatcaacagacagtaaatgaaacttaaagaaaaaaatacaaatggctcatataaaatgaacttgcagaaatacagtttgatcacagaataagagagggtttatcaatttggcttctgcgtcatttcggcaatggcgggtcgcagagacaggatccaacagctccgtggatctcgaattgcgattgccatctttgtcggaattcttatcggctgtgtctgttccgtcttgttcccgaacggcttctttaactcgggatcatccttgattgctaacgaagaacgcatttcgaaatcaacctctacggtactgagagagatcttatgctttaaacatctacaaattcctttttttagaaatttttctgtaatctcgagctctcgatttgtgattagaattagtgtttgttggaatttgagaatttgagtctcttgcgtttgttatgaagattcaaaatcttcatggatttttgagtagaactacaaattgcatgtcttgaacatttgagtttaactggtgaagtttcattttttttctctgttttttgaattgttcaggatggattggcttcatgtgaatcatctgaacgagtcaaaatgctcaaatcagacttttcaattatctcggtaaagaacgcagagttaaggaagcaggtaagagaactaacggagaaggtacggttggcggaacaggaaacagagaatgcaaggaaacaagtcttagttttgggatcagagataaaggcagggccttttggtactgtcaagagtctgagaactaatccaactgttgttcctgatgagtctgttaacccgagattagctaagcttttagagaaagtagctgtcaataaagagatcattgtggttcttgcaaattcaaatgtgaaaccaatgttggagttgcagattgctagtgtaaagagagttggtattcaaaactacctcattgtcgcgttggatgattccatggaaagtttctgcgaatcgaaggaggttgtgttttacaagcgagatccagataaagcagtggacatggttggaaaaagcggaggtaatcacgctgtttccggactgaagttccgcgtcttaagagagttcttgcagcttggttacagtgttcttctatcggatgtggacattgtcttcttgcagaatccttttagtcatttacacagagactctgatgttgagtcaatgagtgatggtcacgacaataacacggcttatggcttcaacgatgtgtttgatgaaccatcaatgggatgggctaggtatgcacacacaatgaggatatgggttttcaattcagggtttttctatctaagaccaactattccttcaatagacctactcgatcgtgtggcagatacactctctaagtcagaggcatgggaccaagcggttttcaacgagcaactcttttacccttcgcatccagggtacactggcttacacgcttccaagagagtcatggatatgtacgagttcatgaacagtaaggtactcttcaaaacagtgagaaagaatcaagaactgaagaagttgaagccagtgattgtgcatctcaattaccatccagataaactcgaacgaatgcacgctgtggtagagttctacgttaatggcaaacaagatgcgttggatagctttcccgatggttcagattgataaaagagatggatgcttgttaagcaagatatcgaaaaacccaatcatcttcttcttcctcgagttaagaaaaaaggtaggctaagtttcatcttcccacatctgttgttataatcagttatccttttaggttcctagttcttcttctctactaagaatcttgtgtagcctatagctgaaaaactcaagagtcttattaacaatactgtattgttgaccacagtttcttatttagtcagaaaagtctctctttttttaactatgcattatttcctgaccacaaaaaaaaattatgagagagacaacaaacgagagattaggcaagaaagagagatatggaagaacaaggaagacaaagagagtgtaagagttttggatgtatgtgggttttatccacaaacaagactctttaagattcttctctctgtaatgaccggaaaatcccatttttttgtggtttcaaatcaaatggaaccccactcttacctctgtctttgtctttttcttaaagccttttgtttcagcctctgtatgtatctccctctccggagcaattgcaaattctgtgtctttgtgct

SEQ ID NO: 14554 - DNA, 1458 bp, Unknown; identical to SEQ ID NO: 14551
  misc_feature (1)..( 1458): cDNA_ID_2730213_gDNA_ID_2684202_Annot_ID_191230 3000 nt of promoter + ATG

SEQ ID NO: 14555 - DNA, 3000 bp, Unknown
  misc_feature (1)..( 3000): cDNA_ID_4262308_gDNA_ID_2684202_Annot_ID_137215 3000 nt of promoter + ATG
tgacgcctccggtcacggtacctgcgtcaccggagactgcggcggcgttttaaaatgtaccggcggcggagttcctccagcgactctagcggaattcaccgtgggatcaagcaatgccggcatggatttctacgacgtgagcctcgtcgacggttacaatgtaaagatggggataaaaccacagggaggattcggaaattgcaaatacgcaggctgcgtctcggacatcaacgagatttgccctagcgagcttaggatcatggatccgaattcgggaagtgtcgcggcgtgtaagagcgcttgcgcggcgtttagttcgccggaattttgctgtactggtgctcacgcgacgccgcaaacttgttctccgacgtattactcgtccatgtttaagaacgcttgtcctagcgcttatagttacgcttacgacgacgcatcgagcactttcacttgtaccggatctaactacttgatcactttctgccctacccagtcttaaaaccggagctccggtttagatttgggttgggtttctctctctcacgtttcttttgcttgttatgtacggaaagagaaataaagaaagatatgataaggaaaagcgactatgatccatttttaaagattttttccagtgttctgttgttacacacacacacacccatctcatttgcaaatttgcaatgttgctttgattagcacaatagtatattgagactaacatatcaatatctggattactaaagacagatgaatgcttcattagggggttaataattgtgtgtttcaggtcattggttctcttcttcttgatatacttactaacatgagagagcaataaaaacttttagttcacccaaaagagacagagctaaatacattttcagccacggaatggttaaaatatgtgacccgcgcacagattcgataaagtctacaagacagcttgttaatttcttaaggagatcgtactaatgcagttaatatatcactagtgtttattgcttattttggtttccacttgtaagctttctttattcctgtggcagcctaaacgaatcctacaatagcctgaagctcatccattttctgtaaaccagagaatgtctcataattcacaccactgggcattgtcttgcaaatatggatagaccagtaaccctcattttgctaattagcaatgcatggatgtatgaaatgtttattgaatcaggttagatggttcaaagtaggttgtattgtcggtcttagtggaacttggttcgagatagacataagaaccattatatatttatctcggaggtgtattatattagaattagaatctcactctaaaagttcttggacggagctaaaataacatataagagacatgtgcaaatccattcaaaaccaataaactcttcaactgtattataaatcttacaactattaatgtctaattttagctattgccactacggtctaaaatcttcgaaaccgtgtggaccatataaccctgatgagtgggactaataagatttttaacattaccccttagaatagaaaggtcctatgctatgtattagtacaaggaaatttcagcagccacgtttttttaccacaccactgcttatactaattaggaggattacttagcttggtttaagggtttagtaagaaaagtccatcttcttcctctctgtacgccctttgaatctcatctcataaagagacaattctttctagctcccatcacccttttgctgattgctgattagttttcccttttcatatcagatattatatttcgagatttgacatatataatacaatgttttcgataaactacaaaaccaatttcgaaaaacatataagttttgctggaaaaagccgtcgttgatcaaagccacacgacaggttttatgcctaacaacgttgacccattaatgaaaggactcaaaagcaaccctcatagtcacggcaagattcaattacttttcctcggacccaaagttggttcaatttatgaaccagtttctacgtctaagtcagtcgtctcaccttataatctttaaagtctcccgctgcactaatcactccgtttcatcgttttatatatcacttgattttattttatttcataaaatatttttttttaaatacagatttttcttcaactatgttctagacttctagaagccataaaagattacaatattattaaaatgcgggacaaaactacataacgataccatttaacgtacgaaatatttctaatttacctattcgtttataaccagattttatacctgtttagatgtttactgttttaaaaactacacattcatggtcatggaggatatgatatctaaaaccttaggattcaagctttcgcgttcaagtagcaaatcaggcctcttatgtatgcatctgttccggtcttataatcgaggattcacaccaaattaaaaagcatcgatctattcgggtttcatacaatcatactcatgggttacaacagtcaacaaacacatctatctggtcatctggatctcaaactcgcacctcacaacacaatatctaaccgatccggatctcatattcaattcgtggatcacaattagacacatctaattggatctcatagtcgcggatcacaattaaattcatctatacagatatcatactcgcggaccacacatcacatgacataaaacatcacactgaaccctaaggtttagtgtagtgtgcatcagccatggccgagtcaaaatgttaagattttttttttaccatttatagtaaactaatggaagtaaaaaccagtaatgcaaagaaaattcagagaaccaaaggaaatatctatcaagacaccaaaaattctaattgattaatcatgacaacattacgtcgctacccctcgaaccaacatctataaatagaggatcggtgccattaacattcatcatcatcacccacagcacagagacacacacaaaaaacccataaaaaaatatg

SEQ ID NO: 14556 - DNA, 3000 bp, Unknown; identical to SEQ ID NO: 8771
  misc_feature (1)..( 3000): cDNA_ID_2730189_gDNA_ID_2684202_Annot_ID_137216 3000 nt of promoter + ATG

SEQ ID NO: 14557 - DNA, 3000 bp, Unknown; identical to SEQ ID NO: 8773
  misc_feature (1)..( 3000): cDNA_ID_2730172_gDNA_ID_2684202_Annot_ID_137223 3000 nt of promoter + ATG

SEQ ID NO: 14558 - DNA, 3000 bp, Unknown; identical to SEQ ID NO: 8775
  misc_feature (1)..( 3000): cDNA_ID_4266404_gDNA_ID_2684202_Annot_ID_137225 3000 nt of promoter + ATG

SEQ ID NO: 14559 - DNA, 3000 bp, Unknown; identical to SEQ ID NO: 8776
  misc_feature (1)..( 3000): cDNA_ID_1394832_gDNA_ID_2684202_Annot_ID_137227 3000 nt of promoter + ATG

SEQ ID NO: 14560 - DNA, 3000 bp, Unknown; identical to SEQ ID NO: 8791
  misc_feature (1)..( 3000): cDNA_ID_2037321_gDNA_ID_2684202_Annot_ID_137228 3000 nt of promoter + ATG

SEQ ID NO: 14561 - DNA, 3000 bp, Unknown; identical to SEQ ID NO: 8778
  misc_feature (1)..( 3000): cDNA_ID_1989792_gDNA_ID_2684202_Annot_ID_137231 3000 nt of promoter + ATG

SEQ ID NO: 14562 - DNA, 3000 bp, Unknown; identical to SEQ ID NO: 8791
  misc_feature (1)..( 3000): cDNA_ID_2037321_gDNA_ID_2684202_Annot_ID_191253 3000 nt of promoter + ATG

SEQ ID NO: 14563 - DNA, 3000 bp, Unknown; identical to SEQ ID NO: 8776
  misc_feature (1)..( 3000): cDNA_ID_1394832_gDNA_ID_2684202_Annot_ID_191252 3000 nt of promoter + ATG

SEQ ID NO: 14564 - DNA, 3000 bp, Unknown; identical to SEQ ID NO: 8793
  misc_feature (1)..( 3000): cDNA_ID_4266404_gDNA_ID_2684202_Annot_ID_191250 3000 nt of promoter + ATG

SEQ ID NO: 14565 - DNA, 3000 bp, Unknown; identical to SEQ ID NO: 8773
  misc_feature (1)..( 3000): cDNA_ID_2730172_gDNA_ID_2684202_Annot_ID_191248 3000 nt of promoter + ATG

SEQ ID NO: 14566 - DNA, 3000 bp, Unknown; identical to SEQ ID NO: 8772
  misc_feature (1)..( 3000): cDNA_ID_4266408_gDNA_ID_2684202_Annot_ID_191247 3000 nt of promoter + ATG

SEQ ID NO: 14567 - DNA, 3000 bp, Unknown; identical to SEQ ID NO: 8771
  misc_feature (1)..( 3000): cDNA_ID_2730189_gDNA_ID_2684202_Annot_ID_191242 3000 nt of promoter + ATG

SEQ ID NO: 14568 - DNA, 3000 bp, Unknown; identical to SEQ ID NO: 14555
  misc_feature (1)..( 3000): cDNA_ID_4262308_gDNA_ID_2684202_Annot_ID_191240 3000 nt of promoter + ATG

SEQ ID NO: 14569 - DNA, 3000 bp, Unknown; identical to SEQ ID NO: 14552
  misc_feature (1)..( 3000): cDNA_ID_1695701_gDNA_ID_2684202_Annot_ID_191232 3000 nt of promoter + ATG

SEQ ID NO: 14570 - DNA, 3000 bp, Unknown; identical to SEQ ID NO: 8781
  misc_feature (1)..( 3000): cDNA_ID_1989217_gDNA_ID_2684202_Annot_ID_191261 3000 nt of promoter + ATG

SEQ ID NO: 14571 - DNA, 3000 bp, Unknown; identical to SEQ ID NO: 8780
  misc_feature (1)..( 3000): cDNA_ID_2995025_gDNA_ID_2684202_Annot_ID_191260 3000 nt of promoter + ATG

SEQ ID NO: 14572 - DNA, 3000 bp, Unknown; identical to SEQ ID NO: 8778
  misc_feature (1)..( 3000): cDNA_ID_1989792_gDNA_ID_2684202_Annot_ID_191256 3000 nt of promoter + ATG

SEQ ID NO: 14573 - DNA, 3000 bp, Unknown; identical to SEQ ID NO: 8779
  misc_feature (1)..( 3000): cDNA_ID_1989218_gDNA_ID_2684202_Annot_ID_137234 3000 nt of promoter + ATG

SEQ ID NO: 14574 - DNA, 3000 bp, Unknown; identical to SEQ ID NO: 8780
  misc_feature (1)..( 3000): cDNA_ID_2995025_gDNA_ID_2684202_Annot_ID_137235 3000 nt of promoter + ATG

SEQ ID NO: 14575 - DNA, 3000 bp, Unknown; identical to SEQ ID NO: 8781
  misc_feature (1)..( 3000): cDNA_ID_1989217_gDNA_ID_2684202_Annot_ID_137236 3000 nt of promoter + ATG

SEQ ID NO: 14576 - DNA, 3000 bp, Unknown
  misc_feature (1)..( 3000): cDNA_ID_2730291_gDNA_ID_2684203_Annot_ID_137241 3000 nt of promoter + ATG
gtccggattgtcctgatgaaaatgtcctcctgtgtctcctactgcaaaacatactcctaattagggtggctctttgacgttttggtttcaatgatgaagagaagagcgagagatgcttacgttgaacgtggataaggacacattgtggagcatcagcaacaatattttcaacggcccatttcaaggcgtgttggctgttcttgtccttatcaatggcgatcgccgtgatactgccatagtcctccgaggtccttctaactcttcttgcagacatgttagaatcttgcttcccaagaaacatgaataacctgcttcacaaggaaactataatactcataaatgatctcatgtcttctttgtcacaaaacacccacaaccaagatcgattgtgttgtttttcttttgtctggctttgcaacctcagagaagaaacaatgaacaatgaaaagaaacagaaaattgtattgtgagatgatgaagcttttagtggttttacaatttttctaattttggagggtttatttctcaaacaactcaacagtcttgtgaaacaaacaaacaagaatggaaatttccacaagtctcaacttatctttaattagagagtgatttttgggaagttgctggtgagatctagtttgtactataatgtacgcgtttcgattaaaataaaattcgattatacattatcaaaatattaaatcgattattttatcttaatcagtaaaacaaagtttttagataaaaatattagtaaaactagtcaaacatatggtttagtcttttaggtttatatagactagaggttgaaccaaaaaagagagtaaaatagactagagaatagaatgttatgtttaaacatgatcacacatctcaatttacacacatttacttaatttgagtttcgataataatgcaacagcaatatatgtatctacgaatttgaaatttatgagtacaaaatctagaggtgtaacaaaatatttattattttcgtccctgatcaatcagagtagccacgtgggcgggtggtagaaatcgaaattattgcgattattgacttggaaaaaaacaaacacacgttgcattttttgatttacgtatccaaaaagaacaaagaaaaaaaggtaaacgaccaaataatataattttctggggctgtcgtcttccatctttatttcttcttggcgatatcaccatatcttatacgtctctcgaaagattattactcttaagacgattccattaaacactgattgtgagaacttgtactttaacgttatcgaaaagtatacataaatatttttatttttttaggctgattcattcttactgataacaataattttgtgttattctttcttacctagagagttctatagacaagttcgtaactataaaaccaatctttatttcttactcatagctttcaaaactaaaacttgatcagtttaaataaaatatatgggaaatttttgctgaaccaatatattacgtgtcaagatttcattgatcctattaatacaatttattcattttacagttatatcaaatacaaattacaactaagatactcacttatctacacgtcagattgtacaactaagatactcacttatctatatctaattttcgtggttaatattacatgtcaaaattttatggaaataattagtgtttttctactttatataaatttttatgatatattttttttttaaaaaaaggaaagagaaagaaatcaatttccatttgtaaacatatttttggttctgaaaataaataaatgggaaaaaaaggaattaaataacatctgttgttgttagctgatcgacaggtgttgcctgaagcgaccttaaaaaaagaaaaaggacaaaaagttgaagaaaaaaagaggacaaagttcacaaaatgatacaaagactaatacgtgtccttttattaatcctcttttgtaataaatactcttttttcctataaattatattacaaaaccaaagaaaaaaaggaataaaaaaaaacagagagaaaaagcaaaccacacaatattctcttctctctctctttgtttcgctgatagagagagcctctctctaagcaatttagctcgagcgagaaataatcctgagggaagaaaataaaaagaagaagaagaagaagaacatctttacttttgttctctctctctcttctgttcgattttaatttttttgcagatgcgaatatcttctaaagattcatcaactggttagttctttctctcttcttttttctttcctgatttttttatgttgtttttctgtgtagttagcttttcaatcggaagatttttgctattatgtgtcgaatctctcttgttgttttgagctttgtgtttagttttgcttaagaacaaagtttaaattcatctttctatttctgggtaaagctaaagcttcttttttaatttagatccaaggaaacccatgttctactatatgattatggacgttaatggttcgaattttttagggctttcttgtgattgatttcgctgattttccctcctttttctggtttttgtgtgaattttctttgacatgaccgtttggataatgattcgtgagtttttgattagtgctttgtgatctctcaatagggttgaaatcaagataaggatttgagaaaagatcgacgaagttgttgcgattttgggatcaagagagtgatataatcgagtgaggagaattcgtcgtatagattcgtcagatctggttatctccggtacttaattctccttgattcgtcgttttaactatgctaagttagtgtatgaataaagcggcatttgggtcgctgacaaaaacttatttggagcaaggattcttcaacatcatgaaaccattgcttagagtattcgaagaagaagatgaaaacaattgatttctcctaagtccatctttgaaatttaaagctttgttgtggtgtggtgtggaaatctctgattttggagagctcatg

SEQ ID NO: 14577 - DNA, 3000 bp, Unknown
  misc_feature (1)..( 3000): cDNA_ID_2730287_gDNA_ID_2684203_Annot_ID_137242 3000 nt of promoter + ATG
acaatacatcgtcttcatcaaaaacattggaagacccgcttctcgtatcggataaagttttcaacaaatcctgttcacctacctcttccagttcagaaacatcttccatagtgcattcagtccctccgttgcaaaagctttgattttcagaatcagataacaagtcagctgcatcagtaacgttctttagctgagtgatctcgacaggtgatgattcacacatggtgttggctgctaagctaagagtcattgcaactgcgggagtcatctcctccatgagctctccaaaatcagagatttccacaccacaccacaacaaagctttaaatttcaaagatggacttaggagaaatcaattgttttcatcttcttcttcgaatactctaagcaatggtttcatgatgttgaagaatccttgctccaaataagtttttgtcagcgacccaaatgccgctttattcatacactaacttagcatagttaaaacgacgaatcaaggagaattaagtaccggagataaccagatctgacgaatctatacgacgaattctcctcactcgattatatcactctcttgatcccaaaatcgcaacaacttcgtcgatcttttctcaaatccttatcttgatttcaaccctattgagagatcacaaagcactaatcaaaaactcacgaatcattatccaaacggtcatgtcaaagaaaattcacacaaaaaccagaaaaaggagggaaaatcagcgaaatcaatcacaagaaagccctaaaaaattcgaaccattaacgtccataatcatatagtagaacatgggtttccttggatctaaattaaaaaagaagctttagctttacccagaaatagaaagatgaatttaaactttgttcttaagcaaaactaaacacaaagctcaaaacaacaagagagattcgacacataatagcaaaaatcttccgattgaaaagctaactacacagaaaaacaacataaaaaaatcaggaaagaaaaaagaagagagaaagaactaaccagttgatgaatctttagaagatattcgcatctgcaaaaaaattaaaatcgaacagaagagagagagagaacaaaagtaaagatgttcttcttcttcttcttctttttattttcttccctcaggattatttctcgctcgagctaaattgcttagagagaggctctctctatcagcgaaacaaagagagagagaagagaatattgtgtggtttgctttttctctctgtttttttttattcctttttttctttggttttgtaatataatttataggaaaaaagagtatttattacaaaagaggattaataaaaggacacgtattagtctttgtatcattttgtgaactttgtcctctttttttcttcaactttttgtcctttttctttttttaaggtcgcttcaggcaacacctgtcgatcagctaacaacaacagatgttatttaattcctttttttcccatttatttattttcagaaccaaaaatatgtttacaaatggaaattgatttctttctctttcctttttttaaaaaaaaaatatatcataaaaatttatataaagtagaaaaacactaattatttccataaaattttgacatgtaatattaaccacgaaaattagatatagataagtgagtatcttagttgtacaatctgacgtgtagataagtgagtatcttagttgtaatttgtatttgatataactgtaaaatgaataaattgtattaataggatcaatgaaatcttgacacgtaatatattggttcagcaaaaatttcccatatattttatttaaactgatcaagttttagttttgaaagctatgagtaagaaataaagattggttttatagttacgaacttgtctatagaactctctaggtaagaaagaataacacaaaattattgttatcagtaagaatgaatcagcctaaaaaaataaaaatatttatgtatacttttcgataacgttaaagtacaagttctcacaatcagtgtttaatggaatcgtcttaagagtaataatctttcgagagacgtataagatatggtgatatcgccaagaagaaataaagatggaagacgacagccccagaaaattatattatttggtcgtttacctttttttctttgttctttttggatacgtaaatcaaaaaatgcaacgtgtgtttgtttttttccaagtcaataatcgcaataatttcgatttctaccacccgcccacgtggctactctgattgatcagggacgaaaataataaatattttgttacacctctagattttgtactcataaatttcaaattcgtagatacatatattgctgttgcattattatcgaaactcaaattaagtaaatgtgtgtaaattgagatgtgtgatcatgtttaaacataacattctattctctagtctattttactctcttttttggttcaacctctagtctatataaacctaaaagactaaaccatatgtttgactagttttactaatatttttatctaaaaactttgttttactgattaagataaaataatcgatttaatattttgataatgtataatcgaattttattttaatcgaaacgcgtacattatagtacaaactagatctcaccagcaacttcccaaaaatcactctctaattaaagataagttgagacttgtggaaatttccattcttgtttgtttgtttcacaagactgttgagttgtttgagaaataaaccctccaaaattagaaaaattgtaaaaccactaaaagcttcatcatctcacaatacaattttctgtttcttttcattgttcattgtttcttctctgaggttgcaaagccagacaaaagaaaaacaacacaatcgatcttggttgtgggtgttttgtgacaaagaagacatgagatcatttatgagtattatagtttccttgtgaagcaggttattcatgtttcttgggaagcaagattctaac

SEQ ID NO: 14578 - DNA, 3000 bp, Unknown
  misc_feature (1)..( 3000): cDNA_ID_2730285_gDNA_ID_2684203_Annot_ID_137244 3000 nt of promoter + ATG
gaatggcctgaagaagagactctggagttggctaaattggctttacaatgttgtgaactgaggaaaaaggacagacctgatcttgccttagttctgttaccagctctgaacaggcttaaagagtttgcaacagaggatcatgaacgtattcaggatagaacatctcatgtgtcacatgaacacaattcagttccgctttccccgattccttcctctcaggttagtttcttagaaccattctttttaagggatattagctgcaaatagaaatttagggttttagatcaagcagaatcatgttttattaagtaggtgaaaaatgtttactgcagaactttctcagttcatgaataatttctgtgccatgtagatagaggatgaattgagaaaatcatattgagtattgataaaaacatggaaattcgacgtagatcaaccagaagctgaaaatggcagtacctgagatccacgactatcttgatccttctaagacccgtaaccatcctatacctagaaggagtcgacctccaagatcacatacaagcaagtacaaaggcaacggttggtcttttatgagttgtgctccttccagagttcagtggggtgatctcccatagcgtgtggggagttcccttatctttgtatatgaaacattcttttagttttgttcatgtaaaattctacactttaaagaagacttgtttattgatgtaaagaccctcattcgaatgaagaaatcagacgaaatgtcattttgcaggtacatgatcttctgaaacaaaacaaaaattctaagcaagctgcaaaactgaaagtttaaggctttaataaaaagattagaggacactatttgttcttcatttagagcagctgataaggtctagagacggtaagagtttagagaaggtttgctacacaatatgcctgagacttgagaaccaaaaaccacaaaaccaaaagtgactgatccatcatcataagcttgtgaaatcttggagacaaaattaatagctaagagcagagaacagtccagagaaatagaaccagggggatataataggtaacaaaataacaccatcaaatatcaggttagtactcaatgagataaacagaggtatacaattatgtgaacacactacaccatcccaattaacaaaatgataagaaaaaacttgagagaagagcttcattttcaaatgtaatacaacacatcagtttctcaacgaatcaagaaagagttaacattgatcaaaaacagaaacataaaacactaactagaacaaacacactcatgacaaattaaattaccaatcggcaaaacatttaatcagtatgaatataagaaaaaggtttgcaggttattcttcaaagtgaaactgcattatgacttgacatacagacttgttgtacctctagaaaccaaataaagttttcatttttatgattccaagacataccaaacctatcaaattctcaccatttcccctatcaaaaatttcaacaacgacccgaaaaagagtctgccaattagactcttgcagtcttcaaatgggcacataccgcttcacaatttgcttcccagctacaacagctccagccgcaagtccaccaagagcaccagctacagctgcagatctcactcctctcgccgctctacaaacagctccggttccaagaccagccaccacactggtccaaacatcatctctatccgtggcagccacaataccactctcgatccctgcgtaaaccaatccaatgataccaatccgattaccccaagttcgaccagtttgaccagaagagttcaagatcctgttgattttgagcttagtagtgtcgccagattcgaagcttttgactccagtgatgactccaacagaagctccggcaacggagccaccgaggtaagctgttccggtgtagaaagtgagattctcaccccaagatctacgttgccttaaagcctcctccgtgaagagaaactcaggggaggtaggaagcttgtaaaggtactgagatttgttgattgggacttcgtagttttggtaaggattgtaaagtcttgtgttttcgtctgacccatgatcggatctgttattagccgccatcgatggaagagaaaagtctaggttttaaggattttggtggtggctagagagagagagacgacggagaggaaagagagagagagaaacgtgtgatgatgtggttgtgttgtgtctctctgaatgtttggtttggttgccgaaatgagaaatgaaaccaaactaaactaaaaatctatgtttagggtttttagggaaagactcagtccagttgtttccagatacgcgcagtaccagattcgcttaatactcgcgtttacgtttatttcgaacttaaccccatttattttattttctctatttaaacccaagttggttttctcttaccaccacacactgtatttgctgatatttcgaatgtgaccccataagtttaatttttacaaaattaacctcttcaacattggacttttcaaagtcatacttaattactttgcaaaattgcaatccatcgtgacaaccaaacatcctcgaattttcaggtgtttctcttataatgtcagaaatatttttacgacgaacgaacctaattttatgaattttttttgtcatcagtttttatttagagaactaaacttcaaataaaataattaaggattcaaatacaaagcttatttgtttttaatttaagtcaaaaggccaaaaaaaaaaattcgatttaatttcgagagcgtaaatagaagacaaaataaaaagcataaattcggaagtaaataatcgaaaaagttttgcaaactggaaacctcctcccgcagtcacacaactgcgcagagccaaaaataaacgaaacctccggcgaaagctacggcgaagagactgcgtctaactccgtttacacgccgattgtcttggagagagagagagagcacgaggtaaatcacgcaagggttag

SEQ ID NO: 14579 - DNA, 3000 bp, Unknown
  misc_feature (1)..( 3000): cDNA_ID_2730273_gDNA_ID_2684203_Annot_ID_137247 3000 nt of promoter + ATG
ttcgcgtgtagtttactacgacaaggcatgagacagatctgcataacatcaatgaattcagaaggaggatcccaagattcaaaaagggtatgtctaatggagttgcatgatgcatattgctaaagtatgaatttaaagttccttcaactaaaatttcgaacctcactcctatatttctactgatgtgttaggttgtgaaagagaacattttgaatcaactcacaaaagctgtacaaatggtgaagcttgagaaggatccgcatgctgcatttgctttgattattgacgggaaaactctaacttatgccttggaggatgatatgaagtatcaattcttggctttggcagtggattgtgcatcagtcatttgctgtcgagtgtctcccaagcagaaggctttggtatgtatatatatatatatccttcccttattcgtttcatcgcattcctccttgactatgcaactcccgaaacttcatacaaaaaaaagaaaatctaaatttatctattttgctctttcccaaattcaaggttgttaggttggttaaagagggaactggaaaaaccacattggcaataggtgatggtgcaaatgatgttgggatgattcaagaagctgacattggtgtaggaattagtggggttgaaggaatgcaggttcagtttttctctcagcaccatgccttttctgtttttcaagccatgttttctgtttcttgactagcagaaagttcattgaaaatcaaaccatgtcgacatttttgctgatccttcttacttttgcaggctgttatggctagtgacttttcgattgcccagttccggtttctggaacgattactcgtcgtccacggacactggtgctacaaaaggatagctcagatggtaatatgtagttcttttggccattttagttactcttacatttagtttgtttctaaccttatgttgttctacatccagatttgctatttcttctacaaaaacatagcatttggtctcactctcttctactttgaggctttcaccgggttttccgggcaatcagtatacaatgactactacttgttgctcttcaatgttgtccttacctcattgccagtaatcgcccttggtgtctttgaacaggatgtttcttccgagatctgcttacaggtaagctttataaatctcccttcttgaaaagctatttcgaatctctgctgatcatcgacaataatctgtgtttttttcgcttgtgcttgtgtagttcccagctttataccaacaaggcacaaagaacctcttctttgattggtcaagaatacttggatggatgtgcaatggcgtctatgcatctcttgtcatattcttcctcaacatcggaatcatttactctcaagctttcagagacaatggccaaacagctgacatggatgctgttggcacaaccatgttcacttgcataatctgggcagctaatgttcaaatcgcgttaaccatgtcccatttcacttggatccaacacgttttgatatggggaagcatcggtatgtggtatctctttgtggctatctacagtatgatgcctccgagttattctggaaacatttacaggattcttgatgagattcttgctcctgcacctatctactggatggctacattgttggtcacagtggctgcagttcttccttacgttgctcacattgcattccagagattcttgaatccattggatcatcatatcatccaagagatcaaatactacggaagagatattgaagatgcgagattgtggacccgagagcgtacaaaagcccgagaaaagacaaagatcggattcacagctagagtcgatgcgaaaatcaggcatctaaggtcgaaactgaacaagaaacagtcaaatctctcacatttttcagctcaagacgcaatgtcacctagatcattgtagccttgtatagtgtttgttgtttttctacaggtccaattctctgatgcatcagactttggagacaggtcttgaagctaattttgttgagagtttataatagagtgagatcatgtaaagagtagcctctgatgttttttctacttgttgggttcgaatttttctttatcttgtacacattatacttaggttttgtgtatacttaggacagaatgcaaaaaaacataacaaagaatcttccttctgtgcctcttctgtgcctcttctgtgcctctaatcatttaattggtcatttatataaatttgtttatacaaaatctgttaagtgaatcttgactttagaaaaaaagagagaaataactctcaatagcagtgatttgtaaaatgattttcatttcaactagaaataactctcaatttcatttcataagtttccacaaagaaatattatagaaattgttgctttagtaaatggtttcgtatccaccaattggcatttaggtaattaggtaatgaaatctccaacttatttgcgtgtctgttactttctagtttctagtgactttagagatgaagtggttggcgaataaattaacttactttatactaatatattaattttaatttaattaattattctgggccgggttttgcccaatatgggttcagtacggcccaacaactccgcaattattattatttttccatggagaaaataaaaaaagaaaagaataataagagagatttggttaaaatgagagtgtaagcaattctgagtctatcccttcccttttgggatattttcgccgcgtggattgatatgacgactctctttcgccggaagtcaatcggaatccgcgacaacttcttccttcaatccctttgatttttttttggctctacttatcccaaacccttcaaatcttcaggtccaatctcttcttctatttgttttttaattaaaaaaatccggcgaaaggtgaagctcttggattcgagtggtggctagtaatcgatttcggtagtttagaagtagtttataggttttatcagctttcgatttgatg

SEQ ID NO: 14580 - DNA, 3000 bp, Unknown
  misc_feature (1)..( 3000): cDNA_ID_2730269_gDNA_ID_2684203_Annot_ID_137248 3000 nt of promoter + ATG
aaaaagtggtcaatatcgtgtgcagggaaaaaaaagaaagtacaaaactcgagaaaaggactatagaatcatgaacgtggaccgatccaatgtgattatccttcgaaccaaagttaacttgatgaaagcttttttgaatggaaaaaagaacaataccttaaatattccacgttgacagtatacaaatgtaaatcctaatacaaaaacaacaacaaaaaaacgcgaacaaagtaaaaattcgtttttggttcattgagtttttcttaataaaaaaacgtcaaatcgtatccaaatttaaattcgattgtttacaatttctaatgtttaaaattcaaagaatattacactttagcatggtaacgaggatttattcagttaaactttgattttggctagtgacagtctttgtactatttactcactcattatgtcgacaaatatgctttattgaaaggtcaacagcaaacaacttaacgtctctttctccaaaacactaatccacctatatagttatcctataattacatctaaacatctaatcgaaatacacgtaatgtaaaatatgaagcgtgtcacggcacagtttctatcttataaaaatatctggttggttagaagaatgtaacatctacattgttttatttaatgtacgtaaaattaaatacattcacagatttgttttgttcatcacgtctttttctcttaaggtgtgtgtgtgtgtgtcattcgagttattgatattagaaaacaatctccactacacgaattcatcacgtaactgtacatgaaaacaatcttacccgattagtgaaagcaatgaattccaataaatatttatcccgatctataactaacatgaatttcatctaccacggaagaagttttccatatatagtttgtaacatttcatgttcttatgagtccaaccaaaaccaacgtccaaatgtctcaaaattggtaatgtagaatgtttatagaatttacctagttaattaagatttgtaagtatatgtttatatgctaacaaccatatcgaaaatacaagcataagattctgatttaaaatttataactggagttccatatatctgatggatggattaacaagaaaaagaaacggtggggattggttgaaccactccctgaaaaatttgcttcgttttgcagatgagaaaaaggttgtgacaacgtcaccaccatctctctctcccctatgtttttttctttctttattggaatatctctcataagcttctgaatcagatacccttttttttctttttcagcaaatcatagacctacgaatacgattttccttttttctttgtcgggacaaaactagaactttgttttcctcttaagaaagtgatattcagaaacaaacgctttctagttatggacttttaccaaaatactccaagattttacacattcttttttttcgtactataagagagttctttacacagaacacaaaattcattaaaatacatgctattttctttaaattctttattcatagttttgtagttatattacaggaggttaattaaaactaggaatgtaatatactactatataaaacaacattattatgagaatggaattataatgttagggatataataaatactatacattaaaaaaaatcaagatattctagaaaacagagacaatatttgtttttgaggaaaataacaaattttcaacagtcacgcctaataaaataatttaaattctgaaattcgaattaaacacggattaattacaatttttttcttgttttgataattacagctggatcataaatacattatatatatatatatttccagattttgtattgatttactttgcaaagcgctctctcacaagttaaaaactctcttttgttggtaatggcatacgtatatgttgataataacgtatctaccaattagactattttctagtataaaattgttaattaagttaattagattattgttgaagagagagagagaagacgtagaagtagaagaagaagaagcagacccgaaagtgcctgcactggttcagatttgcagagtcgctttgatatacaaaaacaaaaacgagtgagaaattttcagacacaagaaaacaaatctctgtctttctctaaaaccctttctctattttttctttttttgagtctcctgagaaaacaagagaaagaaaaagacagctgatagagagagagagagaaaaaagctgcattttttttgctttgtgctcttgcttcttgatctaaccattgccgacaaattctaggcgaatcaatcagtttcttcactcaaatgggtttatgttagtttgtcatgttatccacagaatctctggtttgattcctggtttgtctcctgattctctacttctccgacaaatctccactaaacctgtctgaaattttctcttcgttttggggttttccattgtgcttgacttgttgttgggttctgggatcttgtctcagcttttgtttttttacagctgtcaaattgcgtttgcgtgttcttcatcacctcctgcttaatccttatctatcttaatttaagaatcaattcatgatttcaaatagtcataagaaggcaaatgtgtttgaaataattggtgtttggtaaattcattttcctctctgggtttcgtaaagtcaacatctttgatagatttgcaattttaaaattttattgatttgctatcattcagattcgagtctgttgaccaattttgagtatgttttgtgtttaataatttttgtgtttaaaattatgtgacgagcttccgaaatttatgcttctttgtttcagtcttctctgccattttaattatgtttctgaaagatcaaagctttcgaaatttttactaatgggtttggttcatttttctacaggactatgagatatgaagcactaatctgattcttgaggaaataaagtgctggattttgttaaaagatcatagagaagttcttgtggaatg

SEQ ID NO: 14581 - DNA, 3000 bp, Unknown
  misc_feature (1)..( 3000): cDNA_ID_2730221_gDNA_ID_2684203_Annot_ID_191314 3000 nt of promoter + ATG
tggctgaggacttcgctaactttggtgagatcgatagtctttacaaagaaggcttgcttctcaagttagggtttcaagatgatatgttcaagaaattccctttaccgaagatcgtcactaccctccaaaaatcaagcgagggcttgcttagatacgacactcctaaaatagtttcaagtaagtacattaattatttcttacagcttttaatcttttgacagctattacaacatttaattatgtcactaattcgtttatctgaaaaatatttcgaaagattaacacatgtgccatcacatgcccgtttatggaccaatccttaaaaaggaatcctaatgattctcattacctttattttatggtttgctatagttctatcacttccgtgtgtatttggaaccaacagtgaaagttccctttagattcccttcaacaaggaaatatgattcacgtgctctattcatttgtttatttgttgtttccactaaaagataaattttgctatagtggtggactggtggtggtagttgtaagagattgcttttatataattaaaagcgtggttctgttttatattactagctctttaaactgcttacttataggtcttgttattatatagtttaacttgtctaatgaatcttttttactttaatgtagaggataaatatgcatggcttcgagatgacgagttcgcacgccaagccatagctgggatcaacccggtcaacatagaacgagtcacgtcttatccaccggtcagcaatcttgaccctgaaatctacggaccaggtcttcactccgctctcacggaagaccacatcatcggtcaacttgatggcttaaccgtacaacaagtatgaatatacatcatctcattaacttacacaaagacaaaaaaattttgagtaatattattaatttgtttatcttttgattgaattttcaggcgttagagacgaaccgtttgtttatggtggactaccatgacatatacttaccgtttctagatagaatcaacgcgcttgatggacgcaaggcttacgcgactcgaaccatattgttcttgacccgactcggtacactcaagcctatcgccatcgagctaagcctcccttctcaatcaagctcaaaccaaaagtccaagcgcgtggtcacacctccagtagacgcaacctccaactggatgtggcagctagccaaggcccacgttgggtccaatgacgctggtgtccaccagcttgtgaatcattggttacgtactcatgcgtgtttggaaccgtttatattagctgctcatagacaattaagcgcaatgcatccgatattcaaattattagaccctcacatgaggtacactttggagatcaatgccgtggcacgacagactttgattagtgcggacggtgtgatcgagtcgtgcttcactgctggtcaatacggtctagagattagttccgctgcgtataagaacaaatggcggtttgatatggaaggtctccctgctgatctcatccgaaggtaatgtctctgtacattattaaatttagaaacttaagtattaaactaaatctgatgcataaaacttaaaaagtgttagaaacatttctgatttattagaattacatgaaatctagctccaacagtttctaatggtttcaatcatactcatgtgataaataatgtagtgggcatagtaatagattgttgtagtgactagtgagatagatattttgttgtctggttaaatttggatttttttttcttcttcttttcatatacaatttgaatctaacaattttttttgttaaattttttatttcatttttagggggatggctgttccagacccaacacaaccacatgggcttaaattacttgttgaagactacccatacgccaacgacggtctcttattatggtccgcaatccaaacttgggtccgaacctacgtggaacgttattacgcaaactcgaacctaatccaaaccgatactgagctccaagcctggtactctgagtcaatcaacgtaggtcacgctgatcaccgcgacgccgagtggtggccgaagctttccaccgtcgaagatctcgtctccgtcatcaccaccatcatctggctcgcctcggcacaacacgcggcactcaacttcggacaatatccttacggtggctacgtcccgaaccgaccaccgctaatgcggcggttgattcccgacgagtcagatcccgagttcacgagttttatcgaagatcctcaaaagtattttttctcgtcgatgccgagtttattgcaaacgacgaagtttatggcggtggttgatacattgtcgacacattcgccggatgaggagtatatcggagagagacaacaaccgtcgatatggactggagatgctgagatcgtagatgcgttttatggattctcggcggaaatcggacggatagagaaggagattgacaagaggaatcgtgatcctagccgtaggaatcgctgtggcgcgggagtgttaccgtatgagttgatggctccgagttctgaaccgggtgttacgtgtagaggagtgcctaatagtgtatctatttagaattattcaatttttcaaagtatagagaattttataagtatataattagattttgacgcagtatggtttatttgccgatattgtaaaattcttacaaggattttattatgttgatttattaaaatgtaggcgacacaaataattaaaaatcaaggctttaaataattaaaattcttaatggtcgtttaccatcaatcaaattaaaatcaaaaccaaagtgatcatcaacacaaacagtgtcgttatttggcatcggctcgtatcaaaccgtaaaaaatcggaccaaaaccaaaccaaaccaaaaatcggtttaaatagtcttcaaaataaaacgaaaacctctagcttcttcggaggctctgacgtttattgaagtttcatcgcctttaatgttggaccatcattatcaatg

SEQ ID NO: 14582 - DNA, 3000 bp, Unknown
  misc_feature (1)..( 3000): cDNA_ID_2730254_gDNA_ID_2684203_Annot_ID_191301 3000 nt of promoter + ATG
aattggtgataaattttcttattctttcagctatcaattcaggtttattgcattctgataatgtgcaaccatatacagaccaggtaaagtctcgatctgaggttagtaccagttcaaaagtgttgaaaatagaattaaaatttatggcattgtatcatttccacagttagattcttaatgttttcataagaactccatgagagaccagatggtcttactcctaagattttgctccatctttgagatttttgcagtataacgaggagatgttgcaaaaggttgaacaggaagagaggcttgagaatgtacatggatctcagatgccttccactcctgcagatgccaatatccagtgttctaatgaaaacaacttttttgaggaggatcaagtccaccatgaagctttactgcaggatgaatgcaagatgaatgaatctgatatgatggaacgatgctcaaacgcagttgctagtccaaaagaaactgcattgtctgctgctgctcaaaaacctgatttttctagagttagaggtgagatctgcttggataatttaccgattaaagcactgcaagaaacattcagggcaacttttggccgtgatacgactgttaaggacaagacgtggcttaaaaggaggattgcaatgggacttattaattcttgtgatgtaccaacaactaacttgagggtgaaagataacaagttaattggaaatcaagagaagtccaacgatgtgacgaatgccattagaaaggagatgggagatgacgtaagagctactaaaatgaaagatgctccatcgagtactgatcatgtgaatggacattcaaacggtggcaaccactattacgctagtgaggattattccagtgaacagagggctgcaaaacgagttaggaagcctacacgaagatacattgaagaactttcggaaacagatgataaacagcaaaatgacaagtcagtgattccttctaaagatcagaggttgtccgaaaaatctgaggtcaggtctatcagtgtctcctcagggaagagagttactgtcaccaggatggtatcccttgctggatctgaaattgaggttccttatgtttctcatgtccggagaagccgtccaagagagaacattatggctcttttggtatgtctcttggttactcatgctcctcaatatagtaaattaatctcatacctttcctttgaactgaaaaaagcttccaatcatctggctcgtgttacatctgtgccttgtgtcacatgccaaattctatctcaagaagcacagatgtaaaaataataaaataagtgatcatcttctatgccattattttgctttgctgttatgtcggaatgtaattaaggattttacaacattgtgtagggatgtcattccagttacttggaagataaagctagtgcagcagagagtaacctcaatctgagtccatcccagttaagcagtgaggttgtgaaccgagattcggtggaaaagtctgcttctcgaccggtccaaaacgaagtaagagatatctgttgtttaagttaccttactctcgtaattctcatttcgtactttgctgatagtagaaatggtatagggttagatctcatttaccatctacctgatataagatgaatttggtgttccaggtatgacacagtttctcattgctttattggtttgcgaatgcagtttgctacaagtgacgagaacaatgtggagcatattctctctgaggttgatcaagagatggagccagagcacatagactcatctggaaatagctcggatgagaataacattggtgtgccaatcatgcaaggtggtgcgcttagaaggaagcatcatcgagcttggactctgtctgagatagcaaaactagttgagggtgtatcaaaatatggagccgggaagtggtctgaaatcaaaaagcatttgttttcatcacactcctatcgtacctctgtagatctcaaggtaattcaacctttttaaccctctttgcttatactatcaatcaaggctttggtttaaacatcttgttgttttttaggacaaatggcgaaaccttttgaagacaagctttgctcagagtccctcaaacagcgtggtacctccctctctctctctctctctctctctctctctatccctttagcttccaactggagtttcttttgctcaagttgtaataacgagagcttatgagtatactgtcgtgtttccagggaagtctcaagaaacatgggtcgatgcatattcctacgcagattctgttacgggtaagggagcttgcggagaagcaatctcagtaagcaagtttgttggagatagcaacagaaaggaaatggaaacaaggtccgacttcttgtagctgagttttttttgtaaaatagcaactcaagtaagggagacgagaaatgtgagataagataacagtttctgtagtagacttgtaactttctaaggaggctttgtgggttatatatatttatgagaaaagtattaagtagtgtctgtgtcctgaattggtatgaatgattctctataatatccatggaagtttgactcggacttgaattgggcctttttttgtattcgatccattattccttggaggtggttctcgaccaacacgtacatgtatctttctcgctttctctagaaccatcctacccctattaactcatcaaaatttctctcctttcatgcaaaagcttcgatcttttaatgttgtttgatcggtagacaatcgatgccaaagtggtgagattttgtttgttagatatgttactaattttagagttctttagatgatttatctcagtttaaagtttgtgtctttttgagttaatggttaatttggtggtgattttatgatttgcctttgaattctgtctgattgttgttggttctttttatgctgaaactagtgaagatacctcagtccttacctatctccagaaattgcagtagtagattctgaaagaaaatg

SEQ ID NO: 14583 - DNA, 3000 bp, Unknown
  misc_feature (1)..( 3000): cDNA_ID_2730258_gDNA_ID_2684203_Annot_ID_191300 3000 nt of
acataatcaattggagtgctctcatcaatgtcgtcacttgttccatgagtctctttgtcatggtgacgactcttggacttttcatgatgacccattgcctctatttcttctttaactcgttcaaacacatttggcgatttcacagtcttctcctctgtggaaatacccaattaaaacaaagggtttagattcgtgtttcataagagacaaaacagagcaacgaatcaaaaatagacttatcatggcgtgtttctattgtttctttagagaaatttccgatcaaaaccatccattaatagacgtgtaattttgattgtgaaatttgaggaaacgaacataacttgatcaaaaagtcttcctttttaacaatatgcataaacctatgatgagatctgatcgttcattgtgtttacctgatcggttttgatccgccatcgatggtttttgtcttcttgatcttgcagctttctatttttggttcctgattcggtggcgttttgcgtcagatgcaaaagagtctttacagtataaatcaaaatcgatttcaacttaaatgggccttgttgggttataatgggcctttttgtttgtaagtgagtccaaggaaaaaaaacaccagaccagattgaaattgaatcacttgcaaaagcaaaattgattactctgttttggttttggatcagatcaaccaaaggaagcgaagaagaagaagactttatacactctcgacgctattgatttcgtctgtgcagttttgtttctctatcagttagttttaaagatgagttcttcagagagtgtggaaaacgagtgcatgtgttgggctgcaagagatccatctggtcttctttctcctcatactatcactcgcaggtgagattcatatgatttagtgatcattttcaagcaacaatctttgacacacaatcatcatcatccaggtctgttacaactgacgatgtttcactcacaatcactcattgtggagtgtgttacgctgatgttatctggagtagaaaccaacatggagactccaagtaccctttggttcctgggtatgttttcaaaaaccaaactttagattatgaaattgcaccttactagtggaattgatattcatttgtttttccttattgtaaggcatgagattgctggaatagtgactaaggttgggcctaatgttcaacgattcaaagttggagaccatgttggtgttggaacgtatgttaactcctgcagggagtgtgaatattgtaatgaaggacaagaagttaattgtgcgaaaggagtttttactttcaatggcattgatcatgatggctctgttactaaaggaggctactctagtcacattgttgttcatgaaaggttgttataatctgctttcctctcttgccatttcatacttttgaaagttgttagtgcctatatgagtttagtttgagtaggaagcaaatgatttctcagtactagtttcttttgtgtttcaaatattgaatacaataggtactgctacaagatacctgtggactatcccttggaatcagctgcaccattactctgtgctggaatcacggtttatgctcctatgatgcgtcacaatatgaatcaacctggtaaatctcttggggtgatcgggctaggtggtcttggacacatggcggttaagtttggcaaggcttttggacttagtgttacggtttttagcaccagcatttccaagaaagaagaagctttgaatctgctaggagctgagaatttcgttatctcatctgaccatgaccagatgaaggtagtgaaatgacttaattagtttcttgtgattatttaggattggaaccagataatacttaacttgtgaatctatctatgcaggcactagagaaatctctagactttctagttgacacagcatctggtgatcacgcgtttgatccttacatgtctctcttgaagattgctggaacttatgtattggttggtttcccaagtgaaattaaaatcagtcctgccaatctcaatcttggtatgtttctcaaaaggtcttataatctccaattttacatacatactctttaagatactgtcatactgaaaccaaagatgtctggacaggtatgagaatgctcgctggaagtgtaaccggggggaccaaaataacacagcaaatgttagatttctgtgcagctcataagatttatccaaacatagaggtgattcccattcaaaagataaacgaagctctcgaaagagtggtgaagaaggacatcaagtaccgtttcgtgattgacatcaagaactccctcaaatagatgttgctcaaaggaaggaataatggagtctgtaataagagaataatactcactgctacaatctttattacgtattttctcgtttttcattagtaaagcaaataaattaagactactgagaagaaattgctcgtaagcttgggtaataagaggaaaagagatttacaaaaactacaaaaattcccaaaattagactttaaagagttatgggtaaaaaataaagaaacaagaactaaggtggccatctcgtaataaactctatatatatgtacctaactcaaattaaaggagattaatatcacgcgaggcatgagagataaattatttctttttccaatgtatgagttatttaatttatgtggacgaaagcgaaatgtcaatgaatgttgttaccgttaaattaaaaaaaaaatgatttttctccttccttccccaaaatttcaaatttcaaactcttctcttcttttaacaattgtaaacctttttgtcgacatcattcttcaggccaccaaagttcccagaaactttctctttcttcttcttctccttcttcttctctctcgagtttttttacaaatatattctcgaacccacctttctccgccggatctgattccaaaacctgtgaaagtctccagctttactacagatttttgaagaacaacaaaagggtttcaaatttgagcaa

SEQ ID NO: 14584 - DNA, 3000 bp, Unknown; identical to SEQ ID NO: 14580
  misc_feature (1)..( 3000): cDNA_ID_3018101_gDNA_ID_2684203_Annot_ID_191296 3000 nt of promoter + ATG

SEQ ID NO: 14585 - DNA, 3000 bp, Unknown; identical to SEQ ID NO: 14579
  misc_feature (1)..( 3000): cDNA_ID_2730273_gDNA_ID_2684203_Annot_ID_191295 3000 nt of promoter + ATG

SEQ ID NO: 14586 - DNA, 3000 bp, Unknown
  misc_feature (1)..( 3000): cDNA_ID_3018105_gDNA_ID_2684203_Annot_ID_191294 3000 nt of promoter + ATG
ttttgggtccaaaaccattaattggagtaataaatatattaaaagtttagagggcaaatcgggaaagaagatatttaagttgttttccttttcctacttggaataagcaaagtaaaacctaaaaaaaaaaaaagaccgtaagtagttacaagggtggaagtataaaggagcagtcttttcttcttctttcaaccccacggcgcagatcctacgagtttggtctttgtctctatcttttcaatctttctctctcaatcgctcttcaatttgataacagcaaaggtttgtttgaatctctcttctttttgtatgatttgtattttggatccccattgtgcttgcttttatagaagttataggttttgatattgtttgattcatgtttgcttcatcctaatacaatgctgattcgtaaaggatcggtttttgtacaaggatgatttagatgttctattactgcgacttggttatgttttggttacattaattgaatccttaggattatgcagttgactttacgaagatgaatgcttgatttgcttctgctctttctatctctcttggtgcttctatgtttttatcaccttttacgtgtttgttatgtgatctcagagacaacgagttcgattataaattgtaatctgttttttttttctaatgtcgatttcatatttttgttatgcttgtccagtcatggcaggaatggcatctgatggaactcaatatgatcctcgtcagtttgatactaagatgaatgccatgtgagttaaattttagtatcttaatatctgaatccctttataacaaccaagaactgacttgtgtaatactttctagtctcggcgaggaaggagaggaaacattctacactaactatgacgaagtttgcgacagctttgatgcaatggaattgcaaccagatcttctcaggggtatttatgcttacggtaagtgaagtatttcctttgagaacacattctatacataccttcattgtttctgtctagttttgtattttcttttgtttgtttcaaagcttagtactgttactcttaaacaacctcatattggttttgttatttatcattaggtttcgagaagccttctgctattcagcaaagaggaattattccattctgcaagggtcttgatgtgatccagcaagctcaatctggaactggaaagaccgctaccttttgctctggtgttttacagcagctcgatattagtttggttcaatgccaagctcttgttttggcacctacccgagaacttgcccagcaaattgaaaaggttatgagggcacttggtgactaccttggcgtcaaggctcaggcttgtgttggtggaacaagtgttcgtgaggatcaacgtgttcttcagtctggtgttcatgttgttgttggaacccctggtcgtgtctttgacttgttacgcagacaatccctccgtgctgatgcaatcaaaatgtttgttcttgatgaagctgatgaaatgctctctcgtggtttcaaggatcaggtttaatcttgtttaatctcccattcacattttctttttctctctgataaaatcaagtcatttgttcttataatttgatttctctgtcagatatacgacatcttccagcttcttccttccaaggttcaggttggtgttttctctgctacaatgcctcccgaagcccttgagatcacaaggaagttcatgaacaaaccagtcaggattctggtcaagcgagacgagctgactcttgaaggtatcaagcagttttatgtcaatgtagacaaggaagagtggaaactcgagacactatgcgatctctacgagacactggccatcactcaaagcgtcatctttgtgaacacaaggcgtaaggttgattggctaaccgacaaaatgagaagccgtgaccacactgtttcagctacacacggagacatggaccagaacacaagagacatcatcatgcgcgaattccgctctgggtcttcccgtgtcctcataaccactgacctccttgctcgtggtatcgatgttcagcaagtctctctggtcataaactttgacctcccaacccaaccggagaattaccttcatcgtattggaagaagtggaaggtttgggagaaagggagtagcaatcaatttcatgacatcggaggatgagagaatgatggctgatattcagaggttttacaatgtggtcgttgaggagttgccaagcaatgttgctgatcttctctgaagcctttcttttttctgttttttactgagaaagtgctgtgtttacccctttttttggcagcttctctatgctttgatttttgttttcaggctactacttagatttatagttcttggctaaaagcgaacataactcattacatgattttgcttttttggcaatcaagaatttcggcattatttatctttttgtgaacgtggcttacaaggaaggatactctatgagactaaagacttttctctacttgagtttcattaatgaacttttgttgattttctagttttctactcttgaatttacaataaatatatactacataaggttggggacgagccccaaaaatttccctcgaattcatgaagtgagaagcggccatgtgtaaatccaaaggacatgagatcttacaaaattttcttaggaaaaataaatatgcaaaactgtactaagtacagtgataactaatcgctagtaatgttttttttttaaatgtaacaaacaaatctcatctaaaacaatatacaaacaaaaaaaacttcgagtaactaaatagatacagtattgaggttgtgattactgcactaaatattgaacaagatatagaggtgatgtctcattctataaatatgtcaaaaactcgcaagtgacaaaaagcagaagagaaagaggttggagataaaacccaaaagcaactatctcctttttcttcctaaaaaagcagagcaatctttttttgaggtttgtttgcaagtgaag

SEQ ID NO: 14587 - DNA, 3000 bp, Unknown; identical to SEQ ID NO: 14576
  misc_feature (1)..( 3000): cDNA_ID_2730291_gDNA_ID_2684203_Annot_ID_191288 3000 nt of promoter + ATG

SEQ ID NO: 14588 - DNA, 3000 bp, Unknown
  misc_feature (1)..( 3000): cDNA_ID_4265714_gDNA_ID_2684203_Annot_ID_191285 3000 nt of promoter + ATG
aacaaaaaatgttcctgagatgtgtttcagagctcaatctctatctgtacaacttttcctaacctcgccgcaaatttctatttacaatcggagactgtaacctatccccaggattagaaagaccaaaaatttctaaaaaagacaaaacaaaaattaggattcaacgagaacgaaagaggaaagatttcagaagccaaatctcaaagcaagagacgacggcattttttgcgtctgtggaaccacgtcttcgatccaaaacgatcaccaaaaccatgcggatctaactctaacaacaacatcttcgaaaacagaaccgattaatcgaccttaccgaagaaacgatcatcctcgccggtaagcgataaagaaaaatctaaccgcgaaactcgtttccttcgccggagatatccaataagcaccaatacaagaccgatgttagaagagagagagagagctcaaagagagtaatcgcgacgagagcacacgaaaatgagaccttatacagttatactgttacgagcgagtctagggttccggtttttttccccctgtaaatataccaaattgagataccggtatagattataaaccggcttgcattttccggttcgattagctgatttctctatgtaacaaaatgccatttacagttttcaaatttaccggttaaaattgacctaaccgaaacaaataaagtggaaatgttttagtttttgattcaactaagtgtatcatcaatggattttatattgtttccatattgtgcaaaatgtaatcagaaaatgatcacgatgtgcaaattggtttgcttaatttaagattgaattacagatttttttttatcgaatattaaaggatttattaaggaaataaggaagatctggtaaaaatcagatgctggcaggtgacacgtgtcactcatgactaaggtcttaaactcttacggataaagaaagcgacaaactgggagcactcttagaagacgaagaagatcgacggcagagatagaaaaaagctaaaaggtcgtcatcgaaaacaacggctaagatcttgttctcggatcagacccaacagaggagagagaaaatggatccgcttttgtgatttggataagatgacgtggcgtccatatccttgggtcgttgggcagagaagagagcagaaggcagtgtgagaggcacgtgatctgtcacgtgatttttgattctttttcactgttacacttccactatcgttcgagctatatttttttttatgaaaaaagaatctaaagatttatcagagttcctcctagagatgctaaatttataggaacagtggtggtccttggacaatagtatgatactaccaaacaccaacagaaatcatttttctgtcgttgtatcatttactgacataacttgattacaaaaatatagtattaattagctttgggagtttcacatattttagtatcaaatcaaatatacaacagaaatcaatactatagtatttggaaatgcccactacctaaacatatactacatttctttttcggtccacgcttacttattacatcgttaatccttatcttcaacagattagatgttaaagtgagtagacaagcttagactgattccaaccatgtgatttgattccaaaaagaacattatagctgtgatgggcttgagtgacgaacaacactgttggttctgtatcaactggtgatgaccattatttcagcccacaacttggagataaaagaaccaaatcataagcagtttccacagactaaagcaccaacaaaaactatggaaagcttttatcgagcaaaagatcacgagtcacaaacataacaaaaaagtacacgaatcatgaaatcaaatttctcaagttccctatcaaaacgctttaaaatacagaaaagggatcccttctcatttattgtgtcgttctctcccaaaccccaaaacactattacccaaatttagagagaacacacaacggttagttgaggtattcagagtttgaatcaattctaattcaagtcttttatttgaagtataagcttattgggctggtttttcacaatgactgtatatttgacccaatccgcccaatgtgacgaaaaggaggacccataactagtggtgtcctttactttctttttcttttccaaaaacgttaagatcataaactccatacctatatacattaatatgaactatgaagtgtcgtctactttgtatgaatgttgctctcatagtctcatctcattatttatttttgtcctttaaaatgacaaaaagatagtgacatttattatttattttttgtttccgtcgcttgtaatatatttatttgattaataaaatgggacgaaatcacaaatatatattagaagaacaaagaacaatagatacaaataatagtaacattatattttactcataagaatatacttcatgtgtggcacatgtctcatgtagtccatacattcgtgtttttttttgttgttgcatatttgatatcttaaacactaaaatttacacatgattcatgaatgtcaaagattcatttctccctagtgcttctttctctaccatcaaaagaaaattcatgactaataatccatacaaataatagtaacattttactcataagaatatacttcatgtgtggcacatgtctcatgtactccatacatacgtgttttttttttttttttgcatatttgatatcttaaacactaaattcacactagattcatgaacgtcaaagattcatttctccctggtgctttctctaccatcaaaagaaaattcatgactagagagatatatacataatttggaaattggaatgacaaatgaaaaacaaacaataaatgaatactttcgtcccaatatttattaggttataaataaattacttgtgacttgtgactaaaggtgtcaacaatcattcttctatccaatcaatatcatcaaactcttcactttactctctctctcactcata

SEQ ID NO: 14589 - DNA, 3000 bp, Unknown
  misc_feature (1)..( 3000): cDNA_ID_1988786_gDNA_ID_2684203_Annot_ID_191281 3000 nt of promoter + ATG
agcgatctggttcgtgactttatgaacgaggaatattctcaagaggtaaggctctcttctctataatctgttccctttaaccccctcataagctatatttttaagttgtgacttgattgattctcattttgcacgtaggctccatttcgacttgtttgtataacgaaatactcaattgcttctaccaacaatatgcgaacctcatggagggaacctatgaggatcaaactacctaagattaaagctgcccccaagcttgtgggattctttgtccaaatcatggttgtttgcgaaaagcccttccatctacagtttccagcgttttcttataattgggactgtgaaggtagcaggttatatcggattaacctcaaaccaaatctctatcaatcatcagagatgatggaggacaacaataatagaccatataaatggcatcacctggtcattgtccaaatcccaactggcatcatcagcgcagaaattgatgaggtgcaattcgaatcccatatccaagttccggagccgggcgacgagataattttgtgtggagttgaacacgttgggttcgttttaaagtagctggtgcggagatcaattcttaagatgatgatggatctgcagatttctaaacacaaggatttgtaccaattttcgttttggaactaaataaattactacccatgtaacctcgtgtcggtttgcttttataatcggtttggtatttttcggtttaattgtgacttgattttatttttttccttttaagagaaccaattttttctttctgctttgtactcgatgtctgccctttttgctcaacaagctttaccagattgtattctggtatttcatcaggctagaaatggagaaagaaaagttggagctgccaaacccacaggagttgtgttctcactggaaatgttacattaaatatcattgcaaaacaactactaatacattgaatctcctttgattttggtccaaagaaaggtgaataacttttgattttggtgcatatgggatgatgacggactgatgagtacccaatatccagtgcccacgtgtcctaattcttatggatcaatcaagggcttaaaagcccataaacattaaacagagggaataaaggaatgctaaaaactaattaagaaaacatcaagtaacaattattatgttttggttgttacttgttacttccaaggataaaggagggattcctatgcttgacttgcactagagctttatttcattgcaaaaaaggttaggtacttgattaagaacccaacctaagttttagtattatacaatcctttttcccatctcattttacatgcttacactttcattaaactattatactcaaggaaactggttgcaggtctataacttgtaaattaaaactgttcgtgttatttattcccatgataaaattgtaagagcgtgtgaatcacgagcttaggagagcgtgtgaatcacgagcttaggagagcgtgtgacatcaatatggggaggggcggctaaagactaacgagtaaaggcataagggggaaattaaggactgttcagagttcagaaatgtttttagtctggaaacgacaatacactttggacaaaaagctaaataacattttaaaagcttcatacaaattaaaaatataatcaaacaaaagctaacgtggccaagatagctaattacttttttggaatcattattagagataatggaaattaagaaatcatacagccaaaacaaaccgtagttattatattcgtaacaaaagatgggggaaaagttaatataaaacaaaccttatactagtatatataatacatggctcataatacattactgctaaatgagcaaaaacaaataaaggtaaagttcttaacggctttgtagagataggaatcattaattttagagaaaaaaaaatcttgaattgtacgtttacctttccagaattacattatttgttggcttttaattgttaatcatttttgttgtgtttttcctccaaattataaaatttaaaaactgtgtcagggaatttaggaatctaatatagttggacgatttcgtattaataaagattttcaaaaaaagagtctgctctaatcgttatttgggggtaaattgattctataaggtagggttagccagagagccttattctgtgttttgggttaaagtgagaccaaataaattaagatatttaaaatgaataattaagagcacttaagacaataattaacccagaaggagaagctggtgtagtggtggttctcatggcgatgttggtttcccaggaaaggtaaaagagacggagacgaaccaaaacaaggaagaaagaagaagatcttacatacgaagatcactctctgattcactctgagagacaaactggtttactttggttctgtttgacaaaaggagacatgcaaaaataaatctctatcccttgtttttcttcttcgcttcatcgattactcaaagaggtttctttctctatctcttatctatttctttctgcatctgtagtctctttgttcgaaaaaaagatgtttaatttctgtcaaatttttctccttttttctttgttcgattattggtgtatctgtcttgtggcgtgcgattgatgtttactgattctgaaaaattcttgctaaaataattcatcttcaagtcaacgactttttgcccaaaagtgatgacgggaacaagaaatttttcttggtcggaaaattactaattttagccaatcgtagcgatctctgcaatcgtgttttggttacccaagatagtacgatcgaatcagttcgtttagagaattaaaaaattactcaaatttagaaacttccaacttctgtttctttctattctgggttttttcacccacttggattattagctttaaaaatctaatctttgagtcatttttgattgttatttaggttgttggttgtgagaataattagcttgttaaggaagacgttatg

SEQ ID NO: 14590 - DNA, 3000 bp, Unknown; identical to SEQ ID NO: 14583
  misc_feature (1)..( 3000): cDNA_ID_2730258_gDNA_ID_2684203_Annot_ID_137251 3000 nt of promoter + ATG

SEQ ID NO: 14591 - DNA, 3000 bp, Unknown; identical to SEQ ID NO: 14582
  misc_feature (1)..( 3000): cDNA_ID_2730254_gDNA_ID_2684203_Annot_ID_137252 3000 nt of promoter + ATG

SEQ ID NO: 14592 - DNA, 3000 bp, Unknown
  misc_feature (1)..( 3000): cDNA_ID_2730237_gDNA_ID_2684203_Annot_ID_137261 3000 nt of promoter + ATG
aaacataacccaggagaaactggacgatgctaaaagtagaatccacctcacacttctgcatgacataaaaaactgatggcagaacttcgttcagcaaatccatggagactgccttggtgtcctctgagttcaaacgcttatggcattctagaacctcaacagcatagccagtaagcaaagcagatacttttgataccaaatcggaatcaacatctccggatactaaaccaaaaacacgactgatttgaagggtctgcaaaaggggcagttttgactggggatccatccgcttagaaaccatggctaagacacacccagctgctgcaccgcggacttgttcagacaatccatcagacaaaatcaattcaaacagcagtggaacaaatgcatcattggcaaccaaaccaatgtcaatccaagatacaaatcttctcatgcaatctaacacagtagcagaaagatcaggatcggaattcttgtacatcgatacaatgtcataccatgctctggctatctgagggacacattgttgcctcattgcatccttgactcgagcagcaacagatatctcttctggtgtccgggggtaatccaagctaatcaactcatcgtccaaggcattcaaaacccgacaaaacatgtcgatcacaacagcacctttgcacaaatgaagcatgaaatcaagaaacaccgaggaccaaatcaaagggtactcataatagatcaaagtagccaaaacctgtgcaagcttgtttttaacaaaaggaggtccttccacaactctaccagcattctcattatcaataacctccaaacaagccattgaaaacactgatttcctcacataactctgctcatccaagctcatagatccatatttaacccttaaaacatcctgaagcgtttgcaaacaccagaactgaacttggacaagcttagaaaaccataacttctcaatacatatactacaaatagaaggagtctctttgatttgctgacaataagtaacagcttgagactttaaagccgaatcaacagcaccagtttcaaagctaattactattgcctgttcaaggtcatccattgtgttaacttaaccccactacaaaaaccctaaaaaccgagatttcaaaatccagtcctggtttgttgcatacaagtcaaacaatgccttgaattagtatcgtcagctagcttctctccttcactgttctcttcccttatcagattttgatgcgaagaagaaaaagacgaaacttttagtgggtttcgcttgagagcttaccagaaagtaaggatcgtggcgattttagcgatcggatttatgagagtgggagatatagtagaaaagggattatggaaaccctagtttgggtttctctttgaattcaaagaatacttttttttggtgagtttctagaaaatttcccttacggatttataaatatgaggaaaattgtgagactggagagaagacggagctgtagggtttttttttttttatacacagatttttattagcttgcagaatattttcccagagaactataaatattattgccagcgaattgaaaattaaccgtcatctgaattcagtaaatcagcccatgggcttgaatctctctcaccttaggccttaggtgttgcatactgatagattaagatagacatgtataaatgttttgtgagttagcaaatataatggtgttttttcactttcttaatctaatgttttataaaacaaattgtcacattaatacatataactaaactacttactgtgaaattattcatggagacaacttctgtagctaagacctctcgatttttattttgtatactacaaactaggtaattgtaagaaaaggtttgttctgtaatggcattgtcgattacctcgtagaagaggttggaatatttccgatgcccgtagcaagatataaaatcacaaattcatttttcagttgttaaagaaaacaattgtggctttttgtgtagaacgacatttcgttatgtgggtggcgagtatggacaaactacccactaagtcttggttaacagcttggaacacaatttcattttctatctataagcaacatatgcaatataatcaaccaaataagagagatcacttattcttttgttctatcatattttgtgtgtctgttttcaaaggttataccgtcacattatccgcttctcacacttgaggcaaattttatgagttagatagcatattgccaaacactccagctatatatatcttttatcttttagattgatctttgtctaatctgcgaaaacagcaagatcatttcaggcttctccatcacagttagaatcattttcaaacggatcgattgaatgagcaatcaaaaacacatttttatcgtctaaggagaaatttccttgcaatactactaattttagtacaaattttgtttacttttaaattatgtaatgttctttaagtttattaaaaaatatcccaaattatatcgaaagaaagacattaataaaagaaatgtattattgtctaattaacatatttcgaaagaaacaaaatactgacttttttaagcgctactgtgtgctttttttacggaaaagttaatcaaataccaaagaacgaaaattttcattgtagtgtgtcatgtgtatctcccatatatatatacgtatacatcgaaaagatccgagggagagtgggcacaaaactctagaagtcagatgcaagtgtgtgtgaaagagaatgtgaaagagtgagggagagagaaacttcctcttcctttctttcatgcttacgacaaaacttcaccgccacctgttttgtctcaaatcttttttccacctttttaattatataatttattaaatgttttagacttatgaaaaatattaatgtatattcgcacgtatgagactacaaatcatataaaacgaaaccctatacatataaactaagagcgagaaagacagctagagagagagagagagatg

SEQ ID NO: 14593 - DNA, 3000 bp, Unknown
  misc_feature (1)..( 3000): cDNA_ID_2730233_gDNA_ID_2684203_Annot_ID_137262 3000 nt of promoter + ATG
agcatattgaatcggaaaattattttgtatttgttttttctgaccttgtcttcctctccttgtctgtccctccttcttacagctattatcccataagtgagcttcatatctccctgtccatctatgcctgtatacacgcacaacataaatatgtgtcgacacaattatacataatctacaaaataaaatgacaaatatacataagtaacataattgtggcattcacatttttcttacgtgtaagtttgagacatcatttaaaccaaaacaaatgtttgagacgtcattatttaataacgtacgtaccttgtaactccacgatactgagaagttctttgtccataactatcaaccgacttccgaggaacggattcctttacctgaggtttaacaaccaatctcttccgcttctcatctaccttaaccggttcttcgacccgtgcggatacattcgattcgttgatcaaatcagaacaagccccatggctcaaagccaatgatagcattgagccattggtgttataaccagtctcttcgttactaaaatgactaatattattgctcgtaccagcctcttcagtaacgtaatgactcgagagtgggaatgctggagtgccttgctctaaccaagatttgaaaaccgagaccgaaccgaccctctcaaaacctccataatcattgctaaggttcggatctaggttcgggtaatgtggtgtaactacggtttggtcgtggagaaggtaaccgggtgggtttaacctgttaaccacagtggtgcagttgacattggtttggttatggtttataggatactcggtttgatgagagtttgagaggagatcttccacctttggaacgtcttcatcatgatgatgatgatcaaagttaatatcatatctccaaactacacataaaatagaaatcaaattaagaatattaatagtggccacaccaacaacatatatataccagggggatgatgtgtgaagaagagagtaccatcggaaccgtcatgcctaagttcttcttcttcactattgcagattctcaaaggaggtgtcaatgaaaatcccaaccatttcttcatctctctctctctctctagctgtctttctcgctcttagtttatatgtatagggtttcgttttatatgatttgtagtctcatacgtgcgaatatacattaatatttttcataagtctaaaacatttaataaattatataattaaaaaggtggaaaaaagatttgagacaaaacaggtggcggtgaagttttgtcgtaagcatgaaagaaaggaagaggaagtttctctctccctcactctttcacattctctttcacacacacttgcatctgacttctagagttttgtgcccactctccctcggatcttttcgatgtatacgtatatatatatgggagatacacatgacacactacaatgaaaattttcgttctttggtatttgattaacttttccgtaaaaaaagcacacagtagcgcttaaaaaagtcagtattttgtttctttcgaaatatgttaattagacaataatacatttcttttattaatgtctttctttcgatataatttgggatattttttaataaacttaaagaacattacataatttaaaagtaaacaaaatttgtactaaaattagtagtattgcaaggaaatttctccttagacgataaaaatgtgtttttgattgctcattcaatcgatccgtttgaaaatgattctaactgtgatggagaagcctgaaatgatcttgctgttttcgcagattagacaaagatcaatctaaaagataaaagatatatatagctggagtgtttggcaatatgctatctaactcataaaatttgcctcaagtgtgagaagcggataatgtgacggtataacctttgaaaacagacacacaaaatatgatagaacaaaagaataagtgatctctcttatttggttgattatattgcatatgttgcttatagatagaaaatgaaattgtgttccaagctgttaaccaagacttagtgggtagtttgtccatactcgccacccacataacgaaatgtcgttctacacaaaaagccacaattgttttctttaacaactgaaaaatgaatttgtgattttatatcttgctacgggcatcggaaatattccaacctcttctacgaggtaatcgacaatgccattacagaacaaaccttttcttacaattacctagtttgtagtatacaaaataaaaatcgagaggtcttagctacagaagttgtctccatgaataatttcacagtaagtagtttagttatatgtattaatgtgacaatttgttttataaaacattagattaagaaagtgaaaaaacaccattatatttgctaactcacaaaacatttatacatgtctatcttaatctatcagtatgcaacacctaaggcctaaggtgagagagattcaagcccatgggctgatttactgaattcagatgacggttaattttcaattcgctggcaataatatttatagttctctgggaaaatattctgcaagctaataaaaatctgtgtataaaaaaaaaaaaaccctacagctccgtcttctctccagtctcacaattttcctcatatttataaatccgtaagggaaattttctagaaactcaccaaaaaaaagtattctttgaattcaaagagaaacccaaactagggtttccataatcccttttctactatatctcccactctcataaatccgatcgctaaaatcgccacgatccttactttctggtaagctctcaagcgaaacccactaaaagtttcgtctttttcttcttcgcatcaaaatctgataagggaagagaacagtgaaggagagaagctagctgacgatactaattcaaggcattgtttgacttgtatgcaacaaaccaggactggattttgaaatctcggtttttagggtttttgtagtggggttaagttaacaca

SEQ ID NO: 14594 - DNA, 3000 bp, Unknown
  misc_feature (1)..( 3000): cDNA_ID_2730229_gDNA_ID_2684203_Annot_ID_137263 3000 nt of promoter + ATG
tgcaacctgtctttcaatgcttttgtactttttgcaacttcagttgttgactgtaattctctgccctaattgaaactgctctgtatttactctttactgaccattggtaaccttctccgtaatgtagacactggatgttcttctaagggtgctaattgaatttccaaaggtcgagcctttgcggagtaaggtatgagtttagttgtattttattaagtagacatattgtaatcagtagtgttgcatattcttttccattaagttattgattcacaggtcagtgattagcttgttccccttttctgtaggtcacatcattcatacaccgtatggttgatacccttggatccgctgtgttcccttatcttcccaaggctttggaacagctacttgctgacagtgaggtaaaacgaaaatttcaaacctccccttattattcaatgctccactgctttcatttcctttaattaatattaagttgatctcctacgattcacttacttacctgggagtaatatctactaatcaagatacgtcatttcgggcaatgatgctgcacactaatttgattacttcttcaacaaaaagtcttactgtgtatgtgtattgttgcagccaaaggaaatggttggtttcatggtattactcaatcagcttatctgcaaattcaacagcgctctccatgatatactggaagaagtatatcccgtggttgctgttaggattttcaatgtaattccaagagatgggctcccttcacgccctggggctgttactgaggtatttcgtttgattttctttcttaactcaattttatgatctgcaattgtaacttgagaacctgctgatatcgtagcatcctttacatccagtcatatatccttttttttttggtgtaggaaatgagggaactgatagagcttcaaaggatgctgtatacatttcttcatgttatagccacacacgatctttcttctgtatttcttacgccgaaaagtagggcgtatctagatcctatgatgcagctggttttgaatacttcttgtaatcacaaggatattaccgtacgtaaggtttgtaacactttccctttggttgcatattcatttaattttgatgatctttttcgcttacttattatccacttgttttactctttgccataaaaataggcgtgcgtgcagatatttataaagcttattaaagattggtgtgccgagccatatagcgaggagaaggtaggcttgttaaataatttttattaaccttcttttcttcatgaaagaaggacaaatgtcataatcaagaactatttttgctttcaggttccaggttttcagaatttcgtgatcgaagcgtttgcaacaaactgttgtttgtacagtgtgctagataaatccttcaatttcagtgatgcaaatacggtaagcttaagaaacttcaattctcttttcattttggagttttatctgtccgttgcagttgtataaacttctgaattgtttccacaactgactgggtttcttccttcgctatgcatcgcagcacgcattgttcggggaaatcatcacggctcagaaagtaatgtatgaaaaatttggtaatacgtttctcatgcatcttatgtcgaaaagtttcccatcagcacatattccacaagatttggcggagcagtattgccaaaagttgcaggtttgttaagttttactccctcaaaacgaccataagtagataaaaaattatctcgtcttgtgcttaaacatagtctctcctttccgtgtttggtattccagggcaatgatatccgaagcctcaagtcatactaccagtcccttatagaaaatctccggcttcaacaaaacgggagtcacgttttcagatagcattcgaaatacagctagtttcatagaaagaaaggtctctcaggtcaattccgctacgagctctaatggttttaccaagaaagctctcttcctcaatttttgtacatgacaggtttgaagtcatgtgcttaatataatgttcatctctttacaggcttctccagatgtaaatagtatttgtcaatgtctacttgagaggtggcaacaaggttcgctttcaccatccagatcaaattagatcaaaagcttgagagagattcatactgttgttgatgttggttcttctcaaatctgcagttgtatcttcttacacataatcatgttctccgactcgaaccaagggccttacaagttgttccagtgcacacacacactctgaggcagatcagctgttatttcttattgcgctttgttgtgagattgtgtctataaagcccttccttttttggtcctatctccaagttttgatggtcttataactctctgcagtcgatgttttctgtttttctttgtccatgaaaatactttagaaaaaaactatgagagatcataaaagacagacacacaaaacaattttggctgaattttgttttcctattttattcatttaattaatatgaaattgtattatttttcgatattgaggtctcctcttattttctaacttattttgagacaccaaacacagattgttcttttgacaattgaagtggcaaagaaaataaaaagaggttaaaaaaaactaagataaaagagatcgaaacaatgaatttgttatatttcgggatggcattgatagataatttaatattttgtgtaaactacgtatttttacccaaaaaatctgaaatctatatgtttttaagtgttaaaaagtgtcatatccgtaaaattttaataaaaatagcaatttccaaaattttatatgaaaaatagcaaaatcaacaataacccttaaaaaataaaagagggttatatttatatattgtaacggtgaaaaatcgtcatctacttcttcttgaaaccctagttccaaaatctgcacacacactcagaagaagaagacgtcatctctctatctctgtctttctgctaatttcacgaagaatctgagaat

SEQ ID NO: 14595 - DNA, 3000 bp, Unknown; identical to SEQ ID NO: 14581
  misc_feature (1)..( 3000): cDNA_ID_2730221_gDNA_ID_2684203_Annot_ID_137265 3000 nt of promoter + ATG

SEQ ID NO: 14596 - DNA, 2683 bp, Unknown
  misc_feature (1)..( 2683): cDNA_ID_3034789_gDNA_ID_2684204_Annot_ID_137266 3000 nt of promoter + ATG
gaattctttgcaccagcaacatctgatcagaagtaaacattcaccacacagttcatcaattacagaaaaattaaaaagcaacatgttacagactgccgctagggaactttctctttcacattctttcgctaaacatactaaaagccaatcatgaacacaactagtatgtcctaggaggaaaatcaggaaagaatcaatactgagtaaatataacaaaaagtattgtgaccgcaagtaaccaccttccagagacaactaatgtggcatattaagagatgcgagttcatatgattgtaaaacattgagttcatcagattgttatttaccatttgatgcatgacgagaagagaaattcatccgaccacccctgctaccacggccccctccaccagatctccattgtgattcagcagaatccttgttgttgatgttctgtaccatttcaataacattgtcaatacccatgtcccaaatatatgcggtttaatagacatcctttacacagaaacccatgaagagaccaaaagaactgcaaaaaccccatacctctttcctcttatcacgcttttttttaacctcatggaatggatctgcagagtcataaacaattttttgcattagcacataagattgtatagaaaaacacaacaaaaaaaaacttaaaacatatcctagcaaccatctctaaattacatggtacacaagcaggttacatgaagcactcgaaaagcctgatgcaataccacatctccaaagaatcctattttcataacaatttgttttggtaagatgatgaaaatgtggatttctaagcactagattcatctacaacgcagcagtctttgtttagaactcatacctagcaaaagtattattcctagacaaaccactcagaaaaattctagttagaagctaattctctttgtttcacacatcactagtgtaagtaattgattcccgtatattccaaatcaattcgtgaacctttttttgtgaaaaggaggttacaacacaatatcacataaacaactagagacagcttaaaacttaataggcgaagaaaccgatgatagtgaattcagataaaatctgaaaaaaaaaaatcaaagagcagagaaatcagatgctaaaacctaagttacaggagaaaaccccaaatcgaaaaatacaatctcgatccaatcaaagaagagaaattaggtaaagaaaaaagtgcagagaaggtcgagattataccctgaagaagtaagcgttgagcggtctcatcaggatccatgttacattcatgaagcattgcgataatctcatcctcgctatagttcccagcagtggtctccttaatgttctgaatcatcttccgagtagtagccgaaatcgaaaccctagcgccactgccgaccatcctctcttctatcaaacgtaaaatctcgcttctgatattttaacaggaatcgaaatctggacctagaccaaaagaggtctgagtacctatatatgtatacgaagaggcgagtgataaatcagtacgagaggatgggatttgaaactagtttgggtcgacgaaggagaagaagaaagaagaaggaacaagaaaaaaaaaaaaaaaagaggaagggggcgagagaaaggaatgagcaaaataatacgcactgtgattttggaagcgtagggctctcttttcttttttcaattttgttttgcattcctttgtagctttttaatattgagtttttttgtttgttttaatctgaatctttggtaaataatgataaccaaattgttgtcacaatctttttttgtccacaaatatatttaaattaggatttaggatatcttctgaatatttacactacataataatgacaaacataaaacatagtatttaagaaaataagaagaagataagttttgattgtaacttgatcatattaaatctcaactatctcaaacgatgttacccatatcattatgagatgagcgatttaatgattagcatattattatttatatttttacatctcagtaacgtattattgttttctatgtaaatatttaaattatcaaataattataatacgttattattatccccaccatgataattacatatatatttaatttactgaataagtttattttttttgtctttggtaatttcttttacaataccaaattaaaatattttaaaaattggatttcaaaaacataatgagttatatggttgtccaaatatttaccaggtccagtacgcttttagcattattaatagcaattagcaactctagggattgtcatttacataaacaaatcttcaattttttcattaattttcctgtgttttgggtccctattgcttctaaattctaataaaccgtccagatattgctgttatggaaacaatttttcaataaatctcatcaactgattctatcaaaatctaatcactaggctttttcccattagcattagcgcataacaaagttttgaatattaatatcattatccataggcagcttagattttttttccttagcatcaaattaaactcaaaaccgaaccaaaccgtaaatccacaaactaattttggttcgaatttaaaaacattatcttttaattttgtcatgccccctctgctaagtgcaaccattcgtcttctcgcttcatcgttttctcttttccgatg

SEQ ID NO: 14597 - DNA, 3000 bp, Unknown
  misc_feature (1)..( 3000): cDNA_ID_2995037_gDNA_ID_2684204_Annot_ID_137267 3000 nt of promoter + ATG
tgcaagacactgctcatgtctttttcctttttcttttcctcagttatgaagatctaagaagcaggatattttccaaacaccctcaacttttccctaaagaggtaactggtatacgcccattttgctacagcttactatttggacatgtaataagatgcacttctgtaattacaactagtgttggttctattttattatctgagcttaaatttgttttgtccacatgtatatgagtgtgctatttcttggttgcaggttttcaatgatgagacatttaagtggtcttttggaatcctattctcacggttggtaagaactactgtatcataagcaatcattatcttgataattgatgtaaatctagatgtcttgaatttgaaacaacagacttgttctttaatcttagcatgactttctgcataatatagctgtctccaacaatttattgtttgaacaatgaccactcacaaccaaaatattgcattatttcgtttctctttccttccgtgtgctgcgtgcttgtctctgcaattcagacttaagcttctctaacacaggtgcggttgccttctatggatggaagatttgccttagttccatgggcagatatgcttaatcataattgtgaggtacttctacttatctttatgaccaattagctcctagattctcctaatcagaaagcatgattgacttatggtaatcaatatttcaaaatctgcttggaaaggttgagacgttcctggattatgataaatcttcaaaaggagttgtctttacaacagatcgaccatatcaaccaggtgagcaggtaaataagataaattcattcagataacctgagcgagcattgaagtttaatataagtcagtgtataacacaaagaagtcccgtttacacagtttgccttttagcgcttcagtaagtcagtccaaagtggaaccaatgttgtctgaagtctctgatatgtttcagtaacatgacattgtgcaggttttcatatcctatgggaataaatctaacggagagctattgttatcttatgggtttgttcccagagaaggaaccaatcctagtgattcagtagaactagcattatcacttaggaaaaacgataagtgttacgaggaaaagctggatgctttaaagaaacacggattatcgacgtattccattctccaccatccatgttcccctctcaaatttgtagatctctcttgattaacttgagttttgttttgattgtttgtgttaacttttctctggcagacctcaatgctttcccgtaaggataacgggttggccaatggagctaatggcatatgcttatcttgtggtgagccctccagatatgagaaacaactttgaagaggtttggcaactccatcttgaccctttttaccatccaattcttcccaaattcataatacatctcttatcaattattatccatttcagatggcgaaagctgcttcaaataagacatcaacaaagaatgatctaaaatatcctgaaatcgaggaagacgcattgcagttcatactggactcatgcgaaacaagcatatcaaagtacagccgatttctaaaggtaagtaacaaaacagctcatctctctctctttgtgggaaaattttcactccatctgcttatagtttgctttgtcaattatctaattgtaggaaagtggatcaatggatttggacataacatctccaaaacagttgaaccgaaaagcgtttctgaaacagctagctgtagacttgtccactagtgagcgcaggatactgtaccgtgctcaatacgtaaggaacaactttctagccaatacgatagataagagtctgtggatcgatccatgatattgtggaatctgtgtttttttttttgttttgtttgggtcagattctgaggaggagactgagagatatcagaagtggtgagctgaaggctctacggctcttcagtggacttaggaacttcttcaagtgaatgttgaatgaggacatttcaacagctttaagatggatcaaaggtaggcctcgttgtgcttcaaccaaaaatgtagttttttattacaaaaaaattgaacgttggtgtaggcatggttggatctgtctcactcgtataggaatatattggtccagccatatatgtaatttgatcattttctataaactcaaaacctgaacctaaattgattaattaaggaaacgcatgagagagtaagggtagaaacatgttcttcgtatttgatccgaatcgaactgaaataatcgatccaacaaacaaagataatttgaaaattaagaatatatctgactacaactcataacgaaaaccgtaccaaaactcacactccttgttaccgcaaacaagataatctgatggtacacgtcagaacatttgtttctttagcaaagcaagtaaacattccactgtggcaaagtaaaaaacgagaaacctataaagtcttcctaatgaaacgtactgattttatggagtttccattttcgacataatatgacgtggcaatatctaaatggtttaaagatgttttatctccaatgatataacgccacgtaagcccgctgaccaaataacccaaagagtaagcaagcgacgtcgtttatagtttgatgatcttgtcgggtaacgaaactgccccttgagtcaaaacaggcttcttcgtgtccgattctgaacgagctcgctctttctcatccaattctctccaccgtcttctactccgatcaatcttcaaattttcttaacactcatcgaccagatcgagtttccatcgatctaatcaatcaatcatcagatttgatcttctcaagaaggtaaatccctctcactctctgtgtcaaacctaatcacctcgtaggaatcgaaattggaacaattcaatttggtttggtttggaatctctagtcgattcttcttctaaacgattgaattgcgttttgtgctttgatataattcgaaattattgtggcag

SEQ ID NO: 14598 - DNA, 3000 bp, Unknown; identical to SEQ ID NO: 9943
  misc_feature (1)..( 3000): cDNA_ID_2186609_gDNA_ID_2684204_Annot_ID_137268 3000 nt of promoter + ATG

SEQ ID NO: 14599 - DNA, 3000 bp, Unknown; identical to SEQ ID NO: 9936
  misc_feature (1)..( 3000): cDNA_ID_2730397_gDNA_ID_2684204_Annot_ID_137269 3000 nt of promoter + ATG

SEQ ID NO: 14600 - DNA, 3000 bp, Unknown; identical to SEQ ID NO: 9935
  misc_feature (1)..( 3000): cDNA_ID_2730390_gDNA_ID_2684204_Annot_ID_137271 3000 nt of promoter + ATG

SEQ ID NO: 14601 - DNA, 3000 bp, Unknown; identical to SEQ ID NO: 9939
  misc_feature (1)..( 3000): cDNA_ID_2186625_gDNA_ID_2684204_Annot_ID_137273 3000 nt of promoter + ATG

SEQ ID NO: 14602 - DNA, 3000 bp, Unknown; identical to SEQ ID NO: 9938
  misc_feature (1)..( 3000): cDNA_ID_2730381_gDNA_ID_2684204_Annot_ID_137276 3000 nt of promoter + ATG

SEQ ID NO: 14603 - DNA, 3000 bp, Unknown
  misc_feature (1)..( 3000): cDNA_ID_2996092_gDNA_ID_2684204_Annot_ID_137277 3000 nt of promoter + ATG
tttggtgtggttcaaatttctttcaagaaacctctgtctttctaattatattgatatcatttttgtggtgtttgtggccagtttcctcggtacttgagctttgttaaaggtgttgtggactcgcatgatctcccacttaatgtatcacgtgagattcttcaagaaagtcgcatagtaagcgctcatatccaattcgtatgcaaagcctttatgatatatgttttgttttaagtgcaatgctatgttaagcttacgattttgtattgtgtctccaaggtgcggatcatgaagaaacgtctagtgaggaaggcttttgatatgattttgggtatatccttgagtgaaaacagagaagtatgtttcataactcttgttcccctaagcttacagtttaaccttttttaattccctttagaaatcactgctacgttctggtgatgattttcctgacgaatgagaatggcattgttaacctatacaggactatgagaagttttgggataattttggcaaacacttgaaattagggtgcatcgaagaccgtgaaaaccacaagcgtatagctccactgcttcgatttttctcctcccagagtgagaatgacatgatcagcttggatgagtatgttgagaacatgaaacctgaacagaaagccatatacttcattgcttctgacagcattacaagtgctaagaatgcacctttcctcgaaaagatgctggagaaaggacttgaagtatgtgttgttcttctgaatggggcctcgttttgttcttccttgcaaatattcctattaactcagaggtgattgacatgtatttctttgtattgtgaacgtaggtactatatttggtagagcctattgatgaagttgccgtacagagtttaaaagcttataaggagaaggattttgtagatatcagcaaggaagacttggatctaggcaagtgcctgatgtaattccttgatttagcatgtcaggtaatcacttatgtataataacaaattctggctttgatctttgtattgacaggagacaagaacgaggagaaagaggcagcagtgaaaaaagagtttggacagacttgtgactggataaagaaacgattgggtgacaaggttgccagtgttcaaatttccaaccgtcttagttcttccccctgtgttcttgtatctggtaaatttggttggtcagccaatatggagaggtaagatctgacctttttcttaagcaaggatttccgttctccttttttgcccctggtgaactaacacagaatatgttatctggacaggctaatgaaggcacaatcaactggtgacacaataagcctcgactacatgaaagggagaagagtgtttgagatcaatcccgaccactcaattatcaagaacataaatgtgaagtcaccattcatcataacttgtacctggctattataattaaatctaggagccgctttttgagcttggcttgtttttttcttgcaccctgcaggctgcttacaatagtaacccaaatgacgaagatgcaatgagagccatagatcttatgtatgacgcagcactagtttctagtgggttcacggtgagtcctattctacattaacattcttaactttttgttgtctctagaattgaaataaagtaaatactggtaaaacttaattgttgtttctcaaaactacagcccgataatccagcagagctgggtgggaagatatatgagatgatggatgtagctctttccgggaaatggtcaagccctgaggtgcagccgcagcaacagcagatggcacattctcacgatgcagagacgtttgaagctgaagtggttgaaccagtcgaagtggatgggaagaaatgaacacaagcctaatgttttatgtccctgctacgattctcatcatattcttcttcttttattagtagtagcagtaaaagtagaaccccaaaactcagaacaataggcaatgagcgaatgataatctctatttatgttggagagattaataattgattgagcttgtttttgttccagtttgtgttgatcctcctcggtataattttaataaccgttaagaaaaattcagttggggtgtttttggaaagatttttcgagttttatctaacaaaactaaaattttgggacatatggtaatttttaattaaatagagggatgttgttatcgtacgaattgggttggtttaaaactttgtttggacagattcgactcaaacgttgaacgcgtttaaaaaagtcaacaaaagtcgaaggttaccggctggtcaggttaaccgttagagattaatgaactggcagctgtatgtcttttttatagttctgtcttaacaggcaaaaaagtgtttaatttatctttcctttgggtttctcacggagtcacggttcctcgttcgtcctctcccgtcgtctctccggtgagtccttaattttccggcggtctttttccctttctcgtctgtttggtgctttctttatgtctgaggcgaatacagcaaaacgtatctgttttggttgttgagttcgaggctggtcctgaaaattcggtgacaaaaagagtcaataactctcgtgatcgagttggatgcgttgttttgagggttgattcagtttatgactatgtattttggtacttgcaagattttctgattttatgaagattcgtgtttgacttttatagcgtataatctacggggcaaacagattcgagcaacttgtttttttctagcgcttgttttgtgtttactctgtcatgtgtttgtattttttgagcttccactagtgattaatcatctcagctcaatttgaacataggagatgtagtttttatctgtcggtggatttctagggattttgcaaaatgttttgggctttcctgaattagtatgtgatttggtcgtaaagtattttagggatttatgtgttccttggggtgaatctgacattgacattatcttggtgtctgcagcactaaattg

SEQ ID NO: 14604 - DNA, 3000 bp, Unknown; identical to SEQ ID NO: 9937
  misc_feature (1)..( 3000): cDNA_ID_3433655_gDNA_ID_2684204_Annot_ID_137280 3000 nt of promoter + ATG

SEQ ID NO: 14605 - DNA, 2683 bp, Unknown; identical to SEQ ID NO: 14596
  misc_feature (1)..( 2683): cDNA_ID_3034805_gDNA_ID_2684204_Annot_ID_191329 3000 nt of promoter + ATG

SEQ ID NO: 14606 - DNA, 3000 bp, Unknown
  misc_feature (1)..( 3000): cDNA_ID_2113870_gDNA_ID_2684204_Annot_ID_137281 3000 nt of promoter + ATG
aacaaaaaaaaaaaaacaaaaaaaaaaacataagaaaaaaattaaaataaaataaaataatgggttcatattttggaatttctacaattttcgtgatatgtttgctgggattttcagccaatgctcatgaggtgcttagacttacgtcttctccaggttctgatattacgcaggtcagttctattacttttcatttcttgatcccgaagcaatctataaagcctgtacatcatgactatgttttcttaacttactcgttacggtttcattgcattatgcaggcgcttctgagagcattcacaacggcatgccaatctccgacaccgaggaaggtggtgatcccaaaaggacagttcaagcttggtgagatcatgatgtcgggtccatgcaaatctccagtcgagatcaccttgctaggcactgtcctcgctgacggaaactcgatccatggaaaagaaaaatgggtcgtgttccaaagaatggatgggttcaggttgaacggaggtggaactttcgacggtgaaggtaacgcagcttggagggtcaataactgtcacaagactttcgagtgcaagaaacttcccatcgtaagtttttctttaagttagcatttgtttctaagttaggccacacaaaatatagcaattgtaattttcttttgttctatttttacagagtataaggtttgatttcgtgacgaacgctgagatcagagacatatcctcaatcgatgccaagaactttcacatcaacgtgattggcgccaagaacatgacctttgacaacgtcaagatcatggctccagcagagagccccaacactgacgggatccacttgggaagaagtgtcggggtctccattatcaactctaggatctccaccggagatgactgtgtctctgtcggggacgggatggtgaatcttctagttaagaacgtcgtgtgtggtcctggacacgggatcagtgttggaagccttggaaggtacggacatgaacaggacgtcagcggcattagggtcatcaattgcaccctccaggagactgacaatggcctcaggatcaagacttggccctctgcagcttgctccaccactgcctccaatattcattttgagaatatcatccttagaaacgttagtaacccaatcctcatcgaccaagagtactgtccttggaaccagtgcaacaagcaggtatatatatatccttatcatgaatattggatacagagtctcgcttaatttagccactttcaccatatgattagtatatgaaaaatatgattaaaacttcgtaacgtgtgtttcaattcacagaaatcatcatccattaagctggcaaacataagcttcaggaggattagagggacatcagggaacaaagacgcagtgaagctattgtgcagcaagggatatccgtgtgagaacgttcaggttggagacattaatattcagtacactggagccgatggtccagccaccttcatgtgctcaaacgtaaggcctaagctagttggaactcagttcccaaaggcttgtaacacaccacccgtgctgacccaacctaagtaaaatgtagaaagttctcataacatttaggaatttctcatccattttttcttcaatcttagtttttcccaatgtcacacaagggagatttcttttatttaaaaactgtaaaagaattttgtttcactttttatttgtttgatgccaacacaaatacatagatgtgtgtgcgcatatatgaatgcaataaaactaaaaagatgcaggttattttattttatttgtattttaatatcgtttgttatcaaaatcctttttttttctttttccaatcaatttcttgaaataacttgattagaaaaaaaattaacttcaaaaatataaatcacgtgtaattcaagttattatatgctttgagatttgcgtgttcatggaccatccgtttttcgtgctaaaaaggtagtgagtctgacacaacgaacaaaaaaggacgagtgcctccgagaaaacgttttcaaagctcgagcataggacgctagacgtgtgacgataaagaattaaagactaaaggacaaagttaccgtagacggtagaagttataaaaaaaaaaaccttaaactgggggcatcacttgaatctagcagccatgttgttgtactttcagactgaaagtttcagtggataaacacatcaccatgcatgtatgggtttaatgaaaaaaataaaataaaattaaagtggtattattgtgtaacatcagtgatcactgatcagtacgtgaaccggtggaatataatatactccagctagtagcatatatgcttcgattaattaagaaaataaaaaatcaaattaccttatttgactaaaaataataatcaatttgtttgattttcaattaaaagtgtaaatatgcacgaatgacttccattttcatgtaaacaaaaatatatgtgtataatgaaatgaatggtataattaacgaacaaacttaagagttttacgttttgattttaccaaagaatattcaacacctaaattttttaaaaatatatacttctaatttttataaagataaatataaagacgggatggtgaaaaaatttaacaagggattccaggccaatagtcgaattttatactatcgttgttttgtgtaccgaccaaactattaacatgaccatatttaggcaaaattagactttatatatatagaaattctctttgaatgaaaatgtcccttttagatactttttagttttcatccttagttcaagatacaaaattagacatcagacttcctgatgggtcaaacgacctaaaaaatgagaggtggtgagaaattttcaaaaaatagacttcaacatctctcctccatccaacgcactatataaaggtaaacctgagcttaatcaaattccagaaaacaaaaaatagaataacaaatagtaatattagtagtaatttttttatttttttggggaaaaaatg

SEQ ID NO: 14607 - DNA, 3000 bp, Unknown
  misc_feature (1)..( 3000): cDNA_ID_2730369_gDNA_ID_2684204_Annot_ID_137282 3000 nt of promoter + ATG
aattttttcaaataaaaaactcagtttacagaagctgagttgaaaaaaactcagtttattcaaataaaaaaactcaactttctgtatgcatcttaaagcttaaaaatatagaaagttgaattagaccaatacagaagctttaatacattagtttttaaggaatgaaatgatacatttggaaaagtacatatatatatatatatatatatatatatacgataacatattacggctaaaaattatacgaatgttataaacatgagtggaacaagtcttttctctaagaatgaaacgctaatttatcaaaaatagacctacttccttaaaaatggggcaatcaacaaaaatttaaacgttgagagaaaattgtgcttcaaaatatctctattcaagatactatatagagcagcagatgcttagttaaatcctcagaaaaccaaaaaataaataaataaaaaatagaataataaaaataaaaataataataaatgggttcatatttaggaatttctgcagttcttttcgtaatatctttgctgggattttcagccaatgctgaggtgttcaacgttggtggttctccaggttctgatattactcaggttagttctatgacttttcatttcttgtttcccaagacatcacaacctttggctaactcgttgaagtttcattgcaggcacttctgaaagcattcacatcagcatgccaagctccgacagcgagcaaggtggtgatcacaaagggtgagttcaagcttggtgagatcgagatgacgggcccatgcaaagctccagtcgagatcaacctccaaggtactctcaaagctgatggaaaagctatccaggggaaggaaagatgggtcgtcttcctaagaattaatggctttaagttaaacggaggtggaatcttcgacggtgaaggcaatgcagcttggagagtcaataactgtcacaagactttcgagtgcaagaaacttcccatcgtaagtttttctgttcttaatagcctttaagcagatttgtaaaccaaaattaaaccattgaagattttgagttatgtatttgtatttgttgttgcaaagtataaggtttgatttcgtggagaatgctgagattagagacatatcctcgatagatgctaagaacttccacataaacgttctcggcgccaagaacatgacctttgataacgtcaaggtcatcgctccggcagagagccccaacactgacggtatccatttgggaagaagtgaaggagtcaagatcctcaactctaagatagccaccggagatgactgcatctctgttggggatgggatgaagaacctccacgtcgagaacgttatgtgcggtcctggacacggaatcagtgtcgggagtcttggaaggtacgtgcatgagcaagatgtcacaggcattactgtcgtgaactgcacccttcagggaactgacaatgggctaaggatcaagacatggccatctgcggcttgcgccaccaccgcctctggtattcattttgagaacatcatccttaacaacgttagcaacccaatcctcattgaccaggagtactgcccttggaaccagtgcaacaagcaggtatatatatctttatcattcattttgacaagcagacatgttattctgatggtttcatatttcttgaggatttgccatgttagtatatgaattctgtccactacaactcaatgttggcaaactatggacgttttaaatgtcacttaattacctcataatatatgattctgattctcaaagggtgtttttttattaattaccagaaaccatcgacgattaagctggtggacataagcttcaagaatattagaggaacatcagggaacaaggacgcagtgaagctattgtgcagcaaggcgcatccatgtgcgaatgttgagattggaaacattaaccttgagtacaagggagccgatggtccaccgactttcatgtgctcaaacgtttcccctaagcttgtgggaactcagaacccgaaggcttgtagcgccggacccactcccaagacagctgctaagggagacttgtaggaacttatattttttgaaaatcacataagggagacttttaaaaagctgtactgtaaaaaaattgtttctctttttttgtttgcttgatcgatgccaacacattttatatatagatgtgtgtgtgtgcataagaatgtaataaaactaaaaaaattatatatcttattctacatttgcttatttaattttaatatatcgaactcaaaacaattttggcaatgaagaatgtttcaatctcatttcgatgtgagcttttcatcacatgtcccccaagacgattttcttttccagtcattatcttgatgatatgtatccagtataggactaatttcggaccgtgtcgatttcagtttgtatcatttggaaaaatcttatatgtggaatcgatttcgtctggggtgggggcagcctgtgttccaatgtgtgatcgcaaggacggaggcataatttgtagtatttctttttaaaattccatattgaaatctaaaaattcaggtaatatttcatatgatttaagaatgtttttaaaatttatacgaagaaatcctaaagcataagttcgaacacttataaataataattcgttgtattttaagaagatatttaaaattctataacccacgtacataatatcttttttgttaacgtttctagtaaagatcttctaaataaacttgttcaaaatacgagacgtgtaattaataaaatacaaaacacgtgtaattaatttaaagttcggcatcgattaatttgtgggttcgaacaacctaaaaaacgagacgtggagaggaaaatggtgcttcaacatctctctatccaaggcactatataaagcagcatatattttagttgaaatcttagaaaacaaacaaaaaaaaaaaaacaaaaaaaaaaacataagaaaaaaattaaaataaaataaaataatg

SEQ ID NO: 14608 - DNA, 3000 bp, Unknown
  misc_feature (1)..( 3000): cDNA_ID_2730365_gDNA_ID_2684204_Annot_ID_137283 3000 nt of promoter + ATG
tgactgcgtttccattggagatggtaccgaaaatctcattgttgagaacgtagaatgtggaccaggacacggaatttccattggaagtcttggaagataccctaatgagcaaccagtaaaaggagtcaccgtgaggaaatgcctcatcaagaacactgacaatggtgttcgcatcaagacatggccaggatctccccccggcatcgcctccaacattcttttcgaagatatcacaatggacaatgttagccttcccgttctcatcgaccaagagtactgtccttatggccactgcaaagctggggtatgtaaccgaatcgaatctaatacataaaatacatattttggtttgtttgatagtatatgtatcaatcaagttgttaaatctcactccaattaatttacatgaaggtaccatcgcaagtgaagttgtcagacgtgactatcaagggcattaagggtacatcagcaacaaaggtggctgtgaagctaatgtgcagcaaaggagtgccttgcaccaatattgctctctctgacatcaacttggtccacaacggcaaagagggaccagctgtctcggcatgttctaacatcaagcctattctcagcggaaagttggttccagcggcttgcactgaagttgctaaaccgggtccataaattaaagtcgcttgtccaccataaatccatccaatctggtgaagacgctttgattagggtgcgatgaaaaaattttgcaatatttttttgacatataaattatatggatattttatagataagacggagtccattcaggattggagtttataacctgaagagtgactcgtgaattgggtagtaattgttgtgtggattcgcatttatgcgagaatgttttaataattattcgaaaagtaataatatcattgaaattttgaagttttatttttttttgcaccatttagaaataattagtcaataattagtccccaaatgcactaaacccatttaagctagttacaagttttaaacacttctcactaaaactcaattgtcttacactagggtcaaaaagatgctcaaggtttcttattatacaggtatcttattgattgatggtttcttgaaagctacaaagttcttactgttttgttcttacatacggtcttgcctacaactagttaccctaaaaagttacactactttatggaaacgtgtttattgatttcttcgtttcacattttggttagctttttgtagaaactccacaatagtaaatgcactaaacccatttaagctagttacaagttttaaacacttctcactaaaactcaattgtcatacactagggtcaaaaagatgctcctatcttttgcttttatacaattccattttatattcagttttatttcataaataaggatatgtttttcatgaaatacaaatccataataatttatacaattattatcagtttaggaataataaacatgaagttaattgtattcgctaaagttttgaaataaagccaaattcataccgctaataattaacatgattcatattgatccatcgctaaccaaactaatccaaacacttatgaatgatatgcacagaaacatagagatatacacataagcgaaacatacataatgtgctaagttcctaacaaaaacgttaatctctccaaaaatattcgtaacgattaattcagcgaaagagtcatcataaattaaaagatctgtgtgtcacgtcgagggtagcagtgtcaccgcgtcactaggcatctcttgtataggagaatttgttttgcaattattcacctgtaaataggagaatttgttttgcaaatgttagaagaatttttaaatgttttggtgaataatacttgtataggacattgtctttgttaggttccaacataaaaaatatgatgaaagaaccaacactgatataaaaacgacatgaatctctctatttattgtgaatttgtttaaaattgaaacacttttaactttgggtcacactgatgacgctcttttcatcttcttgctgattggtggacattcctttatcagcgatcgatcacatattgcgttccaaactattctaagttttaatgatatccaaatgctatatataaatttttatattaatttatgaaaacataattattcgtatttatctgaagtttacatttttaaataatgaacctttcaacttttcctagttacacatttcatacaaagtatacgcacaaaaatagatatactttctatttgcatctagaatctgcatatacagtttgcggtaaagtacaaatccgttgtgtgtgactgtgttcataagaaatacacactaattacatgtaaacacaatgtaaatacaatctaacaaactcatggttaattttgttcgtaagtaaggttcactttccaaaaatgtgtgtatcttagcctgatcgatataatgtatacccaacatcatgcattatcaacattagttttttttttttgaatgaatgttaaattttttcaaataaaaaactcagtttacagaagctgagttgaaaaaaactcagtttattcaaataaaaaaactcaactttctgtatgcatcttaaagcttaaaaatatagaaagttgaattagaccaatacagaagctttaatacattagtttttaaggaatgaaatgatacatttggaaaagtacatatatatatatatatatatatatatatacgataacatattacggctaaaaattatacgaatgttataaacatgagtggaacaagtcttttctctaagaatgaaacgctaatttatcaaaaatagacctacttccttaaaaatggggcaatcaacaaaaatttaaacgttgagagaaaattgtgcttcaaaatatctctattcaagatactatatagagcagcagatgcttagttaaatcctcagaaaaccaaaaaataaataaataaaaaatagaataataaaaataaaaataataataaatg

SEQ ID NO: 14609 - DNA, 3000 bp, Unknown
  misc_feature (1)..( 3000): cDNA_ID_3018196_gDNA_ID_2684204_Annot_ID_137284 3000 nt of promoter + ATG
tttttttaatctaagttgtttaaaatctaattattacttttggtcgttaatagtatacaactatatttagttctttaccttctgttttataaatttgtacactttcaaatttatttttagttcagttcttttttttattttcgaaaaacaaaaggcctttttcttaattagagttgcattgtttgtttgtaatgtagatcatattagacttttctctatatgtctctatttgtgttgatgggtttcagtcataattagtgtgtaaacatcagttagatgaagagtttggatcaagagatttataagtaaaaattctaattttttttttgtcaatcattaaaaaatctaaatactttgatcatttattacagtaaatttatttgtctacattttaacgatatgatggcacaccgcaaacatatagatttgaatcgaaaatttccaagactttaatgtatcaaatcgatgccaagtgactttttaatcaatagataatagatctaagtatgtaaaaactaaaagaaatggtgggtgggggcagttgtgccgtgtgtgttctttcaaaagctaaaaagtaataacattttagtaagaggtgcacaagtttcccaccactttggtttttccaaacactagataccaatactttaggctgtaaattatatgatttagcatcggagcaaagacattttcgtaggcccatctatgttcaaatcatatatgttatgttagcaatttaagaagagatgtctattgtttatgtgttgactttgagatattaccgtgccccttgcaaaatttaaaacttgttaaagtaataacctttgtattaccaatagctgagaacacgcatacgtcggcattgcgctctggacaagaatagttgggactcagctacaaaaccttcttcagctgcaagacattttctaaagtaaaaaaatgtattgaagctcaaattcctttcggtttcctgttttatttaataatgaaaatattagcagttttctgctctgttattcacattgccaccaataattttactgcttatacactgaaccggatgaatacaaatatagctaaaccaactcccacaagtctattaaagatcaatcctaagctgactacttgtgataaaccaactcccacaagtctatcacagaattcacaagtagttgctgctgcgtgttgtgctgctggtgtattccaaggtgggataaaccacagacggaatctgttagttttgatttcatccgtgctgagacgactttgtccactccaacctgatcaaaattcaccacttgtgatagtaacaaaagtagcaatgatgaatggaaaaaagtgaaatcagcgtgtagtgcaatgtttcagaatcccaacaaaacagtaagaaaaataacagatttcattttgcgaagagaccctcagaagttgccaagtatcttcaacaatggttcctctaaaacctccacggaaataatccaagagggagccccattttatcaccgttccagattactaaaatgttcatcactgggaatcttaacttagtttcgaaaacatatcagacctaatgtctcaaatcatttgatcaatacttaagtaaaaccccaagtcattcttgacaagtatataatgatttgatatcctgccatgtctcagggttcttagctcaagtgttgagtgatatacctaagtttagtcgaatcaaacctaccaatgctatctaacatgtgaataaagctgagagactggttttggttaccaaattataaaaaggcttcaagaagaagtcttgtggagagaacgaaagagacgatgcttcttcctcttggagtgtcttcctcgacccttcttcatcacatatggcatgaaagtcacctgtattcatgacacacaacatacatgtcaaaagagttgaatcataacccaattaactcttaattgagattggattatacagaggtgtttaacctgagaattgttccggattccaacatcctgaagaacagcattatcgtcaagcaacttctcattattacacgaaagacagaagtttgaccatacatgcttcctgcatattcccaaaaactcctctattaaacaattttactgtattcataaatgttacttgagagaagctatttaccaagaaatatggcgatgacccatgtttgcttgctccatttcgttaactttcttcttgatcaaaagcttcagatctttcaaagtagctgaattcatgaccgccacatctgcaatgaggaagcaaacaagtaagaaacccatgtaattttacaatgctgcacaccacttgttcgacataatgcccaaacgaagtatatatgtaccaagggaggagccgtcgagcttgacgacggagagacgcatagcgcttcccttctcaaggctgacaagagtgacgacatcagaaagtgttggattcctcggaacgtcggcgagaatcggatcagcaaggagctgagagagaaccgatttaagcttctctcttttcgtctcaacatcgtaatcgccgctctccattccgtagggtttagggtttgtctcgtctaatgggttacgtttttattcatttgttccatctcacacccaagcccattaaccattcttcacgtataggcccaattagataaatgattatgtaatatgtactctctcttttgcaacaaactctgatttattttaaattaccaaattgtgtgagatgtttacattatcaagtccataaatagaaaacataccaagtcaaaaggtatcggcctccatgatttggtcattcttctacctgaagcacaatcctcggaattatttttagcaaggcatgagtttgtggttttcgatctccctttgctcctctataaaacggagtctcgaatcatcagaacaaaacatcaataaacacaaaaacaaaagaagaagagaataaacaaaagaagaaaaaaaactaataaaacaaaatcaataaaaagagaataaaaaatg

SEQ ID NO: 14610 - DNA, 3000 bp, Unknown
  misc_feature (1)..( 3000): cDNA_ID_2730357_gDNA_ID_2684204_Annot_ID_137285 3000 nt of promoter + ATG
tgtttggattagtttggttagcgatggatcaatatgaatcatgttaattattagcggtatgaatttggctttatttcaaaactttagcgaatacaattaacttcatgtttattattcctaaactgataataattgtataaattattatggatttgtatttcatgaaaaacatatccttatttatgaaataaaactgaatataaaatggaattgtataaaagcaaaagataggagcatctttttgaccctagtgtatgacaattgagttttagtgagaagtgtttaaaacttgtaactagcttaaatgggtttagtgcatttactattgtggagtttctacaaaaagctaaccaaaatgtgaaacgaagaaatcaataaacacgtttccataaagtagtgtaactttttagggtaactagttgtaggcaagaccgtatgtaagaacaaaacagtaagaactttgtagctttcaagaaaccatcaatcaataagatacctgtataataagaaaccttgagcatctttttgaccctagtgtaagacaattgagttttagtgagaagtgtttaaaacttgtaactagcttaaatgggtttagtgcatttggggactaattattgactaattatttctaaatggtgcaaaaaaaaataaaacttcaaaatttcaatgatattattacttttcgaataattattaaaacattctcgcataaatgcgaatccacacaacaattactacccaattcacgagtcactcttcaggttataaactccaatcctgaatggactccgtcttatctataaaatatccatataatttatatgtcaaaaaaatattgcaaaattttttcatcgcaccctaatcaaagcgtcttcaccagattggatggatttatggtggacaagcgactttaatttatggacccggtttagcaacttcagtgcaagccgctggaaccaactttccgctgagaataggcttgatgttagaacatgccgagacagctggtccctctttgccgttgtggaccaagttgatgtcagagagagcaatattggtgcaaggcactcctttgctgcacattagcttcacagccacctttgttgctgatgtacccttaatgcccttgatagtcacgtctgacaacttcacttgcgatggtaccttcatgtaaattaattggagtgagatttaacaacttgattgatacatatactatcaaacaaaccaaaatatgtattttatgtattagattcgattcggttacataccccagctttgcagtggccataaggacagtactcttggtcgatgagaacgggaaggctaacattgtccattgtgatatcttcgaaaagaatgttggaggcgatgccggggggagatcctggccatgtcttgatgcgaacaccattgtcagtgttcttgatgaggcatttcctcacggtgactccttttactggttgctcattagggtatcttccaagacttccaatggaaattccgtgtcctggtccacattctacgttctcaacaatgagattttcggtaccatctccaatggaaacgcagtcatctccggttttgatctttgccccaattaagttgactccattggaccttccgatgtggataccatcggtgttgagactctccggaggtgcatcaataccaatatccgaaagagtaatgttcttgcagttaaggatgttcatgtggaaaagtttgctgtttgttgatgtaatactattaatctttgagtttgttagaccagtgaatcggatgttctgttacaaaaaaatcataatattcatcaagtcattccatgaaaataataacgtttttagtgtaattatgtaaaattgaatgtgcttacgatagggagagagttgcatttgccagttttggcacaatcattggccttccaagcgagggacccttgaccgtcaaaaatagctttgtttccattcaaagtgaaatcagctatattttcgaaatcaatccatccggcatgtggcttagtggtcttgaccgtagccggagccttgaaattgccattcaattccaaagtgactggacctttgcatggacctttgaactctaggctctctaccatatactcaccttttggcactgtaattgtgctccctgctgcacaagcttctttccatgcagccgcaaatgcctatatatacatgcatgaatcaatgtgaaattctttcttaaacaatacaaaaacgaagtataatataaaatatacaacaaacatttggtacgtaccgcactatcatcagttttgctgtctcctttggctcctgatgctttaacatcaactgctgcgcctggtttggcacctgatactttagcaccaactgatgcagctgcaccgccaactgctgtagctgcattttttgctgtatcttcaactgctgtagctgcattttttgctttatcgacaaccggtgtcccgtttgctattgtggtggccataaccactagtagcacaagaagcactccgcttgctttgtgagaacccaccattttttattctctttttattgattttgttttattagttttttttcttcttttgtttattctcttcttcttttgtttttgtgtttattgatgttttgttctgatgattcgagactccgttttatagaggagcaaagggagatcgaaaaccacaaactcatgccttgctaaaaataattccgaggattgtgcttcaggtagaagaatgaccaaatcatggaggccgataccttttgacttggtatgttttctatttatggacttgataatgtaaacatctcacacaatttggtaatttaaaataaatcagagtttgttgcaaaagagagagtacatattacataatcatttatctaattgggcctatacgtgaagaatggttaatgggcttgggtgtgagatggaacaaatgaataaaaacgtaacccattagacgagacaaaccctaaaccctacgga

SEQ ID NO: 14611 - DNA, 3000 bp, Unknown
  misc_feature (1)..( 3000): cDNA_ID_2730349_gDNA_ID_2684204_Annot_ID_137287 3000 nt of promoter + ATG
agaccaagaaattcacattaagattcgcatcttccatgccggagtttgacgtggtaggctcttgtaacggtttgctctgtttgtctgattctctctacaacgattcactctacctttacaatccttttactacaaactccttagagcttcccgaatgttccaacaagtaccacgaccaagaacttgtcttcggttttggattccatgagatgacaaaggaatacaaagttttgaagatagtttacttcagaggtagtagtagtaacaataacggtatttacagaggtcgtggtagaatccagtacaagcaatcagaggttcagatcttaaccttgtcatcaaaaacaacagatcaatctttgtcctggagaagcttaggcaaagctccttataagtttgtgaaacgttcatcggaggctttggtcaacgggaggttacattttgtgacaaggcctcgtaggcacgtgccggatcgtaagtttgtatcatttgatcttgaagatgaagagtttaaagagattcctaaaccagactgtggtggtctaaaccggaccaaccatagactagtgaaccttaaagggtgtctttgcgcggtcgtttatggtaactatggaaaattagacatatgggttatgaagacttatggagtcaaagaatcatggggaaaagagtatagcattgggacttacttgccaaaggggctaaagcaaaatctggaccgaccaatgtggatttggaagaacgctgagaatggtaaagtggttcgggttttatgtttgttggagaatggagagatcttgttggagtataagagtagggttcttgtggcatatgatccaaaattgggtaaatttaaagatcttcttttccatgggttgcctaattggtttcacactgttgttcatgctggaacattgtcttggtttgatacaccccttgatttatggtaaaataattaaagttttgaatttttattacatttagagttttgagatttgggtacatcttcttgccccctttacataccaactaagtacattcttttgtacgtaatgggtagattaaggtgtatttcttttcaagttcttgtttcgtttctgttgaatttataggttccttttcatgtcttcggtaaatgtaaatataatttctaagtgttagcggtaaatgtttccggtaatttggttctacactataaactattacttattgtttgggactaacccacgatcgtgccatttgattttattgctttattattgtatgttattatgttttgacatgctcgatcaccaagcaatgcagaaaaaaaaataaaaaaatcttgtagaatattctttagatctatagaattcatataacaagatattagatgacgacgataaagcaaactttaaagatatatcataaaaaaaaaagaggctttcgcaaatcacgcaaatcatatagttttcactaaaaagaaaaatttgtgtattaataactaaacgatcttcgatctaaatattaaacccatgtggaaagattccctatcgcctgaaaataaaatgaaaactctattcatcggaagatctaatcataataatatcttactaaatatataaacatctatataaaacttgaagtatatgcatttttcgtggtctcggaattataacatttttgtacatgatcatgatggcgaacgtaattgggtctataaagttacaatgtgaacgaccagaaataatatcgactgactcgacaactgcaaggccaaatggccgtttattctaggttaccgcgatacctctggagtatactgtatacgttctctctaaattctggcttttttttgggtgaatttaaaatggaatcacttcaccaatatgtacatgggtcaactccaaaactgaagacgacgaagagaagcggaagaccgcaagaatgccaatcaacatcacaaattgtttatcgtcttctctcttctcttccattccacttattttcagaatttatcttcaatattttcaaattacatcaatagagtcatgtagtgaaatagatatgccgtccggcactataatgctaattagcaacaactgttttatttatttttcatgtcatgagtttgactatcttatttcatgaatctataaaacgaattaggttttggtacggtgtcgtgtggacagtaacctaatgcatgttgactaatatgggattaattaatacatgtgtaacgtagaaaatgctttcccaaaaaaactagcatatgactttggaaaggcattgtcaatacttctatagcgtacatgacttcggagtttcgagtctatataggaaataacactagtgagagaatttgttatggaaaaaatcagtgtgtgatgttgagataggagttaaaacaatcaaaagtgacataatctatatagacataatcacgtgattataactttataagcaaaacgggataggttttgcatgtctaggtagcacctattgtttgattggtggcaataaattccatatgttttaaaattgaaacacaaaaaaaggggcagaagcatatgcccttgtttgtctcatgttaggttggatcccaaaatcagaccggataaaaccgggatatatcattaatgcaagtaataatgattgaagacgagattagaggactaattccgtaattacaaacaaatgattttattgacaattcagtgattattaaaaataaaaaacataacaacattagtggtcattgtcgttgtcgtggctcgaggctatcgtctctcctatgcgcgtggaagaaatagcaattatgctttcttttgtatttgattattatccgttagtgaccctcacgatctctttctctctcatataactcggatcaccacatgacttgatcttcttgccgttaccaaaaccaaaatccctaaatttgccctcatttccctctgattagatcccttaccccgacaaagacaccaaaattcttgagggcgagagagctgattg

SEQ ID NO: 14612 - DNA, 3000 bp, Unknown
  misc_feature (1)..( 3000): cDNA_ID_3018160_gDNA_ID_2684204_Annot_ID_137292 3000 nt of promoter + ATG
cgcctcgtaagttccatagacagcacctgaacacaacaaaaacaagtcttaatatcatctccataaccaaaacccgtgcccaaattcccaaaatcggatacatttaaaaggcgattagattgtaattctagggtttaggttttttttttccagaatgtaaaggaaatcgaaagcgtacctactgcgccgccaagagcgccgccaacggcaactccggcagtgattttggccaaacagctatttttcgccatcttcttctttttagagacaattcgtttcttgtgtcggagaatagttttttacggttgccctcgccgcttttaaggtttttaactttgaagtttttgcttacgcaatggattgattttgcctttcgctacaaggtcgagccacaacaccgacctgttccttaaccggcctaaccgattcgaaccaaatttctggaaagacgtcattggtttacttacagctttacccaatttactaatttacccacccgactccaccggatcttaacccaactaagccggcactattattttttgttataagtttagcaaaatagacattttaatttcatttggaaaccaacaattatttaaaaaatttacactaatattttaatgtgttagttactttgatatagattttggtttatggtaatttacattataaataataaaagggtcatattcttttaagaatgttgtttatcgaattaaatgaatgttatatggtgtaaagaaaatttagagaaggttagttattggaaaaacatatgtttattcaaagggaagctaattgctcaaaaataaatgtgccggcaaaatccaagtcaagtcaaagcattagcaagttagcagaataagaaggagaagaagaaaagcatgacctcacaactccaaaacatgttctttagtaattagacatctcaagaaaagacgactactctctactcacttgagctaccaatatatcaatcacttgagctacctgcgaccaaaattgattttgattggcgccacaggtcgtcctgatccacactgtcaaaacaaaccccatacgttcatatttgcagaatagcaaaacaaaattggatacttcttaaatactagtattcagacagtaattactcatttacttgctcaaccaaattagcttttatcatgcagtacgtaggcaaagatatcagcatcacatcaagatgatgcaatatagtaagcctccgaatgagttttgtatcactcttaactacgtaatatcagacactaatgttggcaaattcctgactaggtaaaagaaacagcaatcatcaaagataggcattggcttgttaagtatcaagagaagagaattttcttaagcagctttcctattcaatcacgcagaaagcaaaaaataaaaacttgtccaaggcaagagaagctaattgggtagagttttacctttccacatctcaaaaagaagagacgattctcctttgaaagaattgcctctgtgctcttgcaaggaatgcacatgacgtagtcaactgaaattaacagcaattagagaaatcactttaagaaatcaacagaaggatgtttagttgaatcctaatcttgagaggaaatgttacttacggatatatcctcgtaataacgattcaaagtccctctgtgtaaatctccccctaacaaccaacctttgctgatcatcaagtttacccctagtacccagctcagcaagcaagaacgccataacatgatcagggtttcgatgcatcctgaaaaagttttagttccaaatacaaacatgaaaactcactacgttctagtaacaatggttccaaaagtaaaagtaaaaaagtttgaaggggcagagatatggtaatttcttcatacgtcttgcaatagtccataaagttgacaaagactgtcttctttgtgcctttcgctgtctcttcacgaagaacttgtggtggccatataattgtaagaagccaaattccaacaagctccggactattttcacgcaggatattaaagaccctacgaagaatctgtacatataattcccatcagaaaaagaaaaaaaacaagcaggaagaagtatgcattgacttaaggaaagaatgctccaaagcaatatttatataagtcgcacgttctagtaaccaaagagaatcatctaccaactatgcatgcttaatacaagatcctgaagtacaactgtttacttggttttcatttttggttgggtcaaaggatagctgatgtaaaagggcaacaacaacaatcaaaccaaacgaaaaaggaaacaaaatctattgtcttaatttagggaattaatcaaggagtccttgtagacaaaaacaaaatgtcaaaagccaaacttacttcttgctcatcatccttcacttctttcttgttctcattactttcatcagccatgatttactgccaagaaaagcattcagaaaacaaaccaaatactaaaatcaagaatagaatgtgtatgatcatcaacaacaaagattggactctgttacctaaaacatgataagtagtaatttctattccgagtctaaaacatgataaggatttacctttggtaacgaaaccgcaatgcaagattggtcttaacgaggaaaacacaagcgagagaagctatgaagactgcgtttcccaaccctaattttttttctttctcaaaagctttttataattaaaaaaaaaaaaaccataattttttagatttttgccacaatttaattcgtaaaacaaaaacgtaattgacacaaaaagagtctaaatttacacactgacggcaaaaagggatataatttatcgacaaactcacaaaagtatcggcgaagaagagattggattctctgtttcagttccttaagagtttgaggagattctctgtgtataaattgagatggttcctcccataatttataagtataagcgaaggaaagatcggcgacttggtagggacgatgatagttcagtgatg

SEQ ID NO: 14613 - DNA, 3000 bp, Unknown
  misc_feature (1)..( 3000): cDNA_ID_2730328_gDNA_ID_2684204_Annot_ID_137294 3000 nt of promoter + ATG
taagagatttttataaggctgtttttgtaaaaaaaagaagtaattaaatgttgtgataattgttttaatgacgtgtcaactacaatatttgcacgaaattgaaaatcacaaaatcgaaaatccacttttttgttttgtttctctctttggccgacaaataaaaaaaaaacaaaaaacacaactaatcataggcttctccatcttcttgtctgcaggatgatgcaatttttcagacaattttcttccaaaatcttttcgtaattctgttttatttttcaacgttttaggtttttaccaatccgccgtagttatatccaacattaatttttttccctcttctcagaaaaaaataaaattcaactcatctctagagtttttaggttcttccaagaaattgaatttggaaggaggctttgatgggtttgaattttccataatcgtcccttgtttacggtatttttctcaaggaatccctgaaaaactatttcttggtctttgtgtaattgtctggtgcaaatcaagttattgtttttatcttgtgttgttgattcagactcttgttgtttgaaaatgctatggctcgtgaggggatgttgttttgattttgggaaagtcttgtttgaatggtcacggcttttctgaacattcgcgtgttctttcttgtctcggctctgcttcgaaatgtctctcggccaagaaaatgttgatcctgttgaagtttcaggtaaaatcctacacaatcctttaataattattatccaccaagtttttaaacttgtaaaggtttcaaatttttgcctttttgttttatagggtcgcatgcttgcttatatgaacttttatgttctgagacacccaaatggactcctcttagggttgaagatttgcaaacatcttcttctggtaattattacttaatgatggagataaacattcttaagatatgttttaagtgttagttggagacaatctcatgtcctgtttgttttgttttagatcccagagatcggttggagaagttgctgaagcaacctgggaataaatattgtgctgactgtggctctcctgaaccaaaatgggtgtaagttgattaatacttctgtgttgtttgtacatttcttttgatgaactggattgattcatttcatttcgttttagatcgttgagtcttggtgtatttatctgcattaagtgttctggtgtacacagaagtcttggagttcatatatcaaaggtactttcttttcatagacaatcttgatttttctctgcttctgtgtgtttctagagtcttttatcgataaatttgattgaatgatgatcgcaggttctatcagtaaagctagacgagtggacagatgatcaggttgacatgcttgtaggttacggtggaaacacggcagtgaacgaaagattcgaagcttgcaacatcgaccagtcaaagaaaccaaaaccagattctactaatgaggaacgaaatgatttcattaggtgacattttttacttaacaatttgttataatggtattgtatgtataatcatcttgtccctaaatctttaaatctttcagaaaaaaatatgagcagcaccagtttatggatccaaaggatggtgctttgtgcacttatcagcagcctagcagaacaaacacttcaccaccgtctttatgttctgcaagccaccgttctacaaaaaaccgtattggtcatgcatttaggaatagctggggaagaagagaatctgatcacaaaggaccaaagaagagcaattccatggtaacaatcactatacatacatacatacatgtttgggtagttactgttgccaacgttagttaatttttgtgggtgttttataggcaggtatggttgagtttgtggggttgattaaggttaacgtggtaaaaggaaccaaccttgcggttcgagacgtgatgaccagcgatccttatgttatccttgctcttggccaacaagtgagctctctaccaaatctctctagacttgtatgatttgaagttaacctcggtctttttcaatgtttgtttgttgtagtcggtaaaaacacgggtgataaagaacaacttgaatcctgtgtggaatgagacgctaatgctttcgatacccgagcccatgcctcctctcaaagtggtaagaacagagagcttttccaaactcggataaacactactactgaaccgagcttgatatgtaaattttttgcagctagtgtacgacaaggatacattctcgacagatgatttcatgggagaggcagagatagacatacaaccattggtgagtgcagcaaaagcatacgagacatcgagcataaaggaaccgatgcagctgggaagttgggtggcgagcaaagagaacacattggtgagtgatggcataatcttacttgaagacgggaaagtgaaacaagacatttcacttaggctacaaaatgttgaaagaggtgttcttgagatccagcttgaatgtcttcctctcactcaatgatgatactttcttcttcatccctcttctttttttttttctttaaaagatttatttctaaatttatagtgaagaaaagatgctgctactttcttgttgttccacctcaaacaaaacctctgtaaaaaaacaacaccatgatttgatttgatgattcttcagaaccaatcctagtttcctctaccggaagatcaaatacaaagaaaagcaatcaatatatcatcaactctctgcattgacagatagattggtattaccgaaacacccttcatcacttccaagttccatcagagcccaaaaacccatatgggggtataatcgtctcgtaaataacacataattaattgtttttaatacgtaagtgtttttttggggtcaaaatacataagaatttatgataattaagtggataataactttttcgttaaaaataattaccgtgttattttttgtttgttgttgttgttacttgttacattaaactataatttatat

SEQ ID NO: 14614 - DNA, 3000 bp, Unknown
  misc_feature (1)..( 3000): cDNA_ID_2730324_gDNA_ID_2684204_Annot_ID_137295 3000 nt of promoter + ATG
tgtcaacacttgggtttacgattttgctactggatggattttgttgtgctcccacatttgcttcgattctgtgtgatctctgcgctaaactaattgctaattcacggttttgaggaaattatgggttctatatgctgttaaattacttaggatgcgaaatttgatgctcgcttggtaaattacgtgattggtcttcgaattacattgaaactattgtgatgctacttgcacattgtcattctctaatatctactttaggctagaactattattaccatgatagttctgacttgttacaattctgaactcgcttcattataggactattccttttgcctggaatctgataacaagcggctattttgaactctcagtatatggggtatgtttctatgtttttcctctagttcaacttgttcctatccaatccagacttttcatctatagtacttgaattcacgagtgactgtttgcaatgttgcaggttgtcttcagcaccgtttctctcctttttatgggaaagttcctggaacctgtctggggttccacggagttccttaagttcatctttgtggtgaacttccttacgtatctctgtgttttcgttacagccattgccttatactacataacgaggctggaagtttacctgtaagtaacctaccaccttacacataccaagtgtctactgcttgtttattttccttctcttacttaagtatgaagggggatgtccccattatgaaaatttcgttgaaatccttgtgattcttttgcttccctgctcgttaagtttaatatttaccactgaatatgataaatcctctctactttgttatatttcattattatccactctataataacgtgttctttgttttctcctggctagatatatgccctttgctggttttcatggtgtcttggcaggccttcttgtagggataaagcagataatacctgaccaggagatattgctgttaaagataaaagcaaaggtaatgttttgctttctagtaagaaatgatagagctttgacattttctcactttaactttttttaatcgaagttctcacatcctattcttacttctggtttatgtgtgcagtggttgccctcaattatgctaattttgtcaatagcctcaagcttcttcacactagattcagcagcatatcttcccactttgatatttggtacatatatgggctggttatacctcaggtacctacagaggagaccagaaacaaagctcagaggtgatccaagtgatgactttgccttctctactttctttcctgaacttctcaggtgaacgacatttctccctttttactgtactttcgagtttgcccacaaatcaattcttgcctcatatgttgttggtaattttgtttttcaaaataaaatgcaggccagtaattgaccccattgccttaatctttcaccggatgctttgtggaagatcaaatgccaccagtgaagaccatgattattctaccagtggtgcaccattgccaggttctgattctgctgaagcatccaggaggaggtaaaaaattattttcttttcctttttctctctttcctgttccacttcaaatcttcaatggtagtttagatgcaacgatcttactaaattccctgctctttaggggttaatgcagttcatgtcttcaaaaattagtatacaccgttttttattggcttgacactgttgaaacataatttaagatctagttgatgcaagagataatgaatgatcctgttcacttgattctaagaataaatagtaatggctcgtcatcagttttaatcaaaatgtaagagttagtcttacgagtgagaaaactagaaaggcaaaaaacttgttataacacaaaagatgttgttgttgcagagaaagaggggcaagagctctagaggagagactaggaacggaaagattggttcctgcaaggaacaaagatgaattgcagagtgatggtttagataacgtataagtggagattgcaataagcattttgaagaagctgttgttggttcttacttgtgttcatgtggacagtttttttttgttttttttttttgttaatgaaattggcgtttatacagaatcagcttcgtaaattcctttgacagctcagaaaggtagtacatttccttggacaaaccaccaattagaaacaattttcttggacgagaggatataaaagtagttatacatgttttcacttgtctctaaacttgttattgaaacagtcgtaactcgtaatggttcactctaagacacaaaaatgtttcttaattgaatgaaaaccaatgaacaaaaatgatataaaaaagaagtcttcataatatacaagagagagggagatgataggtcagaagatggcccataaaagaagggattccattgactagatgtattttgactatatgtttttttttttttttgtgttaagaatactgtatatgaaaatagaaagagagagaaaagaaaaggaaatgacgtcagcattgacaaggtaaccacgtcgcaatgtagcgagtccctccagatgtctggtttggtagtcgctttaggaatcaaacgcggagctccaataacaatggccattaccaaactcttcaatttctctatcgattcttcacacaacaacattcctctttcttcccccctttttttcctcgttttcgatttcctcgtctcgtctcttctttctgttgtcttcttcttcgttttctcacgccattccccccaaaaaaagaaacatctcttttatctctctctctctctctcttcgtcgtccttggcctatactacattgaaatccgataagttctgaaagaaacccaacacagtaaatgcggcttcgcgatctaagctatggaggaacgaatgagaaaaaacatagaatccaacaataaaatgtgagaaaagagacagagaaagaaaggaaaaaaaagtgaaatttggaagaaagaagaagagagaa

SEQ ID NO: 14615 - DNA, 3000 bp, Unknown
  misc_feature (1)..( 3000): cDNA_ID_2730316_gDNA_ID_2684204_Annot_ID_137297 3000 nt of promoter + ATG
ctacaatgtcactgcaagagacaaagaaaatatcaaaatttcgatcaagtttttatacttctaaaccagaaataaaactttgttttcagctgacctgcatgctttccaggggtaagataagcgagtgacatttgcgtggagagccttctgaacgtccaagcggttaaaatacacattcgaatatctctctgtacaaggatcataagctcttgacatccatggctgagttaccaatacaaagttgcagcatattagcacatagaaacaaacaacctgaaaattctttcggatgtgtgaaacttacgtagcgaccctttaagaatctcttaagtgccacagtactgttgcaaggtttggtgaaaatgctatatggatcgatatttccttgctctaattcggcatttctcagagccaccatacactgcattgaaggatgctgagatgatactgagtagcacgcggtctttagttggtgatacgtggaatcggatatgagaccgtgattccaccagtattcaaatgttcctatataatcatgatagtcatctgtaacagcatttcccacctgaataagcagacttttaaaaatcccagagttcacaaacttgtaaaaagtctgaaattgtttcaatctttaccataaaacctttgaggtttatagccgggttcttgaagcccttgttcctttcatggacaagtttagacagttgaggaacaaaatgacctgtccaatagagaaactcaagactaagacatcagccattttaatgtcattgatgagagcttgaaggtagaaactgaaacctgcatagctttctccaacaatgtaaaactccctatgcttgtattgtggaaacctctcaaaccagttgacaagaaatatgtacgaatcctcagctacagattcatcaagacaagacattaaataaagctcaagatagcctgattgaggtaataaacttcagacaaatatattcaaaaagcagaacctgttctctgatcaccggttgtgtaaagatctgaagttgtgtttgaatatgagaaaccaactccagctggagactccaagaatagcaagtttgccactgagagaaagagacaaagaacaaatctgaatcggaatcgtgaagagaagagcaagatatggtgagagatttagttaaagatggatattacatttattccaagcataaagtttggaatgaagagtcttgccatcagaaccaacacgaaaaggtccaatttcttcagcagcaccataagcaacagaagaacaaccagggccaccattgagccacagaaccaaaggtctagactttgggtcacgggccaacggagactcgaccaaccagtagaacaaagctcttccacgttcttcatgcacagtgacatagcctgagtactgtctaaaatcgacattactaggttgtccaggtaagttactgattctgtctctcaattgttcttccacataagaagaaggagcagcacaacatgaagtagagattgtgagtaagagaatgattagaaggaaagagtaatccatgataatcagatctaagagagttagatctgatggaactctggatttcctcacgatttggaggttttacagacacatttactatttctcgaagtcaaacactaaccttacagttacttaacagaacagcgcactactactactgtcttgtcgtcagactcaagtttttctttttggattggtcaaacgaaaaataacttttttaacttgacagtcttttcatattttacccaatttctaggatgggcttttttatccgacattattttggtctgacatgatgggcaattgggcatgcctgatttttatcgaggctagaactaaattgtctttttttttttttgtgtgtttctagtaaaataaaaaaaaatcaatatccaaaatttgatttttttttttttttttttttaaccatgatcaatgtaaatgtgtaaatagctgagtgttgttgtctgttgtgtgatatgtttttgggcgcggaggctggatatgatttgtttccactcaaacttatgctacaaagaaaatgatcaataagttacatataaaaactattaaaatcgttgtttaataaattaattatctaatttttttttttgtgtaaaaaaattaatttttatgaaagttacaatattgattggttataaacatctaattatccaaaatcttatctgataattctgattacgccatttgaaacaatgtataccaaatccgccaattaaaaacgttataataatttttccaaatctaaattgatgataaggtattagtaaatattaaatactatccacatagattctctatgtaacaaatgaaaattaacaccaataaagcgaaacaatatcgaattcaccaataaatctatagttctttcacttttttggctttggtaactcaagcgattaacaagtattttcgatctactaaatttgaagcaacaaagcattccctttcgacatgtctaaagaagtaggtatactatgatatatactcttgttatttatcgtatatctttcttcatcttctcattttcacttttaaaaatttaagtgtattccacaaaagctttttaggaatttttatagttttagaaataaaggggtgaaatcgtaaataaagaaaaaagtaaggaccctagaataaaataaggatactggcgcctgagaaatcgaacaaaagtattctgacttccgctaatacagttcgtcaatttccccaacccaaaaaaaacttttaatttttataaaataatttgattaattttgtcgtaatttattacacaactgtattaaggctggcatttgatcttcaaacccatctcgaatccttacaaattttctcaagatttaaaaccctaattctttaattttgttcttgtgaattttccctcgtaaaaaaaaatggatcaaattccttgagtagcaattttgtttggtgctgacgagaaagagatg

SEQ ID NO: 14616 - DNA, 3000 bp, Unknown
  misc_feature (1)..( 3000): cDNA_ID_2730313_gDNA_ID_2684204_Annot_ID_137298 3000 nt of promoter + ATG
agaattgggggaagcaaaagaaaccaaaattcaattgacttaagacaaactcgtaaaatgatgggaaaacctgaacaatgcgatagagggctggcatgggttgcagatcatagtaaggaggtacacaagtcaaaagttcaataatagtgcatccaacactccaaatgtcagaagcagcacaaactcctgacaattcaataacctaaaacaaagtttgggtatccgtcagtacacaaaggagaaaacatacttgtcagaataagaacaaagtccaatttcaaaatttacatatggaattttgacctatacagaatatataatggtaaaagatacatatattttatcaaaggtgtacctcaggagccatccagtaaggagttccgaccactgagtgagtgttaaaatcagcctcgttgagttttgtggcaactccaaaatcagcaagcttaacaaggccctgaagtataatatagtcaagtaatagcctagaagatcttgtgcatcccagaatacaacagattttgaaacggaaaagcgtaccaaagacatgagaataactaataagatccacaaggtacagaaaaacacacctccttggttgtcaaaatatttgcacccttgatatcacgatgtatgacaccctgctcatgaagatatactaaaccttccaagacctgtattcactagttagtacataaatatttttttttaaaacttaactcaactagaaaaagatatatacggacctgtgcaatgtaaacagtcaccaacgactctgggaaaggtccaaatttattaggtttaataatgtttgcaagagagccattctcaacgtacctgcaaacacataattggacttgaaaatccagaccgtagtccagcgtggaccaaaattaaacacaaaagtattacttactccagaataatgtgaaggtgagtctttgtcttcaacgatccgagatacttgacaatgtttttatggttcaagttctgtattgaaatatcatcttagaaggtatagaggaagattgcatcttaaccagcataaacattgtgtaatggtggaagaaagaagctacctttaggagatcgatttcttgctgatgaaattaacaaccaagaagcatcaaaacaaggattcagtcagcatagcagtggtaaggagatgagagatcacatctagtccataaagacagaacaaataacgaagatagatacaaagtaacaaaccattatggtgttaagatcctcttgaccaatgttttccaaagagacttgtttaatggcaacaaagtctccattctccaagtctaatcctatataaactcgaccataagctcctttaccaatttcatctcctagcatctgcgctcaaaagtcataaagaacaaaacttggagtagtgagtccacaaaagatttcaaatttggtagagcaaaagcaaaattagtaagaagaaacccagaattgcggaagaagaaaagctcacgtatttgttgtcgagagtctttgatttgtggaactgggatgacgtcatctgtcgcgccatctctttctcgtcagcaccaaacaaaattgctactcaaggaatttgatccatttttttttacgagggaaaattcacaagaacaaaattaaagaattagggttttaaatcttgagaaaatttgtaaggattcgagatgggtttgaagatcaaatgccagccttaatacagttgtgtaataaattacgacaaaattaatcaaattattttataaaaattaaaagttttttttgggttggggaaattgacgaactgtattagcggaagtcagaatacttttgttcgatttctcaggcgccagtatccttattttattctagggtccttacttttttctttatttacgatttcacccctttatttctaaaactataaaaattcctaaaaagcttttgtggaatacacttaaatttttaaaagtgaaaatgagaagatgaagaaagatatacgataaataacaagagtatatatcatagtatacctacttctttagacatgtcgaaagggaatgctttgttgcttcaaatttagtagatcgaaaatacttgttaatcgcttgagttaccaaagccaaaaaagtgaaagaactatagatttattggtgaattcgatattgtttcgctttattggtgttaattttcatttgttacatagagaatctatgtggatagtatttaatatttactaataccttatcatcaatttagatttggaaaaattattataacgtttttaattggcggatttggtatacattgtttcaaatggcgtaatcagaattatcagataagattttggataattagatgtttataaccaatcaatattgtaactttcataaaaattaatttttttacacaaaaaaaaaaattagataattaatttattaaacaacgattttaatagtttttatatgtaacttattgatcattttctttgtagcataagtttgagtggaaacaaatcatatccagcctccgcgcccaaaaacatatcacacaacagacaacaacactcagctatttacacatttacattgatcatggttaaaaaaaaaaaaaaaaaaaaatcaaattttggatattgatttttttttattttactagaaacacacaaaaaaaaaaaaagacaatttagttctagcctcgataaaaatcaggcatgcccaattgcccatcatgtcagaccaaaataatgtcggataaaaaagcccatcctagaaattgggtaaaatatgaaaagactgtcaagttaaaaaagttatttttcgtttgaccaatccaaaaagaaaaacttgagtctgacgacaagacagtagtagtagtgcgctgttctgttaagtaactgtaaggttagtgtttgacttcgagaaatagtaaatgtgtctgtaaaacctccaaatcgtgaggaaatccagagttccatcagatctaactctcttagatctgattatc

SEQ ID NO: 14617 - DNA, 3000 bp, Unknown
  misc_feature (1)..( 3000): cDNA_ID_2730307_gDNA_ID_2684204_Annot_ID_137300 3000 nt of promoter + ATG
ttctcatattcaaacacaacttcagatctttacacaaccggtgatcagagaacaggttctgctttttgaatatatttgtctgaagtttattacctcaatcaggctatcttgagctttatttaatgtcttgtcttgatgaatctgtagctgaggattcgtacatatttcttgtcaactggtttgagaggtttccacaatacaagcatagggagttttacattgttggagaaagctatgcaggtttcagtttctaccttcaagctctcatcaatgacattaaaatggctgatgtcttagtcttgagtttctctattggacaggtcattttgttcctcaactgtctaaacttgtccatgaaaggaacaagggcttcaagaacccggctataaacctcaaaggttttatggtaaagattgaaacaatttcagactttttacaagtttgtgaactctgggatttttaaaagtctgcttattcaggtgggaaatgctgttacagatgactatcatgattatataggaacatttgaatactggtggaatcacggtctcatatccgattccacgtatcaccaactaaagaccgcgtgctactcagtatcatctcagcatccttcaatgcagtgtatggtggctctgagaaatgccgaattagagcaaggaaatatcgatccatatagcattttcaccaaaccttgcaacagtactgtggcacttaagagattcttaaagggtcgctacgtaagtttcacacatccgaaagaattttcaggttgtttgtttctatgtgctaatatgctgcaactttgtattggtaactcagccatggatgtcaagagcttatgatccttgtacagagagatattcgaatgtgtattttaaccgcttggacgttcagaaggctctccacgcaaatgtcactcgcttatcttacccctggaaagcatgcaggtcagctgaaaacaaagttttatttctggtttagaagtataaaaacttgatcgaaattttgatattttctttgtctcttgcagtgacattgtaggaagctattgggacgattctcctctgtctatgcttcctatatacaaagaattgattactgcaggtctcaaaatatgggtcttcaggtaccaattttgtattgaactttgtgatgttcacttgtagtaaatgaatgtttacagatgcgactagtgtagaagatgtatgtaaagtcttgattacaagtgaagattgcttgatcagtctgcctacattatatgcagtggggatacagatgctgttgttcctataaccgctacccgatactctgtagatgcactgaagctagcaaccatcacgaactggtacccgtggtacgaccatggcaaggtaaagaaacaagagctctctcatgttaatttccatgcataatattcagatattgatttgaggggtattgtacactttgtaggtaggtgggtggagtcaagtttacaaaggacttacattagtgacagtagcaggagctggtcatgaagtgcctctacaccgtccccggcaagcctttattcttttcagatcctttttagagagcaaaccaatgcctatgacttgagataaaaccttgaatggacctcttctccaacttcctgttctttcttcttcatcatcaataaaccaaagtgttttttcattcactgtcttcctcaatcctcagtgcatccaaattcaacagaagactgattagctgtctagtacaaatcataagcaactcttctttcttttttttgtgtaaaatctttctcaaacagtttctctatcttttctccattattgtatgctgcaaagcaaagtctttcaactacgaatcataatactataagatagtttatatagagttcgattccacaactaaacaaaagaccaaaccatgaacgtgtaatacaatgcagactcttgtcatttggttaagagtcactgaaagatctctacaaggtgctgccgtcacttgaagactctttctctttctctcttcgatttcccaagacgtggaacaaccacaggaccaccacgcactctttcaagggcaaaacttatcctcaacggtcgacccaataatccctgtaacagagagaatctcttcagaaaccattcataatgatagcaacacaaattcttttctttttttggttttacctttccatccatggcgtcttttgcagatagagcatcaccttcttctgcaaaatcaacaaaaccaaatcctcttgatctcccacttcctttgtcatacgcaatcctaactgagaacacatttatatttgacacattaaagaatctaaatgaaattgcaactcaagcacttcatgtgagagagtaagagctcttcaacccaaatcctataaactcatattaacacatcctacaaacgattagataaccaaaagtcataaccaaagactcgttcaggcttttcatcgaacacctggaagagtttagaaatgacaaataccttctgcaacctctccaaaggaagagaaagcgtctttgagagattgctcatccacagaccaggacaatcctgcatacttacgggtatcaaaaatcattcattatcatctacatatgtaaatgtgggtactttgttacaatactcttaacctccgatgaatagcttggaactgggcgatgcagaagaagaagtgcaaaattgaggaagaaaatggaagctagaagaaatagagtgttgaggtatcgctgaaactcgtctcactaatagctcaataccatttttcatcatgatcacaaaaacttgtttcttcaaatttaagctttgttttgggtttgaagttttttttatttatataagtgaccaccaaaaaataaggagccaaacaaaaaaaaaacttattttattattgaaatatctttgtggatgaggaaggagtaaccgaaaaggataaatcatttcttcttcttcttcctctgctttcttcctaaagcctactccttttca

SEQ ID NO: 14618 - DNA, 3000 bp, Unknown
  misc_feature (1)..( 3000): cDNA_ID_2730303_gDNA_ID_2684204_Annot_ID_137301 3000 nt of promoter + ATG
aactgttttcttcatgtcggttttctttggtgactcttcgaagtttccattacgaagataacctgaagaagtaaacagagagataaatcttagatctagagactaagattgaatctttttcttccaaaaacaccaaatcttgctttagaatcacaagtagagaagacccatcttccagaatcgaaaacttgtcaaaagcaaaacagagcaaaccagtgcaaaccatagacagtgagtgtgtgtgtgtgtgcgcgcgatttaccttcagaagcaggagctccgagagcagcaccacagatgagtagcaagataggtagaataatggctttgggaaccgccattgtctctgttgttcttcctcggagaagagtgagtgaggggagcttcaggggagagagaaaaggtccgaagaatttgagattgtgagaggaagacgatctcgagatgctacgactttatacaagtgaaaggattaaaagcgagtggagagagaggaaatcacgtagaaagaggtaatgtgactggaccccaacgatggattttgtctgtctgtcttactgaaccgaaaccgacttttctccttaattcatgctctctaatctcgtattggcacttgtgccttgcttcatttcttcctaagatatttgtggccttttatttggtaatttttgtacagtaattagtaaattttgtatggtaataagagaaattgagaggaactaaagttagctaaatgagacaatattgagaagatcaaagatgagaggagataattagagaatgagttttccttggttagtgttattgatatatgcttgttactgtagagatattgaaattttactacataaatctaaaaatgttttcatgcatgcatatacatagagttattgtttcctcataacaaagctagtgggaattttgtcgtctttgatggtaaactatcttggaaatgatacttagtatgcgtagagatatggctgatgtcaaaaattatcgatgtgctaactaaacagagcaaatattctcaagacttcaatattaaactactacattatagtaaatatactctacctcatcatataagcgttttaaaaaagaactggtctaacatgtaaaaaaacacaaaatataccactaacttagtttataaatctcaaaacatcggtaatgaacaaccaagtcacatataggcggcaggcggcagcatctataaaacacacgtatattattaataacgattaccgagttattaaagtatcatttactttggcataaagttaattgcacattcaaaatcagattctttttcatattgtttatgcttgacaagatcgtataagaattgcacaagatatcatcagattgttggctctttttttgttgatcgtaataacgggaattgcggcagatgcaaaggtaattatggaggaagagaaggcgttggcaattctgcctttggctggttccaataataattggcattttaaatgaatatctctatctatacaaaatcagaggcatgtgcaatattatgactataggcttgttatagtcagcgaatgcatgtggctatcagctgaataatagaataaacacatcactaaattacgtgttgtgtagggtccttggcgttttctatctatttatgttatccactcgatacatttgcccccatgcggccgcgattgctccatgttgcaattattaattacgaatggttatgtctagctttcacttgccttctcttatttttgatcagattaactcgttgtaagttgtaaccataataacacacactagattagacaagtgttttgctcgggaatataaaacctaaaaacatgttttgtaagctatgatatactaatcaattaatttagtagttttagttaaataagagagagtagttgagtttaaagtaaagatgctttgtagttgggtagtttgtacattgatgtctacattgaataatcaaccccaacaacaaaaaataataatttgtatgggactttacctcatagaaagctggcctaaaactagtttggagcccaaatgtatcattttacctttcattgataaaagttttgagcccaattttaaatcatagaaagttggcccaaaaccagtttggagaacaaatgtttttcgatcatcttctctctcgttttagtggggctggtcgagaaaggttcttgatactataattcaaattcttacttgagtttctccctctcgtcttcttttagatttggtgttattatcgtaaaggaagacttggctactctaacgtttcggggagatttatgtttggcaaaaaaatcaagatcatttgtagtcattagatcattaaatagataaattgcatattaaattttctgttgtgcacaaataagcaaaactgtgtgatggcatatttcgtaaaaaatattgttacaatgtcaccatcggtgtttttagacaataacaaatttaccaagtcaaagattttggatttctaagtttttattgctctacagatttttctcttctatatatatatgattatttggtaaaatacttaggaaagttttgggttaaaaatgcaacagctgtctatccaaaaattccaatattgtatagtgaagaacacaattgtgatgtgacgtggaagcttttgattggaagaagcaacacgcactcggtttctttggctgcatcttaaaaacatcgttgattaaggttgagatgagaaaagcaccttatctctgcgtccaaaccaaaactcacagagctcaccaaaagagacgaccctttttctactacacaaagaaactactgattaattcattaatactaatagagttattaacattaccgatccttatattattatattaaatataaaaaaaaaaaagagaaagaagcgatctctaaaaatcaaaatctcgatttttttttttttttttccgtttggaggcgagaggaataatttttgttggggtgaggatatatgggatg

SEQ ID NO: 14619 - DNA, 3000 bp, Unknown
  misc_feature (1)..( 3000): cDNA_ID_1580298_gDNA_ID_2684204_Annot_ID_137302 3000 nt of promoter + ATG
catcaacaccagaaccaatagcaccatctccaacccccaaaatcgaaaccgtctgaggagcaggaacaaccttaggaaccctaacttgaacggtacctccaataaaaacattagaagaaacagcaggatccttgagaaactcctccactcgaataacctctttcaaaaacttatgtttcgcattggctccacggagatcccgagaaaaccctaaggagcaatggcaaatccgacgactacaacaaaagagagtcgattaaacagagaagaagataatagtgaagcgttaaaggaatagatagatagagataccatgtaattggacaagctacgtgaaaggccatcccatatatcctcaccccaacaaaaattattcctctcgcctccaaacggaaaaaaaaaaaaaaaaatcgagattttgatttttagagatcgcttctttctcttttttttttttatatttaatataataatataaggatcggtaatgttaataactctattagtattaatgaattaatcagtagtttctttgtgtagtagaaaaagggtcgtctcttttggtgagctctgtgagttttggtttggacgcagagataaggtgcttttctcatctcaaccttaatcaacgatgtttttaagatgcagccaaagaaaccgagtgcgtgttgcttcttccaatcaaaagcttccacgtcacatcacaattgtgttcttcactatacaatattggaatttttggatagacagctgttgcatttttaacccaaaactttcctaagtattttaccaaataatcatatatatatagaagagaaaaatctgtagagcaataaaaacttagaaatccaaaatctttgacttggtaaatttgttattgtctaaaaacaccgatggtgacattgtaacaatattttttacgaaatatgccatcacacagttttgcttatttgtgcacaacagaaaatttaatatgcaatttatctatttaatgatctaatgactacaaatgatcttgatttttttgccaaacataaatctccccgaaacgttagagtagccaagtcttcctttacgataataacaccaaatctaaaagaagacgagagggagaaactcaagtaagaatttgaattatagtatcaagaacctttctcgaccagccccactaaaacgagagagaagatgatcgaaaaacatttgttctccaaactggttttgggccaactttctatgatttaaaattgggctcaaaacttttatcaatgaaaggtaaaatgatacatttgggctccaaactagttttaggccagctttctatgaggtaaagtcccatacaaattattattttttgttgttggggttgattattcaatgtagacatcaatgtacaaactacccaactacaaagcatctttactttaaactcaactactctctcttatttaactaaaactactaaattaattgattagtatatcatagcttacaaaacatgtttttaggttttatattcccgagcaaaacacttgtctaatctagtgtgtgttattatggttacaacttacaacgagttaatctgatcaaaaataagagaaggcaagtgaaagctagacataaccattcgtaattaataattgcaacatggagcaatcgcggccgcatgggggcaaatgtatcgagtggataacataaatagatagaaaacgccaaggaccctacacaacacgtaatttagtgatgtgtttattctattattcagctgatagccacatgcattcgctgactataacaagcctatagtcataatattgcacatgcctctgattttgtatagatagagatattcatttaaaatgccaattattattggaaccagccaaaggcagaattgccaacgccttctcttcctccataattacctttgcatctgccgcaattcccgttattacgatcaacaaaaaaagagccaacaatctgatgatatcttgtgcaattcttatacgatcttgtcaagcataaacaatatgaaaaagaatctgattttgaatgtgcaattaactttatgccaaagtaaatgatactttaataactcggtaatcgttattaataatatacgtgtgttttatagatgctgccgcctgccgcctatatgtgacttggttgttcattaccgatgttttgagatttataaactaagttagtggtatattttgtgtttttttacatgttagaccagttcttttttaaaacgcttatatgatgaggtagagtatatttactataatgtagtagtttaatattgaagtcttgagaatatttgctctgtttagttagcacatcgataatttttgacatcagccatatctctacgcatactaagtatcatttccaagatagtttaccatcaaagacgacaaaattcccactagctttgttatgaggaaacaataactctatgtatatgcatgcatgaaaacatttttagatttatgtagtaaaatttcaatatctctacagtaacaagcatatatcaataacactaaccaaggaaaactcattctctaattatctcctctcatctttgatcttctcaatattgtctcatttagctaactttagttcctctcaatttctcttattaccatacaaaatttactaattactgtacaaaaattaccaaataaaaggccacaaatatcttaggaagaaatgaagcaaggcacaagtgccaatacgagattagagagcatgaattaaggagaaaagtcggtttcggttcagtaagacagacagacaaaatccatcgttggggtccagtcacattacctctttctacgtgatttcctctctctccactcgcttttaatcctttcacttgtataaagtcgtagcatctcgagatcgtcttcctctcacaatctcaaattcttcggaccttttctctctcccctgaagctcccctcactcactcttctccgaggaagaacaacagagaca

SEQ ID NO: 14620 - DNA, 627 bp, Unknown
  misc_feature (1)..( 627): cDNA_ID_2730299_gDNA_ID_2684204_Annot_ID_137303 3000 nt of promoter + ATG
ttccaattacgcaaaatgattcacttttttagtggaaaatatcaaagaaaaatgagaagtttatatgaaaataaactctttcccactatgatgaatacatgtaagaaaactttcatgaaaagaaaacttatttactcaatataaaaatagaagactctttatctttcacgagtaaaagttcacgaaaaccatattttcctattgattaaagaaatcatagaagttaaaataatcaacaagggcaagccaaaaacttctagtgtgggatttacttaatagaagtatatatattacgatgtttatgcgtacctattttccctcaatgagaagagaaattccataatattggtgtcttaagtttggacggaaataaagagcagcaaaaaagttagggaaggaaacctttgttttcttcaataattatagaaaataatttcttttattgatttagatattaaataagcaaagatatgcatgctcattacgtgtctataaataaaaacacgtttgtacatagcatctactataaacgttccttttgcttccccgattcttcgaaacacttattgatatcttcagacacaacaaattaattacagagacagttacagaggaaaaagatctatg

SEQ ID NO: 14621 - DNA, 3000 bp, Unknown; identical to SEQ ID NO: 14607
  misc_feature (1)..( 3000): cDNA_ID_2730369_gDNA_ID_2684204_Annot_ID_191343 3000 nt of promoter + ATG

SEQ ID NO: 14622 - DNA, 3000 bp, Unknown; identical to SEQ ID NO: 14606
  misc_feature (1)..( 3000): cDNA_ID_2113870_gDNA_ID_2684204_Annot_ID_191342 3000 nt of promoter + ATG

SEQ ID NO: 14623 - DNA, 3000 bp, Unknown; identical to SEQ ID NO: 9937
  misc_feature (1)..( 3000): cDNA_ID_3409314_gDNA_ID_2684204_Annot_ID_191341 3000 nt of promoter + ATG

SEQ ID NO: 14624 - DNA, 3000 bp, Unknown; identical to SEQ ID NO: 9938
  misc_feature (1)..( 3000): cDNA_ID_2996092_gDNA_ID_2684204_Annot_ID_191338 3000 nt of promoter + ATG

SEQ ID NO: 14625 - DNA, 3000 bp, Unknown; identical to SEQ ID NO: 9939
  misc_feature (1)..( 3000): cDNA_ID_2186625_gDNA_ID_2684204_Annot_ID_191334 3000 nt of promoter + ATG

SEQ ID NO: 14626 - DNA, 3000 bp, Unknown; identical to SEQ ID NO: 9935
  misc_feature (1)..( 3000): cDNA_ID_3593294_gDNA_ID_2684204_Annot_ID_191333 3000 nt of promoter + ATG

SEQ ID NO: 14627 - DNA, 3000 bp, Unknown; identical to SEQ ID NO: 9936
  misc_feature (1)..( 3000): cDNA_ID_3018217_gDNA_ID_2684204_Annot_ID_191331 3000 nt of promoter + ATG

SEQ ID NO: 14628 - DNA, 3000 bp, Unknown; identical to SEQ ID NO: 9943
  misc_feature (1)..( 3000): cDNA_ID_2186609_gDNA_ID_2684204_Annot_ID_191330 3000 nt of promoter + ATG

SEQ ID NO: 14629 - DNA, 3000 bp, Unknown; identical to SEQ ID NO: 14619
  misc_feature (1)..( 3000): cDNA_ID_1580298_gDNA_ID_2684204_Annot_ID_191363 3000 nt of promoter + ATG

SEQ ID NO: 14630 - DNA, 3000 bp, Unknown; identical to SEQ ID NO: 14618
  misc_feature (1)..( 3000): cDNA_ID_2730303_gDNA_ID_2684204_Annot_ID_191362 3000 nt of promoter + ATG

SEQ ID NO: 14631 - DNA, 3000 bp, Unknown; identical to SEQ ID NO: 14616
  misc_feature (1)..( 3000): cDNA_ID_2730313_gDNA_ID_2684204_Annot_ID_191359 3000 nt of promoter + ATG

SEQ ID NO: 14632 - DNA, 3000 bp, Unknown; identical to SEQ ID NO: 14615
  misc_feature (1)..( 3000): cDNA_ID_3018172_gDNA_ID_2684204_Annot_ID_191358 3000 nt of promoter + ATG

SEQ ID NO: 14633 - DNA, 3000 bp, Unknown; identical to SEQ ID NO: 14614
  misc_feature (1)..( 3000): cDNA_ID_2730324_gDNA_ID_2684204_Annot_ID_191356 3000 nt of promoter + ATG

SEQ ID NO: 14634 - DNA, 3000 bp, Unknown; identical to SEQ ID NO: 14613
  misc_feature (1)..( 3000): cDNA_ID_2730328_gDNA_ID_2684204_Annot_ID_191355 3000 nt of promoter + ATG

SEQ ID NO: 14635 - DNA, 3000 bp, Unknown
  misc_feature (1)..( 3000): cDNA_ID_3018160_gDNA_ID_2684204_Annot_ID_191353 3000 nt of promoter + ATG
gagtgtatatatatgttttcaacaagaaagattttcattttacaagatgactcagaataagcttaccttgactctaatcgcctcgtaagttccatagacagcacctgaacacaacaaaaacaagtcttaatatcatctccataaccaaaacccgtgcccaaattcccaaaatcggatacatttaaaaggcgattagattgtaattctagggtttaggttttttttttccagaatgtaaaggaaatcgaaagcgtacctactgcgccgccaagagcgccgccaacggcaactccggcagtgattttggccaaacagctatttttcgccatcttcttctttttagagacaattcgtttcttgtgtcggagaatagttttttacggttgccctcgccgcttttaaggtttttaactttgaagtttttgcttacgcaatggattgattttgcctttcgctacaaggtcgagccacaacaccgacctgttccttaaccggcctaaccgattcgaaccaaatttctggaaagacgtcattggtttacttacagctttacccaatttactaatttacccacccgactccaccggatcttaacccaactaagccggcactattattttttgttataagtttagcaaaatagacattttaatttcatttggaaaccaacaattatttaaaaaatttacactaatattttaatgtgttagttactttgatatagattttggtttatggtaatttacattataaataataaaagggtcatattcttttaagaatgttgtttatcgaattaaatgaatgttatatggtgtaaagaaaatttagagaaggttagttattggaaaaacatatgtttattcaaagggaagctaattgctcaaaaataaatgtgccggcaaaatccaagtcaagtcaaagcattagcaagttagcagaataagaaggagaagaagaaaagcatgacctcacaactccaaaacatgttctttagtaattagacatctcaagaaaagacgactactctctactcacttgagctaccaatatatcaatcacttgagctacctgcgaccaaaattgattttgattggcgccacaggtcgtcctgatccacactgtcaaaacaaaccccatacgttcatatttgcagaatagcaaaacaaaattggatacttcttaaatactagtattcagacagtaattactcatttacttgctcaaccaaattagcttttatcatgcagtacgtaggcaaagatatcagcatcacatcaagatgatgcaatatagtaagcctccgaatgagttttgtatcactcttaactacgtaatatcagacactaatgttggcaaattcctgactaggtaaaagaaacagcaatcatcaaagataggcattggcttgttaagtatcaagagaagagaattttcttaagcagctttcctattcaatcacgcagaaagcaaaaaataaaaacttgtccaaggcaagagaagctaattgggtagagttttacctttccacatctcaaaaagaagagacgattctcctttgaaagaattgcctctgtgctcttgcaaggaatgcacatgacgtagtcaactgaaattaacagcaattagagaaatcactttaagaaatcaacagaaggatgtttagttgaatcctaatcttgagaggaaatgttacttacggatatatcctcgtaataacgattcaaagtccctctgtgtaaatctccccctaacaaccaacctttgctgatcatcaagtttacccctagtacccagctcagcaagcaagaacgccataacatgatcagggtttcgatgcatcctgaaaaagttttagttccaaatacaaacatgaaaactcactacgttctagtaacaatggttccaaaagtaaaagtaaaaaagtttgaaggggcagagatatggtaatttcttcatacgtcttgcaatagtccataaagttgacaaagactgtcttctttgtgcctttcgctgtctcttcacgaagaacttgtggtggccatataattgtaagaagccaaattccaacaagctccggactattttcacgcaggatattaaagaccctacgaagaatctgtacatataattcccatcagaaaaagaaaaaaaacaagcaggaagaagtatgcattgacttaaggaaagaatgctccaaagcaatatttatataagtcgcacgttctagtaaccaaagagaatcatctaccaactatgcatgcttaatacaagatcctgaagtacaactgtttacttggttttcatttttggttgggtcaaaggatagctgatgtaaaagggcaacaacaacaatcaaaccaaacgaaaaaggaaacaaaatctattgtcttaatttagggaattaatcaaggagtccttgtagacaaaaacaaaatgtcaaaagccaaacttacttcttgctcatcatccttcacttctttcttgttctcattactttcatcagccatgatttactgccaagaaaagcattcagaaaacaaaccaaatactaaaatcaagaatagaatgtgtatgatcatcaacaacaaagattggactctgttacctaaaacatgataagtagtaatttctattccgagtctaaaacatgataaggatttacctttggtaacgaaaccgcaatgcaagattggtcttaacgaggaaaacacaagcgagagaagctatgaagactgcgtttcccaaccctaattttttttctttctcaaaagctttttataattaaaaaaaaaaaaaccataattttttagatttttgccacaatttaattcgtaaaacaaaaacgtaattgacacaaaaagagtctaaatttacacactgacggcaaaaagggatataatttatcgacaaactcacaaaagtatcggcgaagaagagattggattctctgtttcagttccttaagagtttgaggagattctctgtgtataaattgag

SEQ ID NO: 14636 - DNA, 3000 bp, Unknown; identical to SEQ ID NO: 14611
  misc_feature (1)..( 3000): cDNA_ID_2730349_gDNA_ID_2684204_Annot_ID_191348 3000 nt of promoter + ATG

SEQ ID NO: 14637 - DNA, 3000 bp, Unknown; identical to SEQ ID NO: 14610
  misc_feature (1)..( 3000): cDNA_ID_3018192_gDNA_ID_2684204_Annot_ID_191346 3000 nt of promoter + ATG

SEQ ID NO: 14638 - DNA, 3000 bp, Unknown; identical to SEQ ID NO: 14609
  misc_feature (1)..( 3000): cDNA_ID_3018196_gDNA_ID_2684204_Annot_ID_191345 3000 nt of promoter + ATG

SEQ ID NO: 14639 - DNA, 3000 bp, Unknown; identical to SEQ ID NO: 14608
  misc_feature (1)..( 3000): cDNA_ID_2730365_gDNA_ID_2684204_Annot_ID_191344 3000 nt of promoter + ATG

SEQ ID NO: 14640 - DNA, 3000 bp, Unknown; identical to SEQ ID NO: 9941
  misc_feature (1)..( 3000): cDNA_ID_2186596_gDNA_ID_2684204_Annot_ID_191328 3000 nt of promoter + ATG

SEQ ID NO: 14641 - DNA, 3000 bp, Unknown
  misc_feature (1)..( 3000): cDNA_ID_3018324_gDNA_ID_2684206_Annot_ID_191387 3000 nt of promoter + ATG
atcttggacttgatactgctcgtcatcaacaaggaagtgcacatgcttctactggctaagaagaatcctgtccagcttgtcattcagcgctttgatctccttcttgtatttgttatcagagtcagttgtgcctctgatagttctgtcgtagtcctcgttgtaattaccatctgattgagcaaggttctcaaccaattcccagccttcttcaacatctttgttctagaaattcccattgttggcggtatccagaagcattctgatccgtggtagaactcctctgtatagagtgctgagcagagaagctttcttgaagccacgatgagggcattggttggtgtaacccttgaaacgctcacatgcttcacagaagctttcaccagtcttttgtaaaaagccagaaatctcatttctgagtcctgcagttctggcattggagaagaactttgctaaaaaagcctttttgcaatcatcccaggtggtgactgagtcacggggcagattcttttcccagatgtgtgctttgtcgcccaaggagaatggaaacaaacggagcttgaatccgtcttcactgacaccattgatttttgttaggttgaagagcctatcaaattcatccatgtggtcgagtggatcctccattggcagaccatggaatttattcccctcaatcatcaagatgagaccactcttaatctcgaagttgttgttctggatagcaggaggtgcaattcctttcctctgatggtggtcccgtggtgcatctccagcaccaatgtttgcagggccattctgttgattttgttcgtcagccatttcgagtggttgttgaggtataaggttgactgtgtttctcctttctctgagttcacgagctaggcggctgatgttatcgttgaaaaggaggttctggttgcctgttgatcgagtttgaatatagcagaggtgtacctcaaccgagaagacaacaagaaaaacacacagtcagtaactgaaataaaaattgaaaaagaactctatctaagcaagtctgaaatctcaaatgtaacaaacaaacacccaattggcaacggcgccaaattgataataggtttttaagatcaattatcctaaaacaccaatcatgtcgttgtagtattttaggttgtcaatccaaattggtgtgatgctaacaatcaagatgtgattagaagtcactaagtcaagccaagcaataacaggttttagtgtgttctagcagttctaagtgaacatgcagaaaccagaaattcaagcagaaacaataaaacacttgaccaacacagctctttgcagagcactgggtgaggtctagtgataggtcgagtaacagacagacagtatgacacagataattgactgcacagtctgttgccagacaactgggtggtcgagtataaggtcgagtaacaaaaaagaattgtagaaactaagcagcagatgacaggatacagtaaacagcagtggagtaaacaataaaatcaatcggataaagaattctcgaggatggggtaattgagtagtttcgtttcctcagtttacaggtgactgacatgctcaataaattatccctaaacaacaagttcattaaccaaatctaagtgccaccgcaacagagaccctcaagttaacctagtcccagactcaatcaccattgacgagagctaacctaacaggcattacgaatcaacaagttaaagccaaaacgctccttgcaaccaataccttggtacagggccacgaatctctagaattaatggttcagacatttcatcgaacaccttttgggcgcagaaatatctgggctcaaattccagttgatcagaaagcaataggcattaagaacaactaatccagaagggatctatcaatcaatacttaaccacctagcatactgagaattctacactactctaacccatcctcagaaacctattcactactcagacatcattgtagagaacataaacgttgaacaggatgaaaacacgataacaacagtgtaatagcaaaacgataacaggatgaacaacagtaaacgaaatcaagaacaaatactgaatgctaaatactgaatagataaagagaaatccggattacaaaaggtctagaacacagtgtctgcggaataaaactagataaaaaaaacttgttctcgaaaatgtagggtacatgctacttatagcaaaatattccgaaaccctaatacttaaaacgacgcagtattgggacggattaagaactgtactcgacctaggtggtcgagtgggaggtcgagtgaatagctggagtcttcttttctttcttatgcttgaatgtctggttgagtgcggaatgaagaagactctgaagcttgccatcgagtatgtagtcgagtggtggtgatggtgatactcgacttcccggtagagaggtgtgatcgcggtggtgatctggtgatggagatgaagacactcgaccttggggtcaagtgaggtgatcgagtggtggtcaggtgatggagatgatgacactcgacctcagggtcgagtgatatgatgaaatcgagaagtcctctactcgaccagggggtcgagtggtctcttgaggtcttgaagcttctactcgacctcggggtcgagtggtttgacatgatcaggtccgcttcttccaattagctcgtcaacagctccaaatcacctcaaatcaacacaaatatgcaacatgcatgcaaacctatcctaaacatgcaaagtgatgacaaatgatgagaaatggtataaaacagtaatgatatggtgctaaaatgatgacaaagggatgctcaaaacatgcaaaatacatacttatcagctatttcaagaaatcagatagtagaggtgaatgctaagctggattcagttcataacttgctcacagggaagaagcatgtctactttgcagctgaggaagagactattgagcctgagcctaagttagaggaaggagtcttctacataaatg

SEQ ID NO: 14642 - DNA, 3000 bp, Unknown
  misc_feature (1)..( 3000): cDNA_ID_3018264_gDNA_ID_2684206_Annot_ID_191405 3000 nt of promoter + ATG
tgggaggcaacccactggtttgatttttcttttccctttcttttattttcttttatttttgatttatttttcccgctttctctggatttgaatgccactggggactgtgtcgtctaagtctgggggaggttcttactattgatgcttttatttttgtttcttattatttttcgttttgcagttcatttggttacttcttttatttcccttcccaaaaaaaaaaaaaaacgttttctttagtttagttaggaatcatgatctatatttctcttgtttattgcctgatttatgagtgctgcaggttcgagccaatccgactattggaaaatctagatggcaaaccaacagactagaggatatcctagtttccaactcaaccactaaggctggagctaatctcactactcttccttttacctcttcaaacggttagtattcatagatcttgattcctcgttcatacctgatattgagaccaatgtgataaaaagaatatgttcctctccccttataaaatgaaaaaaatatatataatgagagattgagacgactttcggatagtgtataggggtaggaatgtttcctatgaccccattattatacattttttggaataatcaattacaaaggttggaaaatgccgagggtgtcgatctagtatgcgagttcccctttgtttactctcaaaaaagaataagtcagggggagagaaagaacactgaaaaagaaaaaaatatataaagaatggttaatttatcatggtatagtacatgaatgagtctagaaggatcttgaatggtggcttgtttgatgagacccagcgatgaaagcctggtggatatagttgtggaacttaggtatggaatctagaatgttgtgtaagcttgcagagaagtacatgttggttaggatttgattagacttgttaggcatatggacttagtttgaatgatcatggtaataggctagagaatgttgggagttcctttgttttcaaaacctcttccacgggttcggcttttgtgttttgcttgagggcaagcaaaagctaagtctgggggagttgatataacccgattttcaccaattttatctatgttttacgtataggattttgagtctttaagttatttctcgagtatttttagtgtcttttcaggtattcaattcaatgggacaacaatggagataaggagacattttggagcaaaagctaaggaaaaggaagctaaggacgattttggttcagaaatcagcgaggagtgtcgatcgacacattcttggtgtcgatcgacaccaattttggcccagcaaaaaccctagacgcttttgagtttataaaagatcaaatttgccccaaaagacttccctatttgcattagtagtccctggacgtttttagggtctatatatattgttttagacctaagtttcgtaaataaagtcttttatcaagttctttgcaaaaccctattgtgagagacataagctattcatccattgttcttgagagattcattctagtttttaatacagtgaagagatcctttctttccccttctctgtttactgtgtttatgctttctatctcaattatgttgtttgtttcattcaatatgtctgaatagtctgcttgttaggaatatggtttctcattagggattcatatggtttagtagattgccccctttgctaggttatctgtagaattcttcatctttaattatgcttaatgctagatctagagtaattaactagatcttgaatctagacaatagatatgcccgccataggtatctatagttggatctattatttgatgagtctggtttataggtgtgtaataagaatcggcctatttactaagatgaaaaattgaactcgttaagaatgcatatttaggttgatagtttctcggcttctccggttattattggctatagatatagggagtttcgcggcacgccccccggttattccataattagagtttgagtttaagaatggttcgataacaacctagcttttattaaatctactaactaatagtttcctgaggataccatgttcctagctcttttcctaatcgtttacaacccaatcaatctgctgtctttttactttgtttacttactatttcactcataccctgctagcttaatcttgacatttaactcattgtttgaacaaaagaactttgagaattcgatcctaaaatactgcaattgatctcttatttgagagagtagttctaggtaatttgaaccatatcacacgcgtgtaacacccccgaaccgtcctaaaactaaggacaaattcggaagcatcacgttagacccttgtagttagtcaaccaggtgtccggaacacgaccgttcacatagtcgaccaaccgtgagaaacttttcgtcgtgttcgtggcctaaggcttttcaacccgttccgagaacacgagttgtgttagtcttggactagactaataatattatcgattcaaccatcaattccattataaaaagggttaaatcattacattatatatatacgaataaaacgttaccaaaactcgtatatagggcggatccttattaattttcataggaaatcatatataataaacattatcagtatttgcaagagctgtaaaatctaagctggttggcctaatgatcatcgcgccgtttatagattccccgctaaggtttcgtgtaaacaaaaaggtagcatcatgagtaacctagtattactcaattagaccgggatctctagggtttcacctataccgctatcggaacacctaactataccaagcaatttacaatcaacaagcaagactcaatcgacaatgttgtcagaacttgggtagcacaacgtttatactacactttaacattatgcaatcacaacaaaagacaatgcatcacacaataattatcacttagtatgatttactaacctcctaggcaattataagtaaataaaattaaacacctaaacatg

SEQ ID NO: 14643 - DNA, 3000 bp, Unknown
  misc_feature (1)..( 3000): cDNA_ID_3018234_gDNA_ID_2684206_Annot_ID_191414 3000 nt of promoter + ATG
agaggatcaatagcttcgacatcctgtttgactatcttgctgataaagatcctgctttagctgcaattcttcgacgtggttcctcgacacagacaggacaggccaacgcaaatgctccacctgtggctactgctccagaacagcaggtggctaatgaggagacaacagttgctgccctagctaaccttgcaataggatcctctcctccatcaactgtattttgaaaacattgtctttcttttttgccttcttatctctttctttagaacaagttcttatggtttcaaacaatttagtatacattttttacttatgcaatttcagcttcaattgtgtgttttatctctttagaacaagtttttttatgaaatttcagctttgaattgcatacaaaatcatctctaattaacaactaattaactaggtaattagaggctaatcagacactaatcaagtcttaatatatcagaaaacattgcagaacgcttgcaaatccatcacaaattctgctagagatttgctaggcgaaaaaaaagaattgcaaatccgtcgcagtaattgcgagggaagtactagtacgataattgcgtgtgatttgcgaggaaaacagttcctcgcaaaatatgcgagggaattgcgatattttaccatttgcgagaagcgatttgcgaggaacttgttttcctcacaaatcccttgcttttagctgtttgcgagggattagcgagtaattcttcccttgcaaatcgactgttttcttgtagtgtttaagaaagaacaggtaggctcatagaagggctctggtttagatactaggtgaattaatcaagcttattaacaatgcatactttagcataggatttatcggcttctctagttatcttagctttaagtatagagagtttcgcggaacgccaccggttactctagaatcatagtttgagtttgagaatcgtgcgattacaatcctgatattagctagatctacaatttatatatctcccgagacaattccttagactcgatgctttaatcacttgaatctacaactcatttacttgcttatttgtcttttacattcaattacttcatttagcttattaaacaacatcataagtccattgtgtgagcatcgagagctcagtggaattcgacccttaagtgctaaagacgatcttttatttgagggagtaagcttaaggcaatttgagctatatcaaatttggcgtcgttgccgaagttctcttttagttcaccattagactaggtgtcatattaagtctagatactacttttctaccacctattcacgtgtttctttgtcttttggtctcttgtatttcaggtaccttcagattgagaatcacgttcccatggcagactttcacggttatgtcgaccaacaccatcagggtgtcgatctacaccctctgcagaaccagactgctacaataggcgattttaacagaattgacctcttctacacaaaccgatcagcattcaagctacctccattagaaagagatgactttgctatacaccctgcctattatgatattgtatcaagaggaaagtttagaggagctcccgacgaatcaccattagatcatttggaagtcttcgtagacatcgtttcctctattaaagcagaagggttaccatgctgatgaccttctttgcaaactcttcccccactctctcgcgagcagaggaatatcatggttgcgtcaactggaaccaggttcattaaccaattggactgatacaaagaatgcattcatgaatcacttcttcgatgaatccatgacagaggcaattcgtttgcaaatctcttcattcactcaggcaccaacagagtcccttagagcatcttggctccgtttcaggtcttatcagcttgaatgtccctaacatggcttccaagagacccaactcatcaacctattctacaaaggaatagacaagccataccagaatcaaattgatgtagcgagctactgtaacttcatgacaagaactactagtgaagcattactcctcatcaccaatgctttaacttgtctttcgatgcagggatttgacaaagaacgaagaatttcagctgagaaagctatcaagagcaaagagactcctgttttcgcaatttctactcctatccaagccccgcctccaccctcatcagagaccagaatggagtctatgcttgtgcatcttcttgcaggcctaacaaagcttgatagcaaatatgattctctctccacaaagcttgatatcaactatgattctctctccacagatctcaatagcaagattgacaatctatgctctcaattctacaatctttcacctacatcaacttctatcaatgcagtcacactacgtagtggaaagcagctcaacccaatacttcagcgcgaatgatcagctcagccttcatcttttccaattgcatacaatgaatcagtgccgatcgatacaccagggtgtcgatcgacaccaattactctagaagactctgtttttcctttgtcgaatggaatcgacaatttcgcgcaggaggaggaaactattcccgatggtgtcgatcgacacttagctcttgtcgatcgacacccagctcgttcagacaatgtctaaattccagctgcaaccaagtcagcaaatcggcgaattcccttccccaaaagtcctaaaaagtcaagacaagccttagatgatgtcagatgcaaagttatgattgataaactgattgttgagatggctctagttgaagctattcatctatctcccacaattagaaggtatgttaagccaatggtcactaagaatttgacgaaagaatgcagtgctatgatgatttcagagcaggggcagcgacatcattcaggaacgaatcccaagaaagctacgtgatcctggaacttttgtacttagtgtcaccatcaatcacgatcctttccaagaactttatgtgatctcggttctagtgtgaatctgatg

SEQ ID NO: 14644 - DNA, 3000 bp, Unknown
  misc_feature (1)..( 3000): cDNA_ID_3018282_gDNA_ID_2684206_Annot_ID_191399 3000 nt of promoter + ATG
attaccaaggcacttcaatatcatttgacgaggaagaaacgcggcacctcgaaagatctcatgatgatgctctagtcattacgctcgacgtggctaactttgaagtgtcaagaattctcgtcgatacgggtagttcggttgatttaatctttctaggtacattggaaagaatgagaattagtcgggcaaacatagtgggacctccatctcctttggtggttttcacgagcgaatcagccatgtctcttggaacaatcaagctacgagttctagctggaaagatgtcgaaaattgtggactttgtcgtttttgataaaccgacaacttacaacatcatcctcgggactccctggatttatcaaatgaaggcggtcccctctacgtatcatcaatgcatcaaatttccaactccaagtggagtagaaaccattcagggagatcaagaagctttgcgcacatgttatctagtcagccatcgtctgaagatccaatagcaattaacaaagcccgcgaagaaaggaataatcccaagatttctgagtgggcagaaagtggatattgtggtgatcgaagtaatgttagaggaggataaaccagattggaaagttcgaattggagccactctaaccggcaaaataaaagaagtcctaatagaactcttgaagaaaaataaagcatcgtttgcgtgctcagcagcggatatgtatggcatagatccaagcataatctaccacgagctaaacgtggatccaagctttaaacctgtaaaacaaaaaaataagaaaactcagagtggaacaagcaaaggcggtaaatgacgaagtggacaagcttttaaagataggatctataagggaggtgcaatacccggattggatggcaaacaacgtcgtggtcaaaaagaagaatggaaaggatagggtatgcatcgactttacggacctcaataaagcttgcccgaaggatagtttcccactttcgcatatagatcgtcttgtggaatcaaccactgggaacgagttactaactttcatggacgccttctctggttataatcaaataatgatgaatcccgaagatcaagagaagacatcatttatcaacgatagagatatttattgttataaggtaatgcattttggttttaaaatgcaggagctacttatcaacgattggtcaacaaaatgtgccacgaatatcttgggaagacgatggaagtttacatagatgatatgttggtcaagtcgttgaagaaaaaggaccacgttaagcatttagaagaatgttttgagattctcaatcaatacaaaatgaagctgaacccggcgaaatgcaccggggaattccttggttatattgtgacgaaaagaggaattgaagccaatctgaatcaaatcaatgcctttctcaacatgtcgtctccaagaaacttcgaagaagtacaacggttaactggtcggattgtagctttaaactgttttatttcaagatcaacaaataaatctttacccttctatcaatttctaaagggaaacaaaggatttctttgggatgagaagtgtgaagaggcatttggacagcttaaggcgtacttaaccacaccacccgtattgtccaaacccgaagtggatgaaaagctcgacttatacgtttctgtatcaaaccatgcagtaagcggagtcttgatacgggaggatcgtggagaacaaaaaccaatttactacatgacagatccagaaaccagatatacaatgatggaaaatctcacacttgcggttgtaacctctgcccagaagctgcgttcgtatttctagtctcatcaaatcgaagtttgaaccaaccagccacttcaaaaaattcttcatagtccaagtcagtccggaatattagcgaagtgggaagtggagttaagtgagtataatatagagtaaaagagccgagtcgccatgaaggcccaagttttagcagatttcttgaccgaattatcagtacttggcgcactagagcaaccggagagtcaaacttggaaattgcatgtagacggatcttcatcaaaagaagggtccggagtgggaataatttcgaatctccaacattggaaattcttgaacaagcattccgattttatttaacgctactaacaacgaggcagaatatgaagctttaatcgcaggacttaggctagcacaaggaattggagccgaagtagtactcgcttattgtgattcgcaactagttgttaaccagttcaatgttcaatggagattatgaagccaaagattcaagaatggaagcatatctcaatgtagttaaagatctgactaaaagcttcaaaaagttcgaactcattcgcatacctcgtggagaaaatatgactacggatgcacttgctgctttagcatcaacatcggatcctaaggttaaaagagtcatcccggtggaatgtatttcagagtaagcattaaagagaaaaaaagaagccctcgtcatttcaaagcagctatacgtgatcatggtgaacccgagatagagttgccacctgtcaaatgaagaaagtcaaatggttcaaccatacccgggcccggcgtgtcaaaagaaaatagtagcgaggagcccatcaatccgacagaagatgcagttccagaaacaattataagaaccgagccactaatcgaggaagatatccttgagccaaatgagcatcccgaaccagaactatgaatattccacgagatcgaccaaattctggctaaagattggagggctgattggagggagccaataaagtagtacattgtgacaggcaagctcccaaaaaataagtggcaagctaggaaaatgagaatcgttagcgcaaaattttgtctttcaaaggatgctttgtatagacgaggtgtcagcgatccttatctattgggcatttttgggctcgaagtcgagatcgtcatgagcgaagtacacgaaggtttgtgtggcattcattcgttaggaagggccatg

SEQ ID NO: 14645 - DNA, 3000 bp, Unknown
  misc_feature (1)..( 3000): cDNA_ID_3018307_gDNA_ID_2684206_Annot_ID_191392 3000 nt of promoter + ATG
tgttggtgtcggatcccgcaccatgggctcgggaccggccaaagattgctacacaagtatgggaggcccataagatgaaaagcccgtaagattcttcaaagtaagagtatgggtgagatgtcgattggcgaagtgggtgcaacatcgaagttaggactactcgaattgaagaagacaaatgggccgaagggtgaagtccaggaggcccggagtggtttcaaattcgaacgttgaataattaattcaaagactagaaacggatacatttaaggtagaataattgtgtgtaaatgaggattaaatgtattctttgggtataaattatgggtcaaagactatgtaaagacacacacatttttgtgcaaattagctatacacattttctctacaaaactcacagttttctctataatcatctatctattttctagtatatttgtcctcaagaataatccttctcactaaataaataaatacttgagtatgtgaatctaacatccacattttggcgccgtctgtggggacggaggattcttgagtcgtcagatttcttctgtgtattacataaccgaagtaagccgcaatgtatggagaggatgctaccaacgcttcgatagccgaaaccctcaagaccatgcaacaaactatgggatatggcgcagaagttttcaaacgtggaaaaaaccgtcgaaacactgcaaacaacccaggtatcgcttagccaaaatgttagtaccattccgtctcatgtccgttctttaaatgcgggaaattctactagagttcgaaggactatcttcggatccccaaactcccttccacgaaatgcaacaagcgatcaaacgaccctggatggtacaaacgcgaatagtcaaccggaatatggagaaacgcatcctaaagatgataaccagttcgatgatcagcacgagcaagaaaactttgatcagctcgaaaccatgagagaagtaagtcgggaactcaaagaaatgaggtcgaaattccatcaagctacaagttcggagccagacatcaaccaagttatcgaggaggctaggcgaacaccgttcacccgcgaattgcgagtttgagaatcagagattatcaaaaactcaacttagaaccatataatggtttggaagacccgaaaggctatctcgcagcttttctaatagccgctgggcgagttgatctaaacgaagccgatgaagacgcagggtattgcaagcttttctctaaaaatctatgtgggctagccctgatgtggttcactcagttggaaccaggatcgattagaaatttcaacgaactatcggcagtatttttaaaacaatactcaattctgatggataagagcatttcgataccgacctctggaatctatctcaagggccgaatgagacacttcgggcttttatcaccaaatttaaaaacgtgctttcaaagctcccaaggatctcacaacagtcggctctatcggctttgcaaaaaggactatgtcatgattcgaggtttaaggaagatctaatacttcataagcctgatactattcaggatgcattgtttcgagcaaacaattggatggaagtcgaagatgaaaaagaaattttcgcaaaaagaaataagcaagcaaaactagcggtcacttttccaccaaagaagttcgaacctcgggaaaatcagggaccaaggaagtttggttcacaaccattcaataacaacgtcggaaagcagtttcaggggaaaggaaggtcaaatacctgggtccgagatgaaacctcgtactgcgatatacatagagtcacaagacatctgaccaaagactgcagtatccttaaaaggcatatcgcagaattatgggccagtggagacatttcaaaattcaacatggagaactttgtcaagcaatatcatgaatcaagggataactcagaggctcaaaactctaaaagaccaagaccggctggcaaagaggaaccaagaactttaaatggtaaaataaacgtaattcttggaggatctaaactctgccgtgattccattagcgcaatcaagaaacatagacgcaatgttcatctgaaatcaagcttaagtgaagaagtagactttcaaggcacttcgatattattcgaggaaaaggagacacagcatctcgaaagacctcatgatgatgcacttgtaattacgttggattcgaagtatcgaggatcctcattgataccggtagttcggtcgatctaatttttcttagcactttggaaaggatggggataagcagggccgacgtggtaggaccgccatcccccttagtggcttttacaagcgaatcgctaatgtctctcggaacaatcaagctaccagttttggctggaaagatctcgaagattgtggattttgtcgtttttgataaaccagcagcctataacatcattcttggaactctatggatctaccaaatgaaagcggtcccctctacttatcaccaatgcctcaaattcccaactccgagcggagtggaaacaattcagggagatcaagaagcttcgagaacttgttatttagctagccaccgattaaaaattcaatagcaattaacgaagcccgcaaagaaaggagtagtcccgagattccctagcgggcagaaagtggatgatgtcgtggtcgaagtaattctagaagcagacaaaccggatcagaaagttcgaaacggagctaccttatctggcgaggtgaaggaagccttagttgaactgttaaaaaggaacaagaaatcatttgcttggtcggcagcagatatgcccggcatagatccaaatataatttgtcacgagttgaatgtggatccgagcttcaaaccggtaaaacaaaaaggaagaaaactcggattggagagagcaaaagcagtaaacgacgaagtggataaactcctaaagattgggtctataagggaggtgcaatatccggattggttagcaaacaccgttgtggtcaaaaagaaga

SEQ ID NO: 14646 - DNA, 3000 bp, Unknown
  misc_feature (1)..( 3000): cDNA_ID_3018428_gDNA_ID_2684208_Annot_ID_191465 3000 nt of promoter + ATG
ctcactattccttagttttctccgaaacaactcacccacttccccacttgccctcacttgtgttacaagccctcgttactaagctcggctaagattcttcaaaacattaaaatcttggttgcagtcccccatggtgataacatcgtatttctccaacttttactatttttttattgggttttccatggagaaatcaatagttacaggacacttcaaggcatacttcgagtatttgggcttcaaggaagaattatgagttttcatgctaaaaggagtagaaatcgacaaaattccgtttcagaacagtttttgtgcctcagatgtttggcatccgtttaaggtctttacgatcttggcatggaggtatctcggtgtcataggaaagctagaagagtcaatatttacatcgaagtcgaatcaaagcaatccatgaagccgttcagaagttatggcacgaagagtgaagacatgttctagaatcgtggttttagaaatgatcaatttaaaattgtcggccgaagagacttgaaccctgacgtcccctcaagtattccatcgaccactacggcgcacaaccactccttcccttcctcttgccgccaacttcaaccctccctaagaagcccaggaacttggcccatcacttactaattaatggaaagacgtttctaccctttgacctaatgaagccctataaatacaaggataaggggaaaccctaatcagaacccacaaaattaggctgcctcatgcgcctctcatcgcctccaagtcgtcctcctcttgttattcatttgttttctcttttctcttctattctttattctctacttgtaaaaggaagaagattcatcaagctttggatttccagaaaagatctctaaacccatttcatactcattttctttttatgcaatttcttcttcatatgatgttgtgttctttgaatatgtgtgaatagatctctagttaggttttaggggtttcgaagggttttcatggggactttagatcaagtttaagttggcagtttttatggttttatttgatcgtttacactattatttctatttgaatttaatcttcatgcatgtatgtccggaacgccacctagtacatgatcttaggtagtttatacttggaagaatcttgtataattgctttaactaactcaactgaataaagaactataaccgttgcacgcccgccgagtgatagggacttatggactagaatcgaacttgaacttaatgttttgatcttgtatctcgaaaccatgttatcacctactagccgttagggaaactgagtacgcaaggtattagtggtattagtgagaatagccggcttccacatactaaccgttagtgagtttcctatgtccgagaatttggaagtaaacaaacctaaccatgttatcatctagattgggatttatacctttatgttaaactatgatgcccgaagaaaaccccgaagacctagcgttttgttttactagttttacatcactcttcttattgacatttacttttattgcctttttatagttaacttccattgctttcttatttccattgaattctttacttattttcactgcattcacaaaacctccactgtttcgtttgtcttgatctaggttacctaacttgaattcttccttgtagctacactccctgtggattcgatccttaaatactactctgatatactttgcactcgcatgagtcgtgtggtctttcaggtaaaagcctggggcgaaagaaaacctgcatcaagctttttggcaccgttgctggggagtgattcaagataccgttgcaggggctaacctcctgtcaagacactttaagctcaaggcttattctctttctttcttactctactttgataacttcttgttccccttctagctttggtttttgacatctgcaggtgcatgacaaagagcaaaaactccggtgtaccgccatatcaagacataggtcaactggaacacaaaatccgaagacttcaaagacaacaatcatggccgaacaaaggaaccgagattaaggtctccctgcgtatcagccgcaacaagttccggccttaggtgagcacggacaacccttacacgatgatgatggcaaccccatctacgaggcggccgaagaacatgtcgatccacaagaccgagagtatcttgaagctcaccctctatgcgtcggagaaaacataaatgttcctcttccatgacctcccaattttcctaggcaaccgacatatattccaccaataagactggccgctcctcaacgtacgatagtcaattacgacgcacctaaccggtaccctcaggattgagctgccatacgagtacctagtctaaggcaagattttgagatcaaacctcaaatcattggccttgtgaagcaaaacaaattccatggtttgaacatagagcacccgatggatcatatcaacctcttcgaagaaatctacagtactacacaatcccatgggatacgtaaagactattttaagtgtaagctttttcctttctcgttggccgacaaggacattagatggttaaagtctttatctccacggtcgattactttgtgggaaggatgtaagttagccttcctaaatcacttctatatgaagtccagatccaagtctttaaggaacaagctgcaaggattctaacaaagaccggtcgaatccttctatgaagcatgaaaatgatttaaggactacgaacacgattgtcctcatcatggtttcctcgaaggtaacgttataagtaccttttatagtggactgcataccaagttccaactctttcttgatacggctagcaatggcgacttcacaaccaagaatgttgacgatgcacatgcctatatagagaatttggcgaccagcaacagaaatgcttccactgattttgatagaaccatccatactaaagactctgactcaaacaagatgttcgaactgaagaacacgatg

SEQ ID NO: 14647 - DNA, 3000 bp, Unknown
  misc_feature (1)..( 3000): cDNA_ID_3018399_gDNA_ID_2684208_Annot_ID_191476 3000 nt of promoter + ATG
gaggagaacaaattgtaagtttgaaatttttgagatatttctatgagtttgtttgcaaagtagtacgtttacagaacataattataaaactagtacacttactatttacaatatgtaatgtaatacaggtggttactgttggtttttttgtgaccccggttctgccactacgatttcaatgtaattacagagttgccactgaaacaaaaaaaaaaagaaatttcttctcgactcttcatatttctggtttcttaaggaggttgagggaagttggtttctgtagtacgaagaatatctgcaatgacgaagaaaaagttgagtaaatcgaagacaataagccctccggtggtaatgaaagaagaactgaagcggcgaaactccagagcagatgcacggcgaggtaagtcgtaagactgatgacggttcttcaatcaattttcgtgataatttctgggttaaaaggggttcataattaggtttctgggttatttgtagatacgcttgcaaaatctccggcgattgctcgagggttaagagacgagtctccaatttcaccatcgccggcgaaaactccggcgaaatctggaggattaagaaacgaatctaaactaggtaagcaaactcttatttgttgtccctttgccggtgaatttgatgaaccttatttcttgtcaaggaacattttttttgatttgggtttttctgatatgaacaataggagatgagagatccagagatagtgaatttacaaacccgagcctcccttgccgtttgctgcatccagcggagttctcggatgggggacgccttaacatacactcaaagccggagtatttgggaattctggtggaattactggagggttcggaggcgtgggatgagcaggtgtcatcactctgcaaaactcattcatgggatgcttgcaagacagcttctgacgaagaacaaacatgaattgtggacagtgtatggagggttcccactccgtttctctctacgagaattccaaatgacaacagggctgatttgtgataagcttccatctgaatctgaggtggaagatcaccacgacccagcatacctgtctgtttggaaccggctgtttggtgcgaaaagtatagtcacagtaatggatgtgatagatatgctaagggaggatgctaaagcggagactcggaagcgattctcaacatggaagaagctgagtcttgcattggtggtgctgattgatggggttgttgtatgcagcaataggaaacaacatcgggttacacgagactttgtagaaatgctgcatgatatagaattcttcttgtcttacccatgggggcgcgtttcttttgaatcaacaatggaacggtttggcccttctgctggagaagaagatccaattggggagctgaaggcccggctgtaacacccctatcccgctatataaatataaacgaaatagaagcgttacgttagacgcccgcagtcggccaacccaggtttccgaaacaaattcgtatgcccgagtcgtccaaccacaagagtctagcctcccgcccgtggcctaaggcttttcaacccgtaccgcagacgtgagttgtgttagtccggacaagactaataatatcagtgagtataaccatataactttagaaatccgaatcttatacttatatatatatatcatacgaaaaatggttaccaaaacatatatagttttcggatcctctttgaaaacatacataatatacttagtaaaatcttacaaaaagccgtaaaatctacattggtttgtcctaagtcacgagcggcctctacaaggtgggttaactaaggtttcctccacaaaaagtagcatcataagtaatctagtattacttaatgagccccggatctagacagaactaccataatacctctaccctaagcagcatcgacagaatctaatactacgacctaagaagaataaatacgaataatgcaaataacacacagacaaagaaaacacgcaacaagcaatgcaagcaagacataatggacaaagaaaaatgcatgcagactcgatttcctaatatgcaatggacaactaatgcaagtatgcttgtaacaacctaggtaaggccttctacgaatccatgatctcccaggacatgcctccatctcttagacacaaagtctacaagagacatagcattccctaatactacatcgtcatgtagtgcccggtcggtagcgatccagccccgagccttcgtatgccataacggaacggggttacacgcgacgcacagcatacggacgggatcctcatggttcggctaatgttagtcatctaattaaagactactaacatgacaacagactcatatactactatgcaactatcctatatgcaaaactatactaatcaaacaattaatcatacttaattaccactaatcgcggttagtttccctaatctaggtttaactagtcctaatcatgcttagagaatactaatcctaattgggcatcactaatcctaattaactattactaaacctaattaactatcctaatcagggattaagcgaataattaagctaactaatcctaattaacctcctaagctataataaggaaataaaataataaactatcctattcacgtgctacttcacgtgactcaagtactcacatggattttcgagcggtttggcttctaaggtcttctcccgcgaactaggcgttttctagtggattttgggtctgaggaacaaatgggacgaagtggactatttatagggtcttaagtcggtcataaggtcggccaaaacaagcaggaggtggcccggaccaatcaaagttcgataagtgtcactccacgggcgctccgggacactaatcggtctccgattggtttcctccatttttttccggataaacatcatccaaaatgaataagctcgaccctaaaggataaggatgaccagaattatggataagcttgagccttaatagataaacatg

SEQ ID NO: 14648 - DNA, 3000 bp, Unknown
  misc_feature (1)..( 3000): cDNA_ID_3018420_gDNA_ID_2684208_Annot_ID_191469 3000 nt of promoter + ATG
aaaactgccaacttaaacttgatctaaagtccccatgaaaacccttcgaaacccctaaaacctaactagagatctattcacacatattcaaagaacacaacatcatatgaagaagaaattgcataaaaagaaaatgagtatgaaatgggtttagagatcttttctggaaatccaaagcttgatgaatcttcttccttttacaagtagagaataaagaatagaagagaaaagagaaaacaaatgaataacaagaggaggacgacttggaggcgatgagaggcgcatgaggcagcctaattttgtgggttctgattagggtttccccttatccttgtatttatagggcttcattaggtcaaagggtagaaacgtctttccattaattagtaagtgatgggccaagttcctgggcttcttagggagggttgaagttggcggcaagaggaagggaaggagtggttgtgcgccgtagtggtcgatggaatacttgaggggacgtcagggttcaagtctcttcggccgacaattttaaattgatcatttctaaaaccacgattctagaacatgtcttcactcttcgtgccataacttctgaacggcttcatggattgctttgattcgacttcgatgtaaatattgactcttctagctttcctatgacaccgagatacctccatgccaagatcgtaaagaccttaaacggatgccaaacatctgaggcacaaaaactgttctgaaacggaattttgtcgatttctactccttttagcatgaaaactcataattcttccttgaagcccaaatactcgaagtatgccttgaagtgtcctgtaactattgatttctccatggaaaacccaataaaaaaatagtaaaagttggagaaatacgatgttatcaccatgggggactgcaaccaagattttaatgttttgaagaatcttagccgagcttagtaacgagggcttgtaacacaagtgagggcaagtggggaagtgggtgagttgtttcggagaaaactaaggaatagtgagaaaaaagttgaggagatttttggaaaaagagagtgatgagatgcgagttatggagggcaagagccgaaggtgtaaagattatttctgaagaaggaagaaaacaaaagatcaatgagatcatttggaagaatgaagagaaacacctattaattggagtaaggcatgagggaagtgaagaagccgagaagaagcaagtgattggaaggagagttattggagttcacttaactggagagtaaggagcacaacaaagaagtgggtgaagaaaagattgagtatcgggggaggaacaatttaagagacataggtgatgatcaaaaatcaatatatatggtgagtaatgatggagttcaagaaaaaagatggagtaaattttcaagatcattataaagggaaaaggaagcatagtaagacaaggtgaggtgaatcaaaaactgagaaggtgaagtttgatcaaaggaatatatgttggtgtcagatcctgaacctaaagtccggacaacccaaagattgccacaagaggtatggcccaaaagaaccccgaagtgaaggaaaagatgtagcgaggtgtctatactacgagatggcgataaggccgaattaaggacagttcgacttggagatgttgggccggacagcgaagcccacgaagatcaaagtcaattcaaattcgaacattgaggcattaaaacttgaagatcgtaacggaagcattaaaaggagaattatggtgtacaattaagattagataccatgctttagtataagtaagagaggccttgagccatgtaagggacatgcaatttctagcaatcttactatagacatttgaatataaacttacagcttttacatttgatttttgtcctcaagaataatccttctcacaaataaatatatactttgtgtgaatccgacattcatattttggcgccgtctgttgggacagaggattcttgagtagtaagattttttttcaccacattttcgagacaagcagcaatggccgaagaaagtgtcatcagtgcatcactgggccaaaatactcaaaatcatgcagcaaagcatgtcagacataacgaaaaagttctaagatgtggagaaagttgttgacacactacaaaaaaaccaggtatctcttagccagaacgttagtactatacaatcttgtattcggtctttgggtgtaggaaaccctctaggagttcgaagaagcatgtttagttcgcctggctcccacacgatgaacggtaccagtggacaaacaaaccccgattctgttaataaacaaattctgccggaggatactgcaaatcgatctagaagaagtcgatgaagatgcatggtactacaaggttttctctgaaaacctttgcggacaggcgctgatgtggttcacacagctggaaccaggatctattggtaattttaacgagctgtcagccgtgtttttaaaggaatattccatccttatggataaaagcacttcggacaccgatatatgaaacctgtcgcaaggaccaaacaagtcacttcgtagtttcattacaaagtttaaaggagtgctctcaaaacttccaagggtgtcacactaatccgcgttatcggctcttcgaaaaggattgtggcatgattcgagattcgaagaagatctaatacttcagttagtgctatcaaaaagcataggcgaaatgttctacttaaaacaagctgaagcgaggaagtctattttcaaggtgcctcaatctcgttggaagaagaagaaacttgtcacctcgaaagaccgcatgatgtcgccttagtcattaccctagatgtcgccaacttcgaagtgtcaaaaattctcattgacacgggtagctcggtagacttaatttttctaagcacattggaaagaatgagaattagttggaccgaagtgatttggcacccatctcctttagtagcatatacaagcgagtgagtc

SEQ ID NO: 14649 - DNA, 3000 bp, Unknown
  misc_feature (1)..( 3000): cDNA_ID_3018357_gDNA_ID_2684208_Annot_ID_191488 3000 nt of promoter + ATG
catgttctttaattgtcatgattgatattttaaaacaagttctaaaataagttacgaaaccgatgatttatatacctaaagttctgtatgtactctatatcactaaaatgggtgtttttcagtaatttttatcaataagattggatcaaactatgtggatttcaaaagtttgttttctgaagttttccaaaacgtcacaaaacagtcgctctttgcaacttatttgtgacaaaaaatgaaaataatcgcactttgcaaccaattacctacgtattaccaactctcgatttttgcgtttcgaaattttaaagttttggtgtgtttatatgttttcttatatgttgatactttaatttgatcgatattagatataaaaacataaccaaacactcgaattctgaattttacaaactaaacattaaaaaaaaaactaatctatatgataagtttcatgttctttcattgtcatgattgatattttcaaacaagttctaaactaagttatgaaaccaatgatttatatatacctaaagttctgtatgtactctatatcactaaaatgagtgcttttcagtaatatttaacaatagattggatcaaactatgtggatttcaaaagtttgtcttttgaagttttccaaaatatcacaaaacagtacctctttgcaccttatttgcgacgaaaaaagaaaactgtcgcatcttgcaaccaattacctacgtattaccaactatcgatttttgggtttgaaatattaaagtttggtttgtttatatgttttcttagacgttgatactttaatttgatcgatattaaacataaccaaacacttcaattctgaaatttacaaacgaaacattcaaaaaaacctaatctatatcataagttccatgttctttcattgtcatgtttgatatttttaaacaagttctaaaataagttacgaaaccgatgatttatatacctaaagttctgtatatactctatatcactaaaatgggtgcttttcacagaaggacatggctgctcaaatcaaagacttccagagtaagccaaggcccccatctcccactcccaaagtaagaagaagcggatccacgagttcagctgcaagaagggctgacaagattgaccaacctcgagcttcatcatttgatcctcgggaagtgatcttcgagctgagagagccaaggagaaggcagaggagagcatccaaacgctcgacaacctactcgatcggacatgacgagcaaaatcctcccgcttcaacatcagttcctgcttatactcaagagagtatggacgatttcgtctccgtctacttcacctgatcactgaggtaacaccaccactactattgtatataccgtagctttttgtttttctttgtttgttgtttgttttggtcttgatttttattaactgtgtaatttaagtttggtggagagttcaagacgtatttgacattgtgttctcttttcttaactcaaattttgcatcatctaaggcatagaaaaaaccataaaaatttgatttttttcaaaaaatgatttcacaaaaacagagtgtcaagtagattgcattgcattttacggttgtatatagtgtgcttgcatttaggattgctcatttgcataggggataatgatgatttcaaacctattagcatgtaaattcagtgaagtaagttcaatgcacaggttgttagttctctgttgcataaccgattgtttctctgaagtaagaccgcaccccactttgaatttacaacttgactatactacaagaaaacctgcattttgggacggttagttgtgaccttttattcagtcataaaatatagttacttctttgtgacgacaatctccgttacacattcaaatagaattcgtccttcccaatatcagccggcgacacgaccccataagtcaccaccccaaacgatacaaaccccgactcctgctcgttctcactcgcaatctggctctcaacaaccgcctcttattcgtcgaaagcaacaacaacctcttgcttgtcaacatcagattccttatcttcaagaacagccttctcaggatccaccagagacacagttcataccaaaccatcaaaaccctaataatcatgaagaggaagatggggaagaagatggggacgaattcaaggaagaagatggggaggaagtcgacgaagaagaacaaaaccctaatgtcgactaccaagagctgttggatcgcttacttgccttgccaggccgacaacatcttatgattctgtctcaagagcctattccatgagtcgagactctttggtaagctctataattctctccttctagaaacagatgaagattatgaaatggtgataaagctaagtatggtctggattctttgtgttggacggcactatttgttttgtgttggctctagtgcaatgatttggctttagtgttggctctagcgcaatgatttgggctgcagtttttgtttggtcttaatgtctttgttttgtgttggctcacctaaagtcgatttggtctgaagtttgtgcttggtctgtttgtatttgttaaacaatgtctcacctaaagtcgatttggtctgcggtcaacagttttggtctgcttgtctttgttttgtgttggcaagtcgatttggtctgtagtctttgtttggtctgcttgtaatgttaagtgttggctcacctaaagtcgttttaaaatagtctttgttttggtctgcagtctttgttttgttttgcagtctctcttttggtctacgagtttttgttttgtgtttttgttttaaaaccatttcatttttgctaattctctgttggttgcagcaactaagtcgattatgtttatatttgcaatgtcttggtggtttacctacagtgacataggcttaatacttagtcatattttttttacaggtttaaccaccacaatggaaagctgtctaaagtgattttgagcatatttaggaggaagttcgatg

SEQ ID NO: 14650 - DNA, 3000 bp, Unknown
  misc_feature (1)..( 3000): cDNA_ID_3018365_gDNA_ID_2684208_Annot_ID_191485 3000 nt of promoter + ATG
gaagtgaggatcttctccatgatggctatgcacttagcagcatgaatctcctgcttagaacgacgcttcctaggataagggataggaggagtgtaaacaaactcgggctgcattgggatttgcacctcacaaggtgtagtccgcatccagtgttgatcgacactagaggggtatcgatcgacatcgtcgtattgagtcgtcttagaaaagagtgtcccatagggtgtcgatcgacactggaaggtgtcggtcgacaccatatctgcaactgcgagctccaacttgtcttcagtgtccaattcttcccacacatcatccccttctgtgatcaagatggcattacagctcttccttggtttagcatcaggattaccaggaagaaagccctcttgtctcttgattgattgtgcagttgagctacctgtacatccagcttcttcaagtgagagctcagattgtcgatcttcccattaagatttgtttagacagcatcaaacttgccattaaactccagaacgagctttgttttgttctctcgaatctgctcaagtatagattttattcttgtctctgatgagagtggagggggggggcttggtaggctgaattaccataggtcctctaaggaaaggtcttctagaaagccggcttgggagtatagttggaggaactctggttccctgtaaacctgttgccattgaagttgccttgtggttgtccaaacttcatgtagctctaaccatcgatgtagaagactccctcttcagactcagtctcaggctcaatagtctcatcttcagctgcaaagtggacatgcttcttccttgtaagcaagttatgaaccaaatctagcttagcattcacctctgccatctgattgcctgaaacagctccaacaatcttcttcctctcgaagtctgtgttcttagtgatgttgctacaagcaagattctctatcagagctgtagcatcaattaggtaacgtgtgttgaagttaccattgctcgctgcatctagagccatctggtatctctaatcgactcctccgaagaaggtaccaagaagttgtacctcactgaaaccatgatgttggcagtcccgttgatactccttgaaacgaacccaagcaaccttgaaaacttcagctggaccttgtgtgaaggtagacagcatgtttctcaactcctaagacttagcatcatcgtagaaattgttcaagaaggctatcttgatgcttctccaagtcttgagggaacctgctttaagttgtttccgccaagaagcggcttctccagcaagtgaataagggaaaaacttgcacagtaggtagttctctgagactccattagccttgatgcttagaacaaggtcctcaaagcgctcgatatggtccattggctgctcatgagataagccatggaaaggatgctggcctactaaagcaaagtagctaggcttcagctcaaaatcgttcctctggaagggtgggggtacgatcattgatcgattagcataaaacaggtaaggcctgttgaaatccccaagagtacagcgtgagtaacaaagtgaaagtaaaaactagacgaaatctctaaactaaactcaatggtgattcccaagaactttggcaacggcgccaaatttgatacggttcaaattaccctaagaactactctctcaaaaaagagatcagttgcagtatttaaggattgatttccacaaagttattttgttaaaacaatgagtttaatgtcaagattaagctagtagggtatgaatgaaataaaatgagaacaaagtaagaaaacagcagattgattgtgtgtaaacgattaaataaaaggctaggaacagggtattctcaggaaactattggttagtagatctaatgaaagctaggttgttatcgaaccattcttaaactcaaactctaattatggaataactagcggtgttttgcgaaactccctatatctatagctaagaataaccggagaagccgagagattataacctaaatatgcattcttaatgagttcgattgttcaccttagtagataggccgattcttattacccacctataaaccaggttcatcaaataatagatccaactatagatacctatggtgggcatatctattgtctggattcaagacctagttaattactctagatctagcattaaacataataaagatgaagaattctagagataacctagcagagggcgcgatctactaaccatatggatccctaatgagaaaccctattcctaacgagcagtttactcagacatattgattgtaacaaacaacatgattgaataagaaagcataaacacaacaaataagataaggggagggaaagaagagatctcttcactgtattaagaactgaataaatctatgaaaccactcgatgaatagcttctgtctctcaataacagggttttgcaaaaacaatataaagaccatataaaatgtccagggactaataatgcaaataggaaagttttctgggaaaaatttcctcttctgtaaacttgaaagcgtcatggactttgttgggccaaaaatggtgtcgatcgataccaggagtgtgtggatcgacactctctctgatttctgaatccaaaatcgtccttagcttccttttccttagcttttgctccaaaatgtctcctaatctccattgttgtcccattgcatagaatacctgaaaaaacactaaaaacacttgagaaataacataaagactcaaaatcttatacctaaaacatagataaaatcagtgataatagggatatatcagctataaacatccaacaagaagatgagtctccaacaagttatcagactcccaatattgaggacaatatggttcaagaaagggggagattcaactcaaattgctgcacctactacccatcaatttatctggactataaagcacacacctttgctgaatactcaccattctggaaaaaaaaaattaagag

SEQ ID NO: 14651 - DNA, 3000 bp, Unknown
  misc_feature (1)..( 3000): cDNA_ID_3018389_gDNA_ID_2684208_Annot_ID_191479 3000 nt of promoter + ATG
ctgtaattacattgaaatcgtagtggcagaaccggggtcacaaaaaaaccaacagtaaccacctgtattacattacatattgtaaatagtaagtgtactagttttataattatgttctgtaaacgtactactttgcaaacaaactcatagaaatatctcaaaaatttcaaacttacaatttgttctcctcgcgtgtaatggctcgttccacccaagttgtgcgtagctattcctttcctgcctcgatcgcttttgcgatttttggagttagtcttggatattgcttgggtctccggtttcacccaatgtagttgcaacccttcaaaaactttatcattcacccctctaggttttttatctttgacccacctttgcttccactcattgattgtgccacgataacgagaagatatgtctttgtcaaacgctttacgaacctctagcgtcaaattccgatcccaattaaactcttgctacaaaataaaaaaagtacgttgagtaatacataattaaagaacaaaaatacaagcatcatcttcaaaaaaataactaaccgcgaattgtttcaaccacaaatcttgttctttcgccggcattgacgagtaagttggatatggatccttgagtagtccttgcatcatcttcaaaacagatttgcttatcccgtttcccgaactctcaaacctacaaaagtttgaattttataaatttatattaataattcaaaaagatagaaaatgtgaattaaaattccaacacttaccatgtttcatgatcgattctatcgggatggagctttgtgagtcgttctcttcctggttgagagatgaagtcctcaatgctcatcaccatgggagtctctgacgttggcgactccggactaagactaggggttcgtgaatttgaacgggacggttcttcacaatcttgagtagatcttgattggttatgacgacggtagttaccataattcctaaaacaaatgtaaaaagaacattggttatttatgaattaagtcatcaaatttatgaaaaagaaaagtagataaataaaactcctcacaataaaccaaaacaagaaataaaaataacgtttatacttaggaaaatatagctttcaacaattcaacaattgattcacaaaatcaatagattcacaaaaattggaaaactaattcaacaattccacatcactaacacatatatgactaaattcaacaaaatctaacacatatgtgtttaacccataactatccaccgaagcatataaaaatccaattgaaaaagctttaatctaaagaacaactgtatatagaaaaagataaactaattacacaaggtccatttgaacaagaagattacacgatgacatggtacccacggtattgacaattacaattcatgccaataattgaaacagctttgtacgcttggaattttattttattagttaaaaagtaattagagaaatcacttacatgttagatgtgacgaaggtgctgctctaagggaaataggaggagagaattggcggaaagaagaaggagggtttgagagagatgaagttaaaaaagaaaatggagaagagggattaaataaggaccactggttttcccattattatgatataaccgacagattttttgtcggtttacgagaaaactaaataaaatattaaagggcgcgctattcgatagttttgggaaaactttatttggcgggttcaattttgagatgcgttggtaatccatcggttaaaacaacggtttatcaattaatttcgaaatttttatgctcttcttataatgatcaattaaacgattacaattctgaatttattcttccgtcaggaaaccgtcggtttatattatgtattaaccggttccggttaggataagtttagggtcaagagttaaaatttcatataaacaaaatgaaatgatcaatacaattaatgataacattaaaataaaactatattaagtgtatatatgtctctattttactctcatttacaaaaaaaatgtataatgaaaaaataaaaatgtcatctacttaagacaattacataagttaccttagaagtttaagagtacttgtgttaaaacaatttcgaatctagaaaatcaacaaataggaatcaattgaaaatagtttctagactctaagttatttagaaatcatcaatgaacatttgcaagcatgttaggctaattaatttgtactttcgataccctaaaacaaaagtcgttgggtaaccgtcggtaatccgtcggctaaaactaacggttaaccgacggaatttttggataatctacttaacatttttgaagtacaacttaacccatcaatcttgggtcggtttttttttatgggtttaaccctcttttttttggattttcggccaaacacatgatttgagatgatatttggcccgtaaagaaatcttaccaaaatttacaaatcgctttaaatactaatcaattacaattaatgatttcccttattatcgaccaaattgaattcgtaatatatgagaatatttcaaaaatctcgctaaacaattccctaatatctcgctaatcaaatcatggatagagattgtgattattttgatttgttaccaaaaatctctcaaaacaattccataaaatctcgataatcattatatattatctatttaaagtaaagaatttgaattgaatttctatgctaaactatttgccatataaatctccacagaatattgaaactatattattgtattacaaacggatttggtgcatattccttaaaaatttgattacaaatatttgattctcatttagttaagactggaataaattttattggccaccaacctaatcggaactcgcctatatatactttctacctctcatcacaatatcaaacacacaaacaaatttcatcacatatctttggattcgagacaaaaaatgaaagaaatgattcatgttaagagattagctgaattcatcat

SEQ ID NO: 14652 - DNA, 3000 bp, Unknown
  misc_feature (1)..( 3000): cDNA_ID_3044781_gDNA_ID_2684211_Annot_ID_137329 3000 nt of promoter + ATG
gcttgctcacaggggaataatacctgtgacccgattcaacgcggaggcccatgtcagaaacctgatttgaccgttttgcacgccagttacgcctttagctcttattgggcccaatttcgtaagatcgggggaacttgctccttcaacggcttagctacacaaaccatcaaagatccaagtaagttaaattccaaaatccaaatcataattaaaccgattcgtaaattagttccggttcagtgatatcaggatgttaaaaccggtggtggattttgggtttgctaaatttttgtactctgttgtcgcttgaaaccaggttacggacgatgtgagtttccgagcgtgacattgtgaagacttacgagttacgaaaatgcatggtcgagaagagacgcacgagggaaaaccgcacgatgttacggctttcattaatggaaacagcacgtgactctctgtacgatgttacgtagcttgattatttagaaacggcacgtgattagtgtttaacttgctgtttatttattttatttttcttttcccgcgaataatgaaaactcatgaaataattaattcgttttcgggtaatgcaatcgccaatcggtctcttatgtgtgttaagctgaacaaaacaataaaattactaatgttctaatgggaaaaagtttgcaagtttcagactgtttccttgtttttattgctaaaattattagaggaacaaaaatatatgatcttcttttgttaacaaaaagaaacgtttgcaaaattgatcttacttttgaaaaagcacatgtaactattgagaatcggatgccatgattctcttctctgcatcgtgactcgtgagaataggatgtcgtcatagctttctttctcactttgcaaagaaaatgtttgaccttttgcagctaaaaagtacaaaccatgaagttgtctctactttactcttctgcatgtataaaggattcgtatgtggtcaatacattcacaactccatttcaacttcataagcggtaaaaacttgttacacaattctctcttggttgattgattgctcttctttcttgttaccaagtacaactttggatgtaattagtgatgagattgttatttatttgatcgttttgaccatgttttcaaatgtcgaaattttcattttaaccatgcgttcgtacaccttctactctctattgtatcatttcattcaatatctggtatatatatatggcgacatgtgttgtgctccatagtgccctcatatatatgttcgcttttgcttccctttttttcttctgctaattagctttaattacatctactaaaaaagtaaaaacacatttatgaaaaaaacatagtaataactagactatgacacgtaaattagtggtttaacttgtgtttgtaccattgttatatcaccatggagatttatcaaaatatatatatatttttaaaaaaagagtttagtttaacaactatatttaacaactatatcgaacatacacttagacttacatctatgccattgtctcatctattcacatttgaaatcttttagaacgatgggttaaaactctagattaggctgtggaccacccaagtgatagcaaacaatgtacacgccgctatgataggagcttccacttatcctaataattaaagtattcaataccacgattcagaagtcatccaaagtcaaaacctcgcacgagtcatgggctcatggcttacccgctccgcggttgtactttgtatatgtttcaaaagcaggaaaacattttttaaagcaattgtaaaataacaaaacaaacataaattatttgatagccggaaactatatatgtatttgttacggccagaagttgattataaccaaagtagttaaatcttgaatctgctttttcattctaacttttttttttaccacacatcaatccaaaatactgccgatgaaatttgtaattagtatcaacttctgtctaaaatacaaatttgaacttctaatttagatccaagcgatgacaactacatttcaagtatcattgtagtttgatagactagtgttacactaaacctaataaatataccaatcaacacacaatgaacccttgttcaggagtaataagggttcaaatttgcaactcttttgtcaagggaaggaaataaataatcaaattgttagccgatgcatgattgacgaaaagtaggggtgttttttacaaataagctaagatggctttagaggaccaccaatcggtccaatcctttaacactcagagcctgaggcagagaacacgatgggtcatcttatatttgtttataaaattgccaataattgagataaggtatcatgattcatcaatctagctagactgtgtgtaccatacataaactataacccatgtgtataaaatatacaaatatctgtgaacatcaaccacctaactataatgaatatgaaaatcatacgactaaactaatttacgtaaactatactactttgaaacaattattcatcaaattctcttatactattaattgtggtttactaaacttccaagttttatgttttactaatcctgtaaaattagactttagccgagtccgtttgaatctaggatttttgaaatttccaggtggctcaaagctaaagaaaatgtgaatgagaaatgatttcaacgaaaataagatttacataatagccaatgacatatatgcacttgtcaagttggagttaaacaataaccacacaccgaattgaggagcccattggaaaaaacagaagcaaatatatttttatgtaaaaatagaaacggaataatatagtaacaaaaagatactctcttcaaccttatccattcttcgccacttctcccactaatccgctaaatcattcttcttcatctctctctcattcacaattcccgaaattctctcaaatcacagatccttttagggtttttccactgtttctaggttttttttattgctcaaatctgatca

SEQ ID NO: 14653 - DNA, 3000 bp, Unknown
  misc_feature (1)..( 3000): cDNA_ID_2730470_gDNA_ID_2684211_Annot_ID_137330 3000 nt of promoter + ATG
ggtcatcttatatttgtttataaaattgccaataattgagataaggtatcatgattcatcaatctagctagactgtgtgtaccatacataaactataacccatgtgtataaaatatacaaatatctgtgaacatcaaccacctaactataatgaatatgaaaatcatacgactaaactaatttacgtaaactatactactttgaaacaattattcatcaaattctcttatactattaattgtggtttactaaacttccaagttttatgttttactaatcctgtaaaattagactttagccgagtccgtttgaatctaggatttttgaaatttccaggtggctcaaagctaaagaaaatgtgaatgagaaatgatttcaacgaaaataagatttacataatagccaatgacatatatgcacttgtcaagttggagttaaacaataaccacacaccgaattgaggagcccattggaaaaaacagaagcaaatatatttttatgtaaaaatagaaacggaataatatagtaacaaaaagatactctcttcaaccttatccattcttcgccacttctcccactaatccgctaaatcattcttcttcatctctctctcattcacaattcccgaaattctctcaaatcacagatccttttagggtttttccactgtttctaggttttttttattgctcaaatctgatcaatggatagttgtctctctaatcaaacggcgcttcagtttctcccgtcgcgttccaggagacagagcggcgatggaggcggtggttttgttattccggcgaagaggaagatccagtatagttcgatggttgtggttgcggcggcgggacagagtcggtgtgagcctggaagcagtctaaacgcgccgcttgagccacgatcggcgcaggggaggtttctgagaagcgtgttgctaaacaaacggcagctatttcattacgccgccgctgatgagctaaagcaactggctgatgatagggaagctgctttagctcgtatgtctctcagctctggttccgatgaggcttctctccacaggtccgtgaaacctttccttatctaatctctcacaattcaaagatccgtaaacagctgtagaattataaacatacaaagaaatatgtgtaaatcattacttacatactcttatttaatcgaccacaaatcagtattttattagtatttatcacataagcttgtaaagtttgattataagttgtttgatggtgtttatcagtttatgatgatttgagaatcacactaatgatatggttgaattgaaacaagagaattctgtagttatgatcttcaggtgctttctcatactctgccttgtgaagcaagttttgttttagtgtttgataagggctggttttgcttttttacatttcattgttgcttagttcgttaaatagtttccgtatattttagtttcttgcctgtgttaaactctctgacttgctcaggccattttatgctctgtttgtgaacattttctcaactatcttctgctcttttacgaacactaacactctgattccatggttggcagaaggatagctgaactcaaggaacgctactgtaaaactgcagtccaagacataatgtacatgttaatcttttacaaatactccgagataagagtccctcttgttccaaagctatccagatgcatctataatggaagactcgagatctggccttcaaaagactgggagttagagtcaatttacagctgcgatacccttgagatcatcaaagaacacgttagcgcagtcatcggattacgggtcaactcatgtgtgactgacaattgggcaacaacgcagatacagaaactgcatctcaggaaagtatatgctgcctcgatcttgtacggttacttcttgaaatcagcttccctaaggcaccagcttgagtgttccttatcagatattcatggaagcggatatctgaaaagtcccatctttggatgctcattcacaacgggcactgcacagatctccaacaagcagcagctgagacattacatctcagactttgatcccgagacattgcagagatgcgcaaaaccaaggacagaggaggcaaggaatctgatagagaagcaaagtttggctctttttggcacggaagagagtgatgagaccatagtgacatcgttttcgagtctgaagcggttggttctcgaggctgtggcgtttgggacattcctgtgggacacggaattgtatgtagatggtgcatataagctgaaggagaatgggaatgcagaagaacaagaaggaaagaaaagcatatgatgaacaagtctggttagaagaaaagcttcatgatcttctggtagtgtatatatagagaaatgtttctgccgaatctctcaggcagttgttcagttcaatgtatagatcttgcttagaaatattttgatttctgaataagaatgtggtgtggttataaggaataagagatactgtagttgggttcaattttatgttatgtgttaagtttccttgttcaatttgatctttctccttttgtcaaaagactcaaaacctcaaaaacaaaactaaaatttgggtcccaaagaagctatgcaaagggaaggagatactttgataatgcttgtatttttgggcttattttaggcccaaatagcaccttatttcggcccaaaagttagacctaccaaaaaaccttcaattgtcactagagcgaatgaatgtaaaaatctggtctcctattatcaattccgtttctctctcgccggaagatttttgctacttcatctccttatcgccccaccaccgtcacatattcactggtaagcatatccattttgcttcctcatcttccacattaggcttctcccattttcttcttcctcccgccgcgaatcgcgcgtgattagggtttatgaaatctaacgcctcaggtttcgcattttctcaagtttctcgttaatttcggttaaagaag

SEQ ID NO: 14654 - DNA, 3000 bp, Unknown
  misc_feature (1)..( 3000): cDNA_ID_2730462_gDNA_ID_2684211_Annot_ID_137332 3000 nt of promoter + ATG
attcctagagggtgtaaaccaaacgtccacacttacactgttttgattgatgggttgtgtagagacggaaagattgaagaggctaatggggtttgtcgaaagatggttaaagacaggatatttcctagtgtaataacttacaatgcgttgataaatggctactgcaaagatggacgggttgttcccgcttttgagcttcttactgtaatggagaagagggcttgcaaaccaaatgtaagaacttttaacgagcttatggaagggttgtgtagagtcgggaaaccgtacaaggctgtgcaccttttgaagagaatgctggacaatggcctgtcacctgacattgtgagctataatgttttgatcgatgggctttgtagagaaggccatatgaatacggcttacaagctacttagctcgatgaactgctttgacattgagcctgattgtcttacattcaccgctataataaatgctttctgcaaacaagggaaggctgacgttgctagcgcgtttttaggtttgatgcttagaaaaggaataagcctagatgaagtaacaggtacaactcttatcgatggtgtctgtaaagtcggtaaaacccgtgacgcattgtttatcctggagacattggttaaaatgagaattttgacaactcctcactccctgaatgtgattcttgatatgctcagtaaaggttgtaaagtgaaggaggaattagcaatgcttgggaaaatcaataagcttggtttagttccttctgtggtgacatacacaacattggttgatgggttgattcgatcaggtgatattactggttccttcaggatcctagaactgatgaagttaagtgggtgtttgccgaatgtctatccatacacaatcatcataaatggtctttgtcaatttggaagagtcgaggaagcagagaagcttctttctgctatgcaagattcaggagtttcaccaaaccatgtcacttataccgttatggtgaaaggatatgtcaacaatggaaaactagaccgtgctcttgaaacagtaagagcaatggttgaaagaggatatgaactaaatgaccgtatctattcttcattgttacagggatttgtcttatctcaaaagggtattgataattcagaagagagtacagtttccgatattgctcttagagaaaccgatcctgaatgtatcaacgaactcatatctgtggttgaacaacttggtgggtgtatcagcgggttatgtattttcttggtcacacggttatgcaaagagggaagaacggatgagtccaacgatctagtccaaaatgtactcgagagaggtgtttttcttgagaaggccatggacatcattatggaatcttattgcagcaagaagaaacacaccaagtgtatggagctgataacacttgttctcaaatccggatttgtcccgagtttcaaatccttctgcctagtgattcaaggtttgaagaaggaaggagatgcagagcgggcgcgggagcttgtaatggagcttcttacctcaaatggagttgtagagaaaagtggagtgttgacttatgttgagtgtctcatggaaggagatgaaactggtgattgcagtgaagtcatagatttggttgatcaattgcactgcagagaaagacccaccttctaaaattattattacacatgattttgtgtagcttttttgtttgtttgtagtagcaagaagagaatccttttgaagtacagcgtgtggagatcataccttgagtaataccaaggatcctagttgggctgggcctggaagatattaaaataaatctacgaatgggcttttagcccaaatgttaaattgtggcattaaaagccctttctctttcgtctctcaaatataaattccacttttgcgaaattgagaccaaagtttcagtttcattggctggggttttgagagagagagagagagagattcttcttcgtctcgtaaaagagtaatagttgtaataaaaaaaagaaaagaaaaagacacagaagaaacattacagttatatacagaaagagaaggtatatatatatatataaacacgcacccatatgccaacacatggagattgatagagagagagagaagagaagatatttctcagtttcttcgtttgtatatcttcttcttctctctctcttttgagatcttccaatctctctctctctctcttatatatgattttttcaaataaaataaaataacggaagctggtttaaagaacaccgttgaattctattttcccataagctgaaaaaaaaactaaatttttgtgttgcccaccaaaaggtttgaaattttgatccgacgatacttgagctgatttacgttattagtgctatttcgatttcctcaaagatttcgttttttttttcttctaaatttcttagttaacctcttgcgtgtgcaattggtgcacttagcaattcctcttctgggctggtgatttggtttgcgattgttttttttttttagggtttgattggatcgtggccctgatttagaacctaattgcggtcaaaagagtctgtgggaggattgaattggaataaagtgttatctttttttgattggcggaattcacattcaatcggaaagaggccaacttgttggcggcttccgatataaaggtgcttttgagctctgctcatatatcttatttaactccaacgaaattgagagacgaatggttccgattttgattttctctgctcatcatgggtttggcaggttagctacaaatcttgaggtccccaggtgcaaaattactaattttatagtgtatacttaaggataattgaagtgaaatttgggagatcataaagaaatgtttggagcttctaagtgatattattggatatggtggactggatcatagattctgatctggtcaggtgctgggacttaggagcgacaaagtaactagagagtggtttaaagtataccacttttaacggataagtggtc

SEQ ID NO: 14655 - DNA, 3000 bp, Unknown
  misc_feature (1)..( 3000): cDNA_ID_2686488_gDNA_ID_2684211_Annot_ID_137333 3000 nt of promoter + ATG
agattttaaaatatagagaataattcaatgtgcctttattttattttagagaaaattctattttagatatatataatggactaaaattttttatataaaaaaaaatttcttaaataaaaaataatataaaaatgaacattggagatggtccgtaaaaaaaatggaatattggagatgatcttgtttaaatactaattacggaactacctactttagagatatctatgtgttaataattgtggtatgtgctaatgatatggctatgtcatcctcttatgttatattgcaagttgtttcaaaacgaaaagtatttgaaaatggtcgattattatacgtatatacgagtaaaaacatatttcagtccgaactaatataattatactctctaactactttctttttttggtgaagtactctctaactaccttacgacaacaattattacctgaacattgaacaatgaatttattacgaaatacaacatgatctacaagatatatcgtgaaacacatttaaatagtccttatttggcgttaaaaattgtgttcatggtaagtttaattagcgtataaatatgtacgatagatatagtttgggttgaaatcgtatattttccccttttctccgttatatgattaaaaaaaaaacaatttgaggcatagaataagcccatttaactcctactagcctcactcacttccccaaatttcttaatcaccactggatactatgggctatctaatttattttaaaataataaataataactacttaattttttataacatttttgggggcaacaacttaatttttaatggaccttataattaatggaaaactgaaataattaaaataattattactagatgactaacttttttatacaaattaccaaaagtgaatatggaagatttttttgtttttttgtttttttttgcaacataccctcaatagtttaaaactatgcacttttattttttacatttaatgttatttctaatgatactgtattacattttaaaaaaaaaatttattttaaatatagcacattattttaacatattcattatgcactttagttatgattttgtcacatatttttgttatctatctaattagctcaataattaattactcttatatttgcttaggatgtaaaatggaaacttatcataaaataacatgtaaatattattaaaaataatttattttcttatttgtcaaagataatgtacttattataaacactaaaacaaaaataagtaatcaccattaaacttatttttatgtaaatgatatctaatgattaaatggtatatattggtggataatgatgtagatatattcaaagattaaatactatttttatgtctgtacatatatggttattttaaaatttttatttatgtctatatgtctccttatatatgaatgattccaccaaaactctttttttttctcaacacattccttatgaactttgtatactttggctatatatatcaaattaaacacaaagaacaagaatgtacaataaaccattcttctgccatggatacaaaaggtactttccttgtcctatctttcttcaattatattacacagcccttattttacatttgatatctacaaattaacatacatttgtatatgtaaatcagttatcaatgctcttccactatcgatttggtagtctttcttctccaaagtccaaaccatgttgcattgagaggatcatctctattaatgtctgaaaatctgttttttttttcttcatacatcatgttttctcagtcggcttgaggaaggcaacgctttccacttgatctaataagatattcatctcaagctaacaagagaaagctttttttgttctctttctgaaactaaaacttataaaaaaatctctaatgttttcttatcctttcactcgtaaacgtattacgtataacagtagaaacttatcatgatacaaatagttcgtttctttgattactttttaaaaatgactttgtaatttcattgattctgctttacgaatgctgaatctggaattttgttttgcttttgtttagattatatatattttagatacatataatatagttagtttcagttagagtatatactaataaagagcgaccgatctaataaaattagtctactagattggttaggtagagtctttaaatataatcttgcaattgatattccctatcagagcatattataagaaaagttccggtgacgtattcaaccattaaaccaagagatagagaatatgattttaaaaagttgatttggagattatcatctatagttttttctgccatctctggtaatgtagattttttatttccacaaataggtgaaaaaaaagaaggaaaagaatcaagtgggttactagctaggttggtcggtaacattattattttgggacagaacatgttgaaaggtttggtgcattcgaaaagtcttcgccgccttgcctttttaaataatttttgttttaaacatcactaaaaagactatagtctatagaaaaagaaaagaaaaaaagtcattagttttaatcgcattacgctttcggataacacgaaaggttaaattataaaatgaacgattttacgaatccacatattcctggatcaacgggaacccttcgtttctttcccacccgcgtgttatcccgtttctcaaatttctcatctttccgggaaaattcactttttttttttcctgggaagattcgttgtgttgtgaattttagtgggcaccttcaaattttcgattttttttttattttccttgtctcttacctgatttggtgatttattattacatcaaccactcgattcgttagatttccggatttgaaaaagagtcaccaacttgtacggattctcgttttggggatcgagtattgctgatttgtgattttgttgtttttgggtactttccctttgtggattcggatctggttggtggctttgtcaaatg

SEQ ID NO: 14656 - DNA, 3000 bp, Unknown
  misc_feature (1)..( 3000): cDNA_ID_2730454_gDNA_ID_2684211_Annot_ID_137335 3000 nt of promoter + ATG
tatgtgttgacttttaacagtgtatgcgttgactaagtgatgtacagtaatgagacggggaaaatcatactaatatttccttccgacaactttatctgtactatgcatagtacttttgagacaactttatctgaattttgtatagtatacttttgggttgtgatatattttctcgtttgatttttcttttcaactaaataatatgcaaaccaaatccgctttcgccataagaaaacaactaaaaggttaaatttacccgagagtgtattaatgttgaatagccatataggctatagtatgtatatggctgaaaatagcttatgcgatttcttgaagagagagaaaaggttaaatccgagagtgttttactcatcaatgtcattgtcattctacatatacaacgtaacaaagaaaagcgagaaaaacttaatccgacgagtcaccaaggtcaaaacacctaacacccacttatacactcattacgtggaaacataaaagatatactaccaatcatcctgctcctgcactaacaatcatctcgatgattatgagagtagggtaacgagggaaacgaattcaagggtaactcttccctttgatctcgtgttgatgacgaaatgctccgggtattttctcagcagcatcagcaaaccgtaccatggtttaccttttgcttcagggatagcccagtcttcttgtgataggtatcttcttactcgactgtgatgccatacgtttccatactcctttaatatctgtcacagaccaaccactaccatgcattagctgcaaaaattgttgatcatcagcttcacgatctgcctttgatcttccctctctcttcttctctgcacaaatgaagcagatacaatgtcgtggtgtcactatcattcaatctaagtctaacaaggttcaatcatcaaccaccacagtaaaacttatactcaaagtctagaacaagcctgaaatctatttagtgacacaatgaagttaagctatcatgagcaatttggttttacctccagaggcatatactccttcatgtccatctctccatgttttctttccactgcctctgatatcctcctcttcatcgtcgtcttcatcatcgtactcatacaactctctactccggacgccattcttacccgacccggaacctggacccgaatgataattatggtacggaacaacagtagccttccctaagacgtggtgcctgggtcccaatggaccgcctaggatactccaaaccggaagcaggaagtagaactccttgtcaccaatctgcaaaaggtcctgtgaatcgagcttgacgttggggttcccagggagatggaggacaccttcaacgaagcagccatttttgccaagtacctcgagagagaagcgtcgtctagtgaagtcatagaagatccgagcgtggttgcgagaaatgttcatcccaccgccgagagatgagaggtcgacgtcgacggtcgatttcttagaattccggccgagaataatggagtaagactgcatatagtactcgaaatcctcaccttggagcttcgcaaatccaacctctacatcgctcccgcttccaacggctgtagccatgccgtgaaatttctccgattttgaagtcggagatcaaatttggggttacatagtaatagaatgtgtttggaaaccggtttagatatgttgtggttaaaccgtacaatgaaaaatataaaggcttctcaagtaaatgactattatacccatcatgttttcagcctctccactgtcaatgttacgggccttacggcgatcaaatcaaaacgggcagtttgtttccacggctaacaaaagaaacagctttagttgggccttatctaaaaagcatcagcccattaacgtgaaccggatcttatgtacataaacccagtagtatgtaatattcggggataagcatgacattgacatgaatatggatcatgtgataaccgtaaggcttgaaattatgatgataaaatatgatgaaaagttcataagaatatcgtcacatttttgtcaaagaaatagcaaagtcaagaatggttttctttttctagaatctttgctttacattttgttaaacatttaatcaaccgaaaaaatcacaacgagaaaagaacatttgctatattccacagtgtattcgcagaatcttcctttgtttttcttgtcaacaattcaaatagtctcaatcctctttccactttccaggtgcaattcatgcaagagtaaggctggaacttgtgatagccaagctataataaagcaacttcaacaagctattccactattcgaataaagacacgagtcatctatctactcaacataattctttacagccatttgtcatctagcacgtgcccatgaagccagccaaacatgaaccacgtcgacacacatcagatgagaataaccgttacggcgtcatttgctgacctggactgtctaacctattgcactgtctctcgaagatggtcgccacatgtcaatcccggggtcgtgtttatgctcgagattcgcggagtcagatacgaacacaagaattcaaaacacccaacgtgtcctcgtcaaagccagcaggatctcagtgtacacgtgttaactgtttccatgcacgtgttacacgtggcgtctcggtacttttcgtcaaaattttacttgatttttacaaccaatggaaatagaaaccaacaaaataaatggaaagcgtttatcgataatccgaaattgtagcgctaataaagtttcttaacctttctcttagtgaattttgaaaccgcccatgtccactatccttatcggacatgtgtcatgttccgaagcctttaccattctctttttaattatctccgccccttataatattcctttctcatacaacaaagttggcgaagcttcaaaacccttcaagaggaaaattttgcggaagacaagagaccatctttttgacattatatgtttgttgaatctttatca

SEQ ID NO: 14657 - DNA, 3000 bp, Unknown
  misc_feature (1)..( 3000): cDNA_ID_1017434_gDNA_ID_2684211_Annot_ID_137337 3000 nt of promoter + ATG
gtgccattaaaggatatctatagaagtgaattccttcaaataacaaattgccaattctaaatccattacgcataatttccacacatcttaagcaacttatgtccagaccagaatctagcatagtcatgataactaaaagaacagtaaaatgcaacccaaaccatcaaaatgggaaaggaaaaaaaaacgacttttcacattttcttggatctcataatacaagcggtcaggagctcaaagccctttaagcataatttgtagaacctgaatcttaaaaaaaaaaagaaacacaaatacatgatttcccaccgttcctcaggattttaaacattctatagtcagatcctcaggaaatcaaagccattacacaacacatttcagaacattataggctaaatgatttgaaaacttgaatcctaaaattcattaagctgccccaaaaccaagcttctactaacaaaacaaactacaattaaccatccgaatcaaaccatgcacccaaaactcgaattgaaatttgatatatctaacaatgattgagctgccatcagaatgaattattagaaaataattttgtcacggttccttcagaccagagtaaactccaatcatccgaaactcaaaacccttgcgcaaaattttcaatcatcatttggcaacttattcaatcaaaccaacaacgaaaataaacaaaaggttacataaaactaaccaagcctatgttctaaagcaaacgaaatcaaaaaattcaaacaatcaataagatgctccactatttgcgggagagatggaacctttaagctcacagatctcgccgccattctcaatgtttcttcggctgttttaaatagttgtgtcattagggtttttattcaggtcttaaaatcatgggtataatcgtcaatttcacaaaataagcctttgtcctggataagctaaaccagtttccaaacaaatcttgcttcgattcacaaattattacgattgcaatccctaatttggaagtcccggttcctctttcgatcaaatcggagaatttcacggcatggctacggctgttggtggcggaagcgatgtggaggttggatttgcgaagcttcaaggtgaggatttcgagtactatatgcagtcttactccattatactcggccggaattctaagaaagccaccgtcgacgttgatctctcatccctcggcggtgggatgaacatctcgcgcaaccacgctcggatcttctatgacttcactagacgacgcttctctctcgaggtccttggcaaaaatggctgcctcgttgaaggtgttcttcatctccctgggaatcctaacgtcaagctcgattcacaagaccttttgcagatcggagacaaagagttctactttctcctaccggttcggagcatcttaggcgggccgttgggacctaggcaccacgtctctgggcaaacaagtgttgttccataccataattatcagtcgggtccaggttctgggtcgggtaagaagggcgtcaggagtagagagttgtatgagtacgatgatgaagatgatgatgacgacgacgatgaggaggacgatatgagaggaagtggaaagaaaacaaggagagatggacatgaagtagtatatgcttccggaggtaaaaccagattgctcatgattgtttgagttttcattgtgcaactagatatgtttcagattatgatgcttacttgatcacatcaggcttgtttctttagactttgattgtggtggttgctgattgaaccttgttagacttggattgaatttgaatgctagtgacaccacgacattgtatctgcttcatttgtgcagagaagaagagagagggaagatcaaaggtagatcgtgaagctgatgatcaacaatttttgcagctggaggaaaaagatgttgtatcgtctgttgccactgtgctttccgatttgtgtggtccgggagagtggatgcctatggaaaaacttcattcggtggttagtttttatgagaaagttccttgcctttttctaatacagaatgtagtacgagtaatcaattgaaacaagacttgtataatgtcaaggtgataattagtgtgaagctaggtccttaattagttttccaatggaaacgcgctacgctacttatatgtgtctaagtctagaaagtatgtcagttactccatagattttgaatgactagtgtagtctgactatgaacttctttgtgattcaatatgatggctaatgcatggtagtggttggtctgtgacagatattaaaggagtatggaaacgtatggcatcacagtcgagtaagaagatacctatcacaagaagactgggctatccctgaagcaaaaggtaaaccatggtacggtttgctgatgctgctgagaaaatacccggagcatttcgtcatcaacacgagatcaaagggaagagttacccttgaattcgtttccctcgttaccctactctcatgagaactttaccttagtgactcggattaagatttaagaagcttttctctcttttctttgtttcatatgtaaaatattttggcattgattagtaacacgctgtgtcgtttttctgcacccaaaaacgccaacttcttggtccttgcagttgagagattttgattttctttttcttgattcttatttttgataaacccatcgagatttttctttcatcaaagggcaaaaaattcgtgccaattcagaaatcgttatgttcggtggatttgggccataaaaagagaaaaggccgaaacagagaatgatccaaagtggctcaagtacgtatccagacaatataaaaaggttggaatgtgcaaacttagggttatactcgtatcttgtagcagccactaaagcaaaattctgagatcgaaaaagctatataaaaaaaaaaaactgcttccgtttcatcgattttgtccagatcttccccttcttccggtaatcgaagcttacgagatagttgagtgaagatg

SEQ ID NO: 14658 - DNA, 3000 bp, Unknown
  misc_feature (1)..( 3000): cDNA_ID_2730446_gDNA_ID_2684211_Annot_ID_137338 3000 nt of promoter + ATG
aggaatccagttccagaagtaacaccatttggtccggagacagagattcgagccatcgccggagctttgccggtaaaaatggaacctttcatcttctcgcttttgccaactcctttacaaaagcaccatgagtccaatatcactcccattgtctctctatctcttgattatgctctcagatgggttttgtgtcaaattccctaatttggcaatctgggttttggaggagagtgttttggatctgaaaaggatgggaatttaggagagaagtgtgaattggatgcgagttagtaataatgggattagggagacacaacacatgtatgtgtctgtgtctgtttgtgctgtaaaaacatcaactttctccggatttggtctcgatgaagacccaagaatgggagaaaactcgagaagaggtaagtgagagagaaacaagagacaggggaatcgtgaaatgagtaaagagatgtgcttctttaaggagctagctggggacttcttcttcttcttttatcacttttatttttttctttaattcaaaagaaaatgtataaagattgggggaaatgttttctttatttggtttaagtgtgtcattttgtaagaagaagcaaacagaggaaaagtctagagtgacagagaggatctttgtacatgtgatgaacatggatggactttttgcttattatgattagtgttttttgcttaacgttttctttgcttgtcgatttgtctaatcatggtttcattaacttatatctctctttgttatcaaatagatttggtcatttaaccaaattgtaatgtatatgattaccagttttaaccatctcggcaaaaatgtaaaattaaaacgacatttccatttcagaaatctagcttataataaacttggaatagttacatgttgttagattggttcagttatggttgcaagtcaatttattatcacttatcagcattcaagtccaactttttacttcaaaacaaacaaaactagaaaatccaattcaatcaattttattggagcatttaagttaatctcaagtagtttaaacttgaaagagttggattcacaacttattgtatacacgagaaaaaatgtaacaaacgatattccaaaaaaaaaagtcaattaaagtgaacttatcagaataacattgttcttcatcatgtttaaaaccccaaaacaaaatccaattgcaaacaccggtttctcaatgtacatctctcaaaaaaacatagtaaacgactgtacataatgaaaatgggaactctttctatgaaccatcgaagactccaagtattctattacactggttagggagttgaaaagaagtaaaccataatgtgtcaaatccgatccaacatcaattccgttagcgcttaagaagtctttttgcatctgcaatatcctgcaatataacaatagcaccaaaacaaactagtacataatcaacattaacaacagctaggagcaaaagcactagtcaagaacttaatttaaccttaattaacaattcgagttaacaaagaaagaaaagagtactgaaagtacccgctgcagaaaaactgcttctttaggagaggtagggaactgcactaaaccgattccaacaattaatagcaaaggacactacaacgtatataggtagctggtgcaaagatatacattattaatattgactaactgagaatagcaataagcaaaaatgagcacaacagactcattactaaccaactatgtttggctacgagccataattgcagcctgcaagagagcaaactaaaaggcagagacagctaccagcaggctcaaaatcttgaccacatgcttcattgtccttgaaacaaagtttatgtaagatttgagtattgacaatataccagaaaagaggactacactaatgcattttccgatttcttgcatatttggagctgaccatgaacgggtgccattaaaggatatctatagaagtgaattccttcaaataacaaattgccaattctaaatccattacgcataatttccacacatcttaagcaacttatgtccagaccagaatctagcatagtcatgataactaaaagaacagtaaaatgcaacccaaaccatcaaaatgggaaaggaaaaaaaaacgacttttcacattttcttggatctcataatacaagcggtcaggagctcaaagccctttaagcataatttgtagaacctgaatcttaaaaaaaaaaagaaacacaaatacatgatttcccaccgttcctcaggattttaaacattctatagtcagatcctcaggaaatcaaagccattacacaacacatttcagaacattataggctaaatgatttgaaaacttgaatcctaaaattcattaagctgccccaaaaccaagcttctactaacaaaacaaactacaattaaccatccgaatcaaaccatgcacccaaaactcgaattgaaatttgatatatctaacaatgattgagctgccatcagaatgaattattagaaaataattttgtcacggttccttcagaccagagtaaactccaatcatccgaaactcaaaacccttgcgcaaaattttcaatcatcatttggcaacttattcaatcaaaccaacaacgaaaataaacaaaaggttacataaaactaaccaagcctatgttctaaagcaaacgaaatcaaaaaattcaaacaatcaataagatgctccactatttgcgggagagatggaacctttaagctcacagatctcgccgccattctcaatgtttcttcggctgttttaaatagttgtgtcattagggtttttattcaggtcttaaaatcatgggtataatcgtcaatttcacaaaataagcctttgtcctggataagctaaaccagtttccaaacaaatcttgcttcgattcacaaattattacgattgcaatccctaatttggaagtcccggttcctctttcgatcaaatcggagaatttcacggcatg

SEQ ID NO: 14659 - DNA, 3000 bp, Unknown
  misc_feature (1)..( 3000): cDNA_ID_3018473_gDNA_ID_2684211_Annot_ID_191528 3000 nt of promoter + ATG
cgtttaggcacttttagataattttatgagaatattacacgtagaggtactattttgaaactttagccacaaataggcactttgaaaggagaaggcactttaccaaatcaaaattcccaaattgccctctgaaccacaacgctttctcctcattttctctctcaactcttttctctatcgtctttatttctctctctttccaaaatcaaaaccaattttttacgggaatctcaatattccaaatcaaaactaaaaacccaatttcatatgatttatcatcatcttccctgtctctcaacaattatttgatttggttccatttatttctctccttgattaaggaatctctgtcatcgattacaatgaaaagtgaggatgttaaccatgatcagttaccttctaagcaatctgggcttgaaacggttcgtgatgttgagaacgcgagtagcagcaaaaaggccattgtcgatgtaacttcatctgaggcatagttgtccattgatgagtgtccaagcattcaagtccaaatggtcatctaataactcacatttgaagcatagttgtccattgataagtgtccaagcactctagtccaagtggtcatctagtaactcacatctgaagcatagttgtccattgatgagtgtccaagtactcaagtttaagtatataaagcgtgtaagaagatcaattgtagcagcaatgttctgttgttgattcttaatatattcttcgtttttaagttatgatagagaattttgagataatctcagaatttctatgatttgtaagaattatagagaaccaccatgattgatgattttgaaaaagaaaataaaaatgatgaaaaaaaaaacatggaagacagagaagataaaaaatgatgctagtttgtctccatgataacttgtccacgtaaacgtaaccatgtggaaataagtgattctcataagcaaaagaatatgcttttaaggttagacgttcaatgaaacatcaatttatcaagaaagaattaaattgtaccaaacaaggcgatcaaatggatatgaaatttaatactggaatttgccaacttgggttttccataaactctcaaatgtttgattttgataaactcttaaatgtttgattttgcaaggaaagaaaaaaaagtaataatgagaagagagagagagaagagagagagaagagagagagagagagagagagagagagagagagagagagaggaagaagaaggaaaaaaaaggaacgtggagagatgaaactttttttttaattataattttttaattttcaggggcaaatttgtcaaaagtttaatgaaaaagttggaaaagtgcctcatccctgacaagtgcctcaaaaggaataaaattctctaaaagtgcctaaacgagtccatttaaatatatccactcggaaacctttttactgatccatatctaatctatataccatgtccataataacaggagattcaattaaccgtggttcgtatagaaaccaaagttccatgtccataaggtcttgaatgtggaggtctctgcaaactgaaagaaaaatcaacaaataattttttggtatccataataacgagtccatttaaatatatccattcagaaacctttctactgatccgtatctattctatatatcatgtcaataataacagaagattcgattaatcgtgttttgtaaagaaaccaaagttccatgtccataaggtcttgaaggtggaggtctctgcaaactgaaagaaaaatcaacaaacaattttttggtatccataataacgaatccatttaaatatatccattcagaaacctttttactgatctatatctattctatatagcatgtccatgataacaggagattcgattaactgaaatctcgatgctacgtagatgaaacgagtttgacacatgagagaaagcaaaaatcaaatcaagccgctgttgttgaagaagaagaagtttcttttcattttttacaaagatgaagagagagagagagggagagagagggagagagagagagggagagagagagagagagaggagagagaaagaaaaaaaacgtggattaagagaatattttagttagaagttattttagtaaaaaaacataaagaaagtgtctagtcttttgaaagtgcctaaacatggaaatagtttttaaaaaatgtctaaaagtgtaatattctctcattaaaatcatctttttgactcttcctattcagtcaaaagaatttaactggatatgaaagaattcaaattcctatacatatctgtttgtatttttaaaaatttattgctattgaattgattgactgttattttatttatgatggttttgataataatatcactttttatgctcccgttagataagaatttatttattactttaatttctaattgtttttttgttcagttcaattattccaaattctattgcttgatatccactgggtaatcatttgaaaaaatcgttaaagatcgacaaatgagtgtatatcatgctctggtatatattaaactcctatccaatagaaaatagtattgtgaagagagaatataatctgctaaagtattcccactatccagaaaaatacaaagtagaaaatgcacaaaacattatggttagatttctatccactatcgaagattggaatactagtttataaaaccaaaaacgtcacggtgtaactcctcgactgcacgtaatgcatcgaataacgaaatagtgatatatacacagaaaactatatagtatcatataaaattctttagtaataattattaggtcttaagaaatacagtagttgcgagtttaattgactagagagagtcatgattagtttaacgataatgactatttaatcgggcacattcttttccaaagatacccctacgacaacattaaaaaatacaaaaagccgaaacccgcccactacaatgaaaagctccgccaccaccaccaccctctggaacg

SEQ ID NO: 14660 - DNA, 3000 bp, Unknown
  misc_feature (1)..( 3000): cDNA_ID_3018493_gDNA_ID_2684211_Annot_ID_191521 3000 nt of promoter + ATG
aacaatattacattgagaagggaactctaggtatcaggcgcatttgatgtacttttcgttgttgtgtttatcttaaggcttctctcacatcaaaagtggtgcaatcaaacagtgtatgtttcaccatgtttacgattacagatgtctaaccaaattctaagctcttaaaatgggcaaaatacaatcaagagaaaaagagccaattcatttctgacaattcttaatgtaacaactccagagaccattcacctgagcttccaaccatcaggtagatggcactaagctcttagggtttagatcccaaagcaagaagtatcttcttcctcggaccctgcaacgaaaacatagcttgtgaaaagagagcgtaataatgttgaacgaagagagtggatgtagtttttcgcgttacaacagatcaaacaaaactgagaaattgaaattcattcaaaatctgcaagatatgataagagtgatactagatgttgtgtggcaactcaacatgaagcttaccatcggtatgagcatagccttgaggtcatcatctgtcatatgcatgagagcatccatatcaacctgtgaatgaccgaaaaggataggaacgttatatatgcatcatccataacataacataaatttcaacctaatagaagatattacatacttcttccacttgaaacgctgttgaatatttctcgagacccaatgattcaagaaagctatcaaccgatgaatcagcctgaaccagaagatgacaagcaaagaaacattagtggatggcctgtatacaagggaagagacatcgtaagctatgtgtctaactacattttcgcaccggtcagaagaatggtttctcccaagcaataaagtactgatggaaaaatatagttgaagaaaagtgaatcatattgcctgctgtgatttcttcctggtagcttgactggaagtttttctagtctctgtttcagtcgctacgctcttcatacttggcctagcagcctccgctttggattttggtgggtcactgttttttggttgctgattcattgtcccagagagctgatcccgtaaatcccgcacgcctgaaccagcttctcgcccactttgagacccatgatgtctcttttggagcttcaaacgaagatctctaggatcaaccctgcgatctaaataagccatccgatagagaatcaacaaccaaacagaaatacttttgtcatacttaattttctactgaaagaatagatgagggggaaaaacatacttgaaagttgaggtttgtcactactgaaaagatcatgctcccatttgtcgtcctgcctttgcctgaaagcatgaggaaggagaaacttgagataaactgatatgtaattaacaatgaagactacataacgagaggaatataaaccattccccaacgcaaaagcaaaaaaagttcatcacccaaaagattcaattaaattgccttaaaaccctaatcaaatcaccaaccatcaacaaaaacatcatcagatagatcacatctccagatttaactatgcaggtaggcactcaaactagagaagctcataaagctgatctaattgacaatgcagtgaagttgattgaaattaccaattcaaaatgggcaaatcagagagtcctagtaagctaacaaaaagagcggattccatactctaattcatagagcgaagcaagaatcaaacttggggatgctacaaggaagattatacacaagaggaaaagactctaacaccaagtaccagctaacatactgaagaattttcgaggaaagcaagatatatctcaatagaattatgacggagagagggagatagataagaacctcttcccagtcacttgtcgcacgcgagtagagatgtctccagaaccgccattgatacgatccttaacgaccttcctgcttccagactcagcctccaatttatcagcatacatctttatccccttggatgaaaaatacagaaatttgtcctaaccctaaattaggaaaactcacaaactaaaaagttgtgtggactattagcagctctcaggttagagatgcaaatagaaatcctagaatctacccagaaatcacagagacggaagagaagctctagaacagaaacaatccattaatgtagaaaactgcggattttgctcacgatgcctttggcttcaccaggatctacgttgcgagagagtattcgggaaattaacatccaatcaaagtaacgggtcgggtcgggtcgagaatcaggattatgcgttcagaacaaaaaaaacgataaccggtttgactgttaaccagagttaatccggcgattcaaaagacgtttcggttcgatttttctttgacaacgcggctaagcttttcatttctttttttttgttttgtcaacacgcggttaaatttttgtttgtcagattcattttttttcttgataaaaaacatccagattcctttctttgtaatgttttagattaaaataaacaaaaaatccctaaaaaacgaaaaagttttgaaacttagaaagacggacataagcgagctagcttctaagctttcttcgctaaattcttggctaattctcttctatgactgatccaattctgcttcgactccatatctgaggtttctgacgtctgattaggtaactcccgcttttgttttttttggggggttttatccatttttaatgtctttgttgtctacttgtttcaatcgtatgaacttgagacgcgagaagctcagattcaggatccctaaatttttctctatttttttttttagttttgtttcgttgattacaactagtcctaggttaaagaacaacgtttacaacttattttgcttttttcagttgtgcctaggtcacttgtccgaatctgtataattcacgtgtatcttcctggatttgattacatttcatttacttagtgttgggttttacgttagtttaagctgctgagtactttgatgttttttgtttgtagaaa

SEQ ID NO: 14661 - DNA, 3000 bp, Unknown
  misc_feature (1)..( 3000): cDNA_ID_2995039_gDNA_ID_2684211_Annot_ID_191515 3000 nt of promoter + ATG
ccgagggatgagagatcaacgtcgacggtggctttcttagaattccggccgagtataatggagtaagactgcatatagtactcgaaatcctcaccttgaagcttcgcaaatccaacctccacatcgcttccgccaccaacagccgtagccatgccgtgaaattctccgatttgatcgaaagaggaaccgggacttccaaattagggattgcaatcgtaataatttgtgaatcgaagcaagatttgtttggaaactggtttagcttatccaggacaaaggcttattttgtgaaattgacgattatacccatgattttaagacctgaataaaaaccctaatgacacaactatttaaaacagccgaagaaacattgagaatggcggcgagatctgtgagcttaaaggttccatctctcccgcaaatagtggagcatcttattgattgtttgaattttttgatttcgtttgctttagaacataggcttggttagttttatgtaaccttttgtttattttcgttgttggtttgattgaataagttgccaaatgatgattgaaaattttgcgcaagggttttgagtttcggatgattggagtttactctggtctgaaggaaccgtgacaaaattattttctaataattcattctgatggcagctcaatcattgttagatatatcaaatttcaattcgagttttgggtgcatggtttgattcggatggttaattgtagtttgttttgttagtagaagcttggttttggggcagcttaatgaattttaggattcaagttttcaaatcatttagcctataatgttctgaaatgtgttgtgtaatggctttgatttcctgaggatctgactatagaatgtttaaaatcctgaggaacggtgggaaatcatgtatttgtgtttctttttttttttaagattcaggttctacaaattatgcttaaagggctttgagctcctgaccgcttgtattatgagatccaagaaaatgtgaaaagtcgtttttttttcctttcccattttgatggtttgggttgcattttactgttcttttagttatcatgactatgctagattctggtctggacataagttgcttaagatgtgtggaaattatgcgtaatggatttagaattggcaatttgttatttgaaggaattcacttctatagatatcctttaatggcacccgttcatggtcagctccaaatatgcaagaaatcggaaaatgcattagtgtagtcctcttttctggtatattgtcaatactcaaatcttacataaactttgtttcaaggacaatgaagcatgtggtcaagattttgagcctgctggtagctgtctctgccttttagtttgctctcttgcaggctgcaattatggctcgtagccaaacatagttggttagtaatgagtctgttgtgctcatttttgcttattgctattctcagttagtcaatattaataatgtatatctttgcaccagctacctatatacgttgtagtgtcctttgctattaattgttggaatcggtttagtgcagttccctacctctcctaaagaagcagtttttctgcagcgggtactttcagtactcttttctttctttgttaactcgaattgttaattaaggttaaattaagttcttgactagtgcttttgctcctagctgttgttaatgttgattatgtactagtttgttttggtgctattgttatattgcaggatattgcagatgcaaaaagacttcttaagcgctaacggaattgatgttggatcggatttgacacattatggtttacttcttttcaactccctaaccagtgtaatagaatacttggagtcttcgatggttcatagaaagagttcccattttcattatgtacagtcgtttactatgtttttttgagagatgtacattgagaaaccggtgtttgcaattggattttgttttggggttttaaacatgatgaagaacaatgttattctgataagttcactttaattgacttttttttttggaatatcgtttgttacattttttctcgtgtatacaataagttgtgaatccaactctttcaagtttaaactacttgagattaacttaaatgctccaataaaattgattgaattggattttctagttttgtttgttttgaagtaaaaagttggacttgaatgctgataagtgataataaattgacttgcaaccataactgaaccaatctaacaacatgtaactattccaagtttattataagctagatttctgaaatggaaatgtcgttttaattttacatttttgccgagatggttaaaactggtaatcatatacattacaatttggttaaatgaccaaatctatttgataacaaagagagatataagttaatgaaaccatgattagacaaatcgacaagcaaagaaaacgttaagcaaaaaacactaatcataataagcaaaaagtccatccatgttcatcacatgtacaaagatcctctctgtcactctagacttttcctctgtttgcttcttcttacaaaatgacacacttaaaccaaataaagaaaacatttcccccaatctttatacattttcttttgaattaaagaaaaaaataaaagtgataaaagaagaagaagaagtccccagctagctccttaaagaagcacatctctttactcatttcacgattcccctgtctcttgtttctctctcacttacctcttctcgagttttctcccattcttgggtcttcatcgagaccaaatccggagaaagttgatgtttttacagcacaaacagacacagacacatacatgtgttgtgtctccctaatcccattattactaactcgcatccaattcacacttctctcctaaattcccatccttttcagatccaaaacactctcctccaaaacccagattgccaaattagggaatttgacacaaaacccatctgagagcataatcaagagatagagagaca

SEQ ID NO: 14662 - DNA, 3000 bp, Unknown; identical to SEQ ID NO: 14658
  misc_feature (1)..( 3000): cDNA_ID_2730446_gDNA_ID_2684211_Annot_ID_191512 3000 nt of promoter + ATG

SEQ ID NO: 14663 - DNA, 3000 bp, Unknown; identical to SEQ ID NO: 14657
  misc_feature (1)..( 3000): cDNA_ID_1017434_gDNA_ID_2684211_Annot_ID_191511 3000 nt of promoter + ATG

SEQ ID NO: 14664 - DNA, 3000 bp, Unknown; identical to SEQ ID NO: 14655
  misc_feature (1)..( 3000): cDNA_ID_2686488_gDNA_ID_2684211_Annot_ID_191505 3000 nt of promoter + ATG

SEQ ID NO: 14665 - DNA, 3000 bp, Unknown; identical to SEQ ID NO: 14654
  misc_feature (1)..( 3000): cDNA_ID_2730462_gDNA_ID_2684211_Annot_ID_191504 3000 nt of promoter + ATG

SEQ ID NO: 14666 - DNA, 3000 bp, Unknown; identical to SEQ ID NO: 14653
  misc_feature (1)..( 3000): cDNA_ID_2730470_gDNA_ID_2684211_Annot_ID_191502 3000 nt of promoter + ATG

SEQ ID NO: 14667 - DNA, 2798 bp, Unknown
  misc_feature (1)..( 2798): cDNA_ID_2730401_gDNA_ID_2684211_Annot_ID_191535 3000 nt of promoter + ATG
cttgtcagagggtgttgaagctaaatagagattctggagcatgctctagcattcaattctcaaacagtgggatccttgggttgccctattggttgttcattccactggagagagtttttaatctgttagtgatttctcattcattatcttatccattaacaacacttctcttgttctgaaactttctaattgatgttgtgttactttggctaaattataacagagctaatggagttcaggaagcacatctcagtcatactcaggaactccggttattgccaggtgcgatttgctatacagaccctaattttttgctcatttactcatttgcttatgctagtcttgatgttagcagttcatcaccccagtcccaattagctgcatcatgaagatggtttaacattggttccagccggaattggtttgatttaattgctactttttcatttaacaggtaaaattagcatacggttgaacatagagattcctccatgcacggagcttgttgaaccgatacaagaaagctgcatatggcgacagacaagaggcgcaatcagtgaattctcgagtgctggaagtgcagttgaaccttcagaaaaggttatttaagagaattgcattcccgaattgtatggtttaaatccaggtagctcagaaattttgttttcataacttgcagattggagtttcacaacaatggtatgatgaattagacagcctcgccaaagaaatagccaaccctgaagcagctgaggaagaggaagaagaagatgttaacccctctgaggttgacagagaagaagatggacgtatccacattgattgtcctgtcaaaacaagtcctggctcaagtgaggtacgcctaaatctcctctcaagtctcttttatgtacagaagccaaactttactattagaaaaaagtataactttgtcgactccggtttgtgcagcttattgtttatgcagctttgtatttaagactagcgagaaacgaagagacagaaagtgcgacccaggaagaactggcgagaaaaatagcaaagattttaaagccagtacggaacattacaactatgaaggaagatttgtttgtgaatttgttgtccaagtcaaagagagaattgagagacattgtcttcataaagccgatgcatgtgcggataaggttagactcgaaggatcatccaaaagccgataactcaagagacgtaatcttgactgactcctctgttgaggttgatgtctctctctgacaacgaataacgatgcttttgcagtccattctttctcaaaggtaccaaatggctactctaattctttttgaggtggtaaaaatgagctcaataagacttgtataagtagtttatgacattatattaacgatggtccaagtttcatttggatttctatatttgagtgtttcttctatttttggttaaaaattagaaaatatcaatgaaattagcaaatttttgggtgccattagtaaataacaaaaaagagtgaaaataagaatatttggaaaaatgaagacacgatcactagaaaaaacagctgtcaagctctttaatttttcttttaaaaaccaaacagtttcaaactgaaatccaaactgatttttgaaatatgaggaacaacgaaattttgaacatatatagcatgttattgttatggtcctaataatgactgatttgcttgaagaacttatttgttactattccaacttattacatacatgtgtgttgatagatacatacatggataagaaaagtgtacatccatatgtttatctcaaatcttatttgcaagagcctcatgaagaagatatattgttgacttctttttgtaaacacaaggagacagagaaatagaaatgcctgccttttcttctgatttgttcgcattttttaaatagattttgggaataacaataatcttacaattattcgcatttgattttaaaaatatttagttcgtgcagccatcaacattacatcaaaccctttagttgcatttatcttatacacttcatggtctccatgttattctctctttttctgtttccagttttctctttcttctcattatttcccatttcttcaaactttacaatattaatcacttttataatctgttttaaatctataatacatatatgtgggggaaggttagagaaatgtgaggcacacaaacatgagaactatgagatatgtactccattttgcatatttaattattaacttaaagagtagtttaattgtctatattaagagaagaaattcagaaacctaaaacctgaaagaaaaaaaatccagttatctccttccatttttttaggagactcttccgcgcttcggatcccaacggttttggtgtagatttttcttgatctgggttttgttacatctttgacgaaaataaaacatatcaacgtgatgagataaagggaaaccctatgggtttcttgtgaaaggggcaaccattgtttatgaaggattctaaggtttgttcttcgttctgcattttttttaccaatccacatatgttttcctgatatttatctgaaaatgtgtttcttttgttcttgtcaacgcaggcattaattaattgaacaaaacgattcgaacaagacccattttttggtcttaatttgtggtcctcagactctgttttgtacaagtttcttcggactttgaatccaattcgccgtggtttgaaataagtttatgtctatataatcacaagaagaaggggaaaaaaaaaaggagagattcagacaacagctaccggagaaatg

SEQ ID NO: 14668 - DNA, 3000 bp, Unknown
  misc_feature (1)..( 3000): cDNA_ID_2730409_gDNA_ID_2684211_Annot_ID_191533 3000 nt of promoter + ATG
taggtatgtgaacgttgaggttatcagttgatgttttttatttcagctgtttggagtcatgggtgatagttaagtttatcagcctgtaattacaattctttggtttcttgaagggactctggcaaaatacactggaggacaggtgtactattatccaggtttccaatcatctgttcatggagataagttaagacacgagcttgctagagaccttacaagggaaactgcgtgggaggcggttatgcgaataagatgtggaaaaggtttaatagtttatgataatatattcgtttttgctacctgctatgtcaatatttgctaatgcattggtgtgctacttgtgatcttatatatttttgcatgcaggaattcgtttctcgtcctaccatgggaacttcatgctaaggtctactgacctgcttgctcttcctgctgttgactgtgacaaagcgtatgcaatgcagctatctcttgaggagactttgctaacatcccagactgtgtatttccaagtggctttgctgtatccttgaatagttgatattttaaacatacttgagtttaaacatacaacacatcatttagcttttagtaatccttaacagaactaagatataccgcctcttgtggagagagacgtataagggtacacacatctgttgcaccagtggttacagatcttggggagatgtatagacaagcagacactggttccattgtgtctttatatgctagattaggtaagctatattcaaatttttttcatatgctacttttgatactatttaatgacaatttaaattctgcagcaattgagaaatctttgtccgcaaaattggatgatgcacggaatgcaatacagcaaaagattgttaaagccctcaaagaatatcgtaatcttcacgcggtgcagcatcgcttggggtccagattagtatacccagagtctctgaagttcttgccattgtacggattggcaattactaagtccactcctcttctaggtggacctgctgatacttctcttgatgagcgctgtgctgcaggcttcaccatgatggctctgcctgtcaaaaagctattgaagcttttgtatcccaatttattccgtgttgacgaatggctcttaaaggtttgtgtatttttatctcaatgtccattatcaaacatcagtgttcaagaaatagtaaataatttgtgaattcacatgcttgcagccatcagcagcccacgatgactttaaagacgtattaaggagattgccgctggctgcagagagtttggattctagaggcctttacatatatgatgatggttttcgattagttttgtggtttggccggatgctttcacctgacattgctaaaaatcttcttggggttgactttgcagcagacctctcaagggtatgtatttttatccacatatatccttacatatgaatatatgaacaggcggtacattcgatgatgtatatgcatcattagtgtttttcaagaatttgaaacatgataatatgtgtgaaacccttgtctttcttcgtgttgggtctcttaggttacctttcaagagcaagagaatgggatgtcaaagaagctaatgaggttggtaaagaaactgagggagagtgatccttcatatcaccccatgtgttttctagtgagacaaggagaacaaccccgagaaggcttccttctcctcagaaatctcattgaggaccagatgggcggttcgagtggttatgtcgattggattctacaacttcaccgccaagttcaacaaaactaagatagctcacaatggtaaggaaaaaaccatcataatacttccaataacatgcttaaagtaccacatcatgttcgacgcatcttatgaagcggttttactttcagacaactcgggtgctaggatgccacctctttgtaaccattgaagaactcttgagctcaaaaatcttctacttaagcaggatcatggcggccttcttccttgggccataatgtgttgttttggataaagaagtgctactttttgatttttcttcatttgtttttctatatagaccttttttctcaagattaggcttttatttgcctaaccagaatggttatctccgtaagattagtcgttttttaaatcttttgttgccttttttttttgtcctcattcgattttttgttgatgtgcgtctgttctagatttattttgggagttgcagttcatgaatctgtcctaattagggttattaacaagaagatgctactgttaaaattttaaaatatttttatgaataaataatgttgtgaaaaccttagatttggatgaaacgcatcgttggtatacatcggtaaagttcatacataaacaatacggtgattgatcgctgtaagaccaactgttcctgcaatcacaaatagataaattaggatttcaatttttaactgctgtaattctgattcaaagattctggtcggttgaaccgggacggggaaaatagacgtggcaatgtcttattggatggtactttctagaaggttacagaataaaagcggtcgtcggtataggggtcaaagtagcttaaacgacgtcgtagaggaatcttcgaatctcccaatagcttgcctttataacaaacctctctgaaccattgctatccaagaaatctttcagatttgcgcatatcgacaattttccgagcggccagtttacgtattttgtttgtacgtgatcaaatctccctcgctttctcgctatcaattttatcaattatgtgttcccgattgtttctagatttggattttctatttgcggatactagttcttttttgttcggaatcgattatggatttggtcttaagatttgcggaaattcttttgtaggtctgatatagtttgttcggaatcattcttgttgctcaggtcttagatcattgcgattgtaaattttgattttgattttttttttcttcaggtagttaacgtgtttcaaggactttgaca

SEQ ID NO: 14669 - DNA, 3000 bp, Unknown
  misc_feature (1)..( 3000): cDNA_ID_2730416_gDNA_ID_2684211_Annot_ID_191530 3000 nt of promoter + ATG
atagcactagtcgtcagtcgtagatatctagaatggcaattcattgggtacatttcagcaaatgaatttggctccacgtcaccatccaatggccttgggaatgatttatgatcaagtcctggttccagcgatccaggaatagatgaaagagatagcgagttaaaatcttcagtcaagccttgaacgttactgggaggaggtgcatagtttggatgcagattctgctgtgctgccatatttggtcgctgagcaaaacctcctgtgtgaggaggatatgatgagactggagggggtcctgggggaccttgagatgtctggaatggcgtcggagcctgtaagacctgcttgctaggataaccaggaaaagatggctgcgaaccgcccacgccaggataagacggagtaactggaggcattgactgttgaaaaccaggcctggcaggcatatgataatctgtagcagggggataagcatttgctccaggtagcccagaagtcgtactttgtggcggaggccccattgctacaggtgccatcggttgctgtgggcgaagagacataggaggagataagtgacctgcaagagtttgaggtggtggtgggccctgaggagggttttgtgtagtcgggaatggcggggatggaaaacgctgaaaaggggcaccaccaggaggaccatatgctggtgaaggaaacgaatttgatgatggcggtggaggtctactcccaggaatctgagaaacaaaaggagacggctggccaggcctcatcgtacccactggtggagccggaggaggaccagaggcagtgaaaggtcttgtaggttgggatgcagatggtgtaaaaggtctaaagccaaccgcctctgatccagtgggtggtccacctgattgaggaggaatccctggtggcggagcagatgcaaatggagaggaagcaggcctagctggaaaatttggatagccctgattctccgtacccattattgatcacaacttatcacttacaacagttgtcagagttatagccaaactggaagctaagggaccagatcaatacaatcccagattctcttcgatgagtaccttagaatcagattcgttcacggaagcttcatatcatctggaaaaaaccagtgtagttctctttcacagtgccgacctggacagatccgcctctcaaaatccgtagctatctctagtgatctttcaaaattggtaacttctgtgagatatttgaggacgatcttctacgatggtttagatcttttcaaaaaagtaagcctctccgattcacagttccttattcaattacttaaaaacttttcaattcttttcgagcaagacgatcttaccgggtgatagatatccagtgagaatcgtctacgaaaaagtccctctccgtaagtgaattctcttatgaagatctggatcaataaccattgaatatcagctaaaattcaacattaatatcaatctaacatgattagggtgtcgaagactacctgaagtgagaggaaactcgagaaactgcggagcacgaaactgattctacagcgatcggcttcagatcgtctgacccgaagaagattttcgatacggaattggagaaccaccaagtgcagcgaaagagacgatgtgatatattatgggccaggtagtggctaacagttttatatctctccagcccatttaacagtttcgtcctatcactgtttttttaataaaatatccttttcttttcctttttgataaagaataaatctgtaaatattactttcatagatttcatttctattattttataaaatagtaaaatgaaatttaatactaacagtttaaaactcttcctgattatgtttttcggaatttctaaatcaatttattttaaagatattataaataagaaagttatagttataaacaataattttataagaaattaataaagaattcattgatgttttatgccaagattttatcgatttattatgctcacatgatcatgctataactatccggaaaatcagtaggagtataatgcatgactgtgaagactagaaccaattctgcatagttttgaagaaactaaggtaatgtcacttacatgattaatatataagatgtcttatacacagacaatacagagagatataaaagcaaataatgttaaccaataaccatagtccatagaaatcttcttgattgcccccaaaccacaaatcgattttcatggaaatgatggagtttggtgtagaatcgaacaccaagagccaaacctaagatgaaaagaggaacaagaaactgaaagagcttaatcaacaacaactcagaactcttcaattcaaagctcttgttatcttgattatgctctgtctgatttggggtagtagtagtagcaatatcactggccttggtagagagatctatgtctccaacataaaactcacttaacatggcgattcctgtgttgagaaagctccgacaagtttaaaacctttccatttccgaccatttttaattatatatttttccaaaattgtggtgtgtaaatttccaaggaaagagaatgtttttgtatttgtttatctgattgttgaaaattgagattagctctaacatcaaccgtttctatcgtatgagtaccagaatccacgcttgtcttgttgtcacacaaactcattcacgtaagtaaaagtgtatcatacctttctcctttttcttcttcttcttctaatttcttttctactttcacaattaaaccccaatattttatattatttccctaatcaaccctttggcatttaaaatttacatataaaacataagagaaaagatgggcctgactatcctaaactaagtacataacccaacagacaattatcacggcccaataaaatggtgctaaaaggcaccgcaaaaccctaatttgaataagctgctcacttttaatcaccccggagtagtaagcttgcggctgatcagagctgagtgaaaaatg

SEQ ID NO: 14670 - DNA, 3000 bp, Unknown; identical to SEQ ID NO: 14661
  misc_feature (1)..( 3000): cDNA_ID_2995039_gDNA_ID_2684211_Annot_ID_137339 3000 nt of promoter + ATG

SEQ ID NO: 14671 - DNA, 3000 bp, Unknown; identical to SEQ ID NO: 14660
  misc_feature (1)..( 3000): cDNA_ID_4254519_gDNA_ID_2684211_Annot_ID_137344 3000 nt of promoter + ATG

SEQ ID NO: 14672 - DNA, 3000 bp, Unknown
  misc_feature (1)..( 3000): cDNA_ID_94091_gDNA_ID_2684211_Annot_ID_137345 3000 nt of promoter + ATG
attttcttatatgggagggcatatctggtaagcctggtgaactaatgttggttgtgacgcatgtgctatcttcatcagtgattattgtacgattaattcttgcatattagtactggattaaggtctttataaccctgcttgtgtttggtttatgctaggcactttctggagttggagctactattcgagaaagagctattcttctggacgatactgcacttagcgccgccttgaatgctcagtttctgtttcagattggtgtcttcactgctgtgccaatggttttgggatttattttggaacagggttttctccaggtactggttcctcaccattttagtcatatcatattgtaatgccatattttctgatatgattgacagggagactgacacgtatactgagttagctctttcatttacttgattatctacagtatacttttattggattataagtcgacttatggtcacccatttacatgttttctttctgatgttttgttgttagttagaaatttgtctctgtttaggccatctttcgtggcgcattgtcacttacagctatgcactgtattctggagatgaacttttgtaatctgaatgatcatatttgtttgttcgattatctgaaggatatccttacatttggtcaaaacgaataatttactttttgtgttttgcttgttaatagaacttaatcttctccatcttccattgtgtaggccatcgtcagtttcataacaatgcaatttcagctatgtactgtcttcttcacattttcccttggtacaagaacccattattttggacggacaattctccatggtggtgcaagggtatattctcattctcggttctaaaaaatctctgtaaattttttggaatgtgataaccattgtttgttaacagtaccaagccactggaagaggcttcgtcgtgaagcatatcaaattttctgaaaactaccgtctttattccagaagtcattttgtcaaagcgtaatctcctcttctttagttcttatgtatatacatttctgatgtatacctgtttagccatagtaaaggattgaaaattcattgatatgctacttctttttcgtttctctagaatggaagttattcttttattggttgtgtaccttgcgtatggcaatgatgaagctggtgcggtttcctacatcctgctgacagttagcagctggtttttggctgtttcttggctgtttgctccgtacctattcaaccctgccggatttgagtggcagaagtaagtggtgctatcttatttatatcatgttgagtgttgagtaacgtgtttctcattgaacaacaataaaattatgctttcagagtcgtggaggacttcaaagaatggacaaattggctcttttacagaggtggaattggtgtgaaaggagctgaaagctgggaagcatggtgggaagaagaactggtaagaactattctcagaaagttttcttgcttgtctgagaactaatttttctaacttagaaaataattattatatctgtgtgtcgacagtctcacattcggaccttgagcgggaggataatggagactattttaagtctacgattctttatcttccagtatggtattgtctacaaactgaagctacaaggatcagatacatcatttgcggtagagcgctccccttcattgactacttgtatctacgcctttgcatatcttagtctgctagtatttgtgcttaataatatcactcatctatctgcaggtgtacggttggtcatgggttgcatttgcaatgattatagttcttttcaaggttagtttattccatcagcatgcttcattttccgataacctttgatcctctgactaaatttgattacatgatctgagatatctcccatgtgaactttgaaataggtctttaccttcagccagaagatttctgtcaatttccagcttttactgaggtttatacaaggtctatccttattgatggctctagctggcataatcgtagcagttgtgctcacacccttgtcagtgacagacatatttgcatgcgtattggcttttataccgacaggatggggaattctttctgtaagttgttcttcttgctcacctcagataccttgatttctttctcatctctgcagattcctcctaattttgacaaacaaatcttctcccgttgtagattgcgtgtgcttggaagccagtcctaaagcgaatggggatgtggaaatcgattcgttccctagcaaggctatatgatgcgttaatgggaatgctcatatttcttcccgttgctctctgctcctggttcccttttgtgtcgaccttccagacacgtatgatgtttaaccaagccttcagccgcggtctcgagatctctcttattcttgcaggagacaatcccaattctggtctttaaacttttggaagctgttatgtttatgtttttcatacatttatttgtgtttagttttccgagtgtagcagtagtaaatgatgggagcctctctgtagctttaggcattttaagacttctgtaacatttgtccccaaaaaagaaaagacttttgtaaaacataacctagaatctttaagatattacgtagaaatgcctttggaaagaaagcgattcaaggaacaaagattaatttattcattaacggtaaaagaataaacctaattactggatccagtcattaacgcgcatgttatgtttgtcgttgttgacgaatccgtgatttggatcctttgaatgtttttggaagtattagtggttagggatcaaataaagcccaattattcgacaggcccatctaacaaaattggggacctaattccaggcgctgaaaggaatcgctggcacaagtagaaggttctagtcggaaggtctcagaagtctgtctacagaggtaccgttggggcagagagcaacatattactagaaaactccagagttcgttattggagcttctaagcagagagag

SEQ ID NO: 14673 - DNA, 3000 bp, Unknown
  misc_feature (1)..( 3000): cDNA_ID_2730428_gDNA_ID_2684211_Annot_ID_137346 3000 nt of promoter + ATG
tttttggttttataaactagtattccaatcttcgatagtggatagaaatctaaccataatgttttgtgcattttctactttgtatttttctggatagtgggaatactttagcagattatattctctcttcacaatactattttctattggataggagtttaatatataccagagcatgatatacactcatttgtcgatctttaacgattttttcaaatgattacccagtggatatcaagcaatagaatttggaataattgaactgaacaaaaaaacaattagaaattaaagtaataaataaattcttatctaacgggagcataaaaagtgatattattatcaaaaccatcataaataaaataacagtcaatcaattcaatagcaataaatttttaaaaatacaaacagatatgtataggaatttgaattctttcatatccagttaaattcttttgactgaataggaagagtcaaaaagatgattttaatgagagaatattacacttttagacattttttaaaaactatttccatgtttaggcactttcaaaagactagacactttctttatgtttttttactaaaataacttctaactaaaatattctcttaatccacgttttttttctttctctctcctctctctctctctctctccctctctctctctccctctctctccctctctctctctcttcatctttgtaaaaaatgaaaagaaacttcttcttcttcaacaacagcggcttgatttgatttttgctttctctcatgtgtcaaactcgtttcatctacgtagcatcgagatttcagttaatcgaatctcctgttatcatggacatgctatatagaatagatatagatcagtaaaaaggtttctgaatggatatatttaaatggattcgttattatggataccaaaaaattgtttgttgatttttctttcagtttgcagagacctccaccttcaagaccttatggacatggaactttggtttctttacaaaacacgattaatcgaatcttctgttattattgacatgatatatagaatagatacggatcagtagaaaggtttctgaatggatatatttaaatggactcgttattatggataccaaaaaattatttgttgatttttctttcagtttgcagagacctccacattcaagaccttatggacatggaactttggtttctatacgaaccacggttaattgaatctcctgttattatggacatggtatatagattagatatggatcagtaaaaaggtttccgagtggatatatttaaatggactcgtttaggcacttttagagaattttattccttttgaggcacttgtcagggatgaggcacttttccaactttttcattaaacttttgacaaatttgcccctgaaaattaaaaaattataattaaaaaaaaagtttcatctctccacgttccttttttttccttcttcttcctctctctctctctctctctctctctctctctctctctctcttctctctctcttctctctctctcttctcattattacttttttttctttccttgcaaaatcaaacatttaagagtttatcaaaatcaaacatttgagagtttatggaaaacccaagttggcaaattccagtattaaatttcatatccatttgatcgccttgtttggtacaatttaattctttcttgataaattgatgtttcattgaacgtctaaccttaaaagcatattcttttgcttatgagaatcacttatttccacatggttacgtttacgtggacaagttatcatggagacaaactagcatcattttttatcttctctgtcttccatgttttttttttcatcatttttattttctttttcaaaatcatcaatcatggtggttctctataattcttacaaatcatagaaattctgagattatctcaaaattctctatcataacttaaaaacgaagaatatattaagaatcaacaacagaacattgctgctacaattgatcttcttacacgctttatatacttaaacttgagtacttggacactcatcaatggacaactatgcttcagatgtgagttactagatgaccacttggactagagtgcttggacacttatcaatggacaactatgcttcaaatgtgagttattagatgaccatttggacttgaatgcttggacactcatcaatggacaactatgcctcagatgaagttacatcgacaatggcctttttgctgctactcgcgttctcaacatcacgaaccgtttcaagcccagattgcttagaaggtaactgatcatggttaacatcctcacttttcattgtaatcgatgacagagattccttaatcaaggagagaaataaatggaaccaaatcaaataattgttgagagacagggaagatgatgataaatcatatgaaattgggtttttagttttgatttggaatattgagattcccgtaaaaaattggttttgattttggaaagagagagaaataaagacgatagagaaaagagttgagagagaaaatgaggagaaagcgttgtggttcagagggcaatttgggaattttgatttggtaaagtgccttctcctttcaaagtgcctatttgtggctaaagtttcaaaatagtacctctacgtgtaatattctcataaaattatctaaaagtgcctaaacgtgtcatattgccttttaatgattgtgtttgtcaaacttgacgaagcccaaacctttcggagcccacttgcatacaatcccttattccccttaaatctcaaaccgagagtaaaccagaacaaaccgaaaatcacaaactcacagatcccaaaccgagagtaaaccagactccgattttggtcatcacttgattcgttatcgtttcttcgccggagctcagcgtttatactctgtaatgccagatccgcggtaacgcaagtcagtgacctactccggcgtttatcactgaatccgattatg

SEQ ID NO: 14674 - DNA, 3000 bp, Unknown; identical to SEQ ID NO: 14659
  misc_feature (1)..( 3000): cDNA_ID_2730424_gDNA_ID_2684211_Annot_ID_137347 3000 nt of promoter + ATG

SEQ ID NO: 14675 - DNA, 3000 bp, Unknown; identical to SEQ ID NO: 14669
  misc_feature (1)..( 3000): cDNA_ID_2730416_gDNA_ID_2684211_Annot_ID_137349 3000 nt of promoter + ATG

SEQ ID NO: 14676 - DNA, 3000 bp, Unknown
  misc_feature (1)..( 3000): cDNA_ID_2730412_gDNA_ID_2684211_Annot_ID_137350 3000 nt of promoter + ATG
attattgctataatacacgcatgacaggaacttatgttcttaaaagcttttcatgacgatgttcaaatcagcttaggtacagaaagcatcacatcagtaaaagtgaacagtacacaagagaaactaaaggtgaagtgaagcataccttgatggtgtcgtagtggttccacccgacttcagaagaaaggcgacccaacagacagtatttgtgtccagcctgcagcctcaagaccctgatcaagaaggaagaatcaaagtttcagagactgtagctacttgtaagtataaatgaaggaaactgaaaaaaaatgaaaatgaaagggtaaaaggacaaacttgagagcatcaggaacgaccatcctcttgatcttgtcatatggagtaggaactccttcaaagaccttcaagcgggcaagtgcattagctccacgcttagtcttgtgtggaatcatactgccacacaaacaaaaacaacaattcaacatcggatttggcacattttctcaaacaaaaaacaaaaactacacattgtacaactacaaaaacatcaaagtggattctctactttagtatgattccaatcctagagcaattttcaatgaaataagagttcatatgcgctttctacattattcacagtactaaattcataaaatcggtgctcgaatcagtagctaaaaataacaaaaccagagagagatcgaagtaacgaacccgcgaacggtacgccagaagatcttggagggagcacggaagtgaataggtccgtgagaaggtttagtgttcatacgcttacggagaaacctcatgtacttcatcttctgacgaacaagtccgccggagagacaaatctcctcgcaccggacaaccacaatattctggccattgagcagatcctttgctacaaccgaagccaagcgacctagcatgtggtgacgagcatcaaccaccacgcgcttcgcgcaaattcctgatccagacaccatttttcactcagctctgatcagccgcaagcttactactccggggtgattaaaagtgagcagcttattcaaattagggttttgcggtgccttttagcaccattttattgggccgtgataattgtctgttgggttatgtacttagtttaggatagtcaggcccatcttttctcttatgttttatatgtaaattttaaatgccaaagggttgattagggaaataatataaaatattggggtttaattgtgaaagtagaaaagaaattagaagaagaagaagaaaaaggagaaaggtatgatacacttttacttacgtgaatgagtttgtgtgacaacaagacaagcgtggattctggtactcatacgatagaaacggttgatgttagagctaatctcaattttcaacaatcagataaacaaatacaaaaacattctctttccttggaaatttacacaccacaattttggaaaaatatataattaaaaatggtcggaaatggaaaggttttaaacttgtcggagctttctcaacacaggaatcgccatgttaagtgagttttatgttggagacatagatctctctaccaaggccagtgatattgctactactactaccccaaatcagacagagcataatcaagataacaagagctttgaattgaagagttctgagttgttgttgattaagctctttcagtttcttgttcctcttttcatcttaggtttggctcttggtgttcgattctacaccaaactccatcatttccatgaaaatcgatttgtggtttgggggcaatcaagaagatttctatggactatggttattggttaacattatttgcttttatatctctctgtattgtctgtgtataagacatcttatatattaatcatgtaagtgacattaccttagtttcttcaaaactatgcagaattggttctagtcttcacagtcatgcattatactcctactgattttccggatagttatagcatgatcatgtgagcataataaatcgataaaatcttggcataaaacatcaatgaattctttattaatttcttataaaattattgtttataactataactttcttatttataatatctttaaaataaattgatttagaaattccgaaaaacataatcaggaagagttttaaactgttagtattaaatttcattttactattttataaaataatagaaatgaaatctatgaaagtaatatttacagatttattctttatcaaaaaggaaaagaaaaggatattttattaaaaaaacagtgataggacgaaactgttaaatgggctggagagatataaaactgttagccactacctggcccataatatatcacatcgtctctttcgctgcacttggtggttctccaattccgtatcgaaaatcttcttcgggtcagacgatctgaagccgatcgctgtagaatcagtttcgtgctccgcagtttctcgagtttcctctcacttcaggtagtcttcgacaccctaatcatgttagattgatattaatgttgaattttagctgatattcaatggttattgatccagatcttcataagagaattcacttacggagagggactttttcgtagacgattctcactggatatctatcacccggtaagatcgtcttgctcgaaaagaattgaaaagtttttaagtaattgaataaggaactgtgaatcggagaggcttacttttttgaaaagatctaaaccatcgtagaagatcgtcctcaaatatctcacagaagttaccaattttgaaagatcactagagatagctacggattttgagaggcggatctgtccaggtcggcactgtgaaagagaactacactggttttttccagatgatatgaagcttccgtgaacgaatctgattctaaggtactcatcgaagagaatctgggattgtattgatctggtcccttagcttccagtttggctataactctgacaactgttgtaagtgataagttgtgatcaata

SEQ ID NO: 14677 - DNA, 3000 bp, Unknown; identical to SEQ ID NO: 14668
  misc_feature (1)..( 3000): cDNA_ID_2730409_gDNA_ID_2684211_Annot_ID_137351 3000 nt of promoter + ATG

SEQ ID NO: 14678 - DNA, 3000 bp, Unknown; identical to SEQ ID NO: 14652
  misc_feature (1)..( 3000): cDNA_ID_3044781_gDNA_ID_2684211_Annot_ID_191501 3000 nt of promoter + ATG

SEQ ID NO: 14679 - DNA, 2798 bp, Unknown; identical to SEQ ID NO: 14667
  misc_feature (1)..( 2798): cDNA_ID_2730401_gDNA_ID_2684211_Annot_ID_137353 3000 nt of promoter + ATG

SEQ ID NO: 14680 - DNA, 3000 bp, Unknown
  misc_feature (1)..( 3000): cDNA_ID_2730534_gDNA_ID_2684212_Annot_ID_137355 3000 nt of promoter + ATG
ttattgtttctccaccttctccttcttcttcctcttcttctttccttttttttttttattgcaatttttcttataagttagtgatggagggtgacttaattagagtttgtatctagtcgaattccaaaaaaaaaaaacagtaaaaattggtgggtcaatccacttgtgttctgaaattttttaaactaaaatatctatttcgatgtgtaatatatatttttgcagtttaactttaacatttataattgatattactcattgtttttggtattttctctacaggtaaactttatttttgttgtcatttttctaaaataaaatattgtaaaagctttttaaaatggactttgatacagacattttaaatacaaacagacaaagacgagcaagagaataggggaccctctttgtcatttgattgacatatacaggtatatactataaaagaaatgtgacaaacagtcatctatattcattttagtgatttttgtttcacctaatctcttaaagtttaagtgtcacattatactgtatattactagccctgtaattctgaaacaaattggactattattttatacactagttctgtttacacagaccagtaccgtttctgctccttaactggattaactttaatttttactatatcaataaataactgaaatagtgcatgttactgaaatgacgtacgagtacaaaagatttccaaattattataccagatacacatattctgccaagtttaatgatattattatcgcagacagattagttttaaaggatgaaaaaaaatatactttgacaggggccaataatattgttttgtgacgcaggtgaacagcactataatatatatagcagaccgatggtatcacttgggcaataattaaactgaaatagaaaaaaataacaattttgaaaaggataaaaaaagagagtcacagaaatattatcagagctataaagattatagatcccctgacgaaaaataatttagattgtaaatagtacagaaactatatataataagcatttaataatggataggcttaggtaagcctatgcaagtacagcaggttttgaattattggatgaaacatttgtttcaaatattagattttaatttttataaatctatttgtgtaatacttatatatatatatatatttaaaaatgaatattatagggttgtgtaggggttagggtaaaagaatgacttgggagatttaacataagatcgtgtgggcagttaatatttagtgagatagatagatagtgtagtacgtttgcatttattatctttttacctgattcttttgtatcattctacacacacgtgccaccgccgacacctgctatctttctactgtttcattttaatttttatcttacatttttgtcaaacatttaatatcgacaatatgaattaaaagtttttgtttccaattatttttctcacaataattttttaaatagttgtgttgagacacttgacgaaactcatgctttatgtattgttggtttactataaaccgaacatgtttgcttcgttttttttttttttgaaaaaatgatagtaaaaatatgtgtcaaaaccgaaacacaaacaaccttatattccattttttattatgaggaagagtatagaatcaaccgaaccaacaaaagaaacaaagtgtaatacacagaattgagttaaccgttggagaaagtggttaaaggaaaaataaggaaacgatcgaaaggaattggtatatatctgaggggagaatgtgtataaaataaaagaaaaaaaggtctgactcatgaatgtataatgatatgcttacacccgcacgcataaacctctgccatctttttactgcacactcttttccttttctcttctttaaagtcaattttatttgctgataaccacaaaatgtagcaattttagattacattatttgtttcacatttcttgaaatctgaaaacttttaactgcgactgcaattgttttggttgagaaatcgatcgacttggagtatgagattaccttcttatcagtgtctttagtataacggttgcattgcatatatatttcctctcaaactttaatgatatcagttcaactagtctggatcaaatgtaatattgatactttccttgaaaacacattatttggtgcgtgggaagaatgatcttaaagagatgataaagggcactagagttttggttttctttgtaaaatagtgtatttatgcaaaactcaacattatatggatgtttgcattatggtatttttcaactaatatacacccaaaacagtatccttattaaacagctctctctctcgttttgttcaaactaacaagagaaaaatgtcagcttttgttgaaaaatagataaaaattatgacataaaacccaaaaccaaaacgtcaacaccatttatcataaattacatttgtagttagctaaagtacaaaaacaacactgtaaatgatccattgaccaatcgagtagtcattaacgaaagatcacaacttaacatcacccagtctaatcaaaactccaagaccataagaattttgctaaagcagcagtatagtgataaacacacaaaacgggaaaagttgttttacaatttagaatgtcatatactttaattattatttgcatagggaaaaatagaaagagactcactccccaggtgagggcaaatagaagcccctgctccctgaatttcacagcctttatcatcaatgctcctctaacctcaaacactcaaaatccacacatctatacacatacctctacatacacactccattttctctctctatctctattatatcttcgatttatgtgccattttggtatataaatatataatcttgcacacaataaggttatacttcccatcaccttttgtatcattgctatctttgttcttccttctggtgtctcttcagtgtaacaaaaagtctctttttcagttatattaagtaaaagatg

SEQ ID NO: 14681 - DNA, 3000 bp, Unknown
  misc_feature (1)..( 3000): cDNA_ID_2730530_gDNA_ID_2684212_Annot_ID_137356 3000 nt of promoter + ATG
tcactgggacattgatagactttacgaaattcgatgttgttcctcgttggagctgtcaagaacagagattgccgcagaaattgatgaacatcttctggaatctggaaagaattagctccaagaatatgaattttgtaaactacgatgaatcagtgaagactgtgagagtgagagagattgagaggacctgtaatggtaacgcggggattcgaaaagctctgaggagaagataaccatggagaaatcgctgccatgtgtttcaagatatgtccgcttctctgttttcacgaaatctatcgctactttgctgtttcaacttttattattttttagtcctaaaataatgtttttattaagtgactgaggattaaaattcaatatttataattttcgaataaatgctctaacaattaaaaacatatataaaataaaattatgtaatgcatacatccaagtcgacacataatgacacaacatttacacaattctgtttttgataaaatgtagaaaattataaaataatgaatatctttgagcaattgacgaccccaaatttttaaaattatttgtattaattagaatgatgaatactgaacaatgtacaccttcctagttagttgttaaatattactgtacttggagacactttcatagtttttttcaatcccaaacaataataaaactacccaaccatcatattaaaagtatctattttcctaaataagccacatatatcttttaatttcatcatttctaacttaaaatttttagtactttatctaatacttttgtaaatatttcgagtgatattaacttttagttttaccttagtcatagaataaattatgccagcagtagttggtcatccacatcttttacctgctggcatagaatagtttaccttagttttcaactaaaaaaacataagttaccatagtcatatttcaactttagtatacagttgaaatatgacagagcatgtaaaaatgtggatgtttttggttacaaggtttctttagtcagaatggtcaacaaagtttctgacacgtgtcttattcagagtggttactttgaccagctgctagttatatttttgactcatcaaattcaccggcaaatccagtgagtaacgacggtcacgctgttccacgaagcttcgctgtcaacaccatcatcggaacttaccggagttcgttacggtaccttaaacccaaacccttctccgttttcgctttgttgattatcttcttgagtgacttcgttttgagaatttttctgggtttcggcattgtggaatcgaaattagtttttttttttctgttttgggtctcctctgtctcctttaactccattttcctacgaatctgtttctttaaccctaggaagacgaaaattatcgcttcatcgccacttattctagggttttgaatgcaaagaagaactaatttcataaacctgattgagcttagatttcaaatgatttcgactgattcgtactatgaaactcatcttccacatttagtttctcaaatcatttgagaaatctagctcaaacgattcgagtttcagaacttttgttcatcaaaattaagaatttggtcatgatctagcttagtttgtttcttcccttgtactttcaatttgatgttcttggaatcttccttcagagagattagatccttttactcataaagttttaacctttgctctgtttgtatagaaaaatcttataggtctctttgcttttacatcttcaaacttgacttgtgcttgtgatttgattgttgtcttcttcttttgctttcttaattgtgatattattaacaggtaggtttggattctatctcttgtgaaaaaaacagaaacacaaagatgaacgctgagaataatcagactactactactcactcgaaagtgatctcacatgtattctgcactggtactgctaagctaggctctgttgggccacccattggtcttgttgatattggcgtcagcgaagttgcttacatcttccgagtctctcttcctggcattgagaaaaatcaaggtaagccttcacatttcttttctccttatgtcctgttgttggataatgaaaataacaacctgttaataccggaatggattcctcatgttttgggttagataatgaccaatgacgtgaaaagaaagctgctttcttttacgctatccgtgtatgaaagcaactttgacccaaaatgctatcttctgttctgttaatagataagatcaaatgtgaaattcagagggaggggagagtttgcatccaaggagttatacctgagattgcgattccaagtgacacgggatgcttatacagaatgcaagtgcaacagctctgtccgcctggtccattctcaatcacgtttaatcttccgggacaagtggatcctcgcttgttttctcctaattttagatctgatgggatctttgaagtcgtcgtagtcaagctcggagtgcgcatcccaacttcatagttccggttttcattcaaccacgatatcctccatgcttaatcagcatttagttgcagtggccgacctgtaagtctttggtcggatttagcagaggttagagactcaagaatgttctagtttcttttgtgtagaaccatgtccaatgatccggttccttaagatgttcttagactctgaaaaaaagcaccttgatgtgaaacggaactgttttaaccaagattttggcaatcacatcttacaactaaaactctttgtaccaaagagggaaatttaaaacttataatccaaattttataaataaagttgtcaaagtcaactaaagaagtggactcgatccagggaggtgttgtgttcctcacagtcaaaccaaagcatattccatatttgtctccaataagaaaaaatctccaaaaacacattcaaatgaaaaatacaaagacttctattgttctcattctccgtatcttgaaaaaattcttaaaaaatcgacgaaacgatg

SEQ ID NO: 14682 - DNA, 3000 bp, Unknown
  misc_feature (1)..( 3000): cDNA_ID_2730528_gDNA_ID_2684212_Annot_ID_137357 3000 nt of promoter + ATG
ttagagctttgttcagcagattcttcatctgtaaactgtaatacccaaaagagagtcgttgtgttagacataagatactaataagataggttattgtggcaatagactagagttacctgtcctgtgacagtgtataaacggttgtaccatccgtttgttgccattccaattgcagagtacaaatgcttgcgagcttctccagggttttgtaaggtgtactcgatgtaatagaatcctgatcatagattgtgtcaacgaaacaatgccaagatactgcagagattctcattgagttgagatttttgtatttacccttagaagctctgctatcgattagctttgcagtcactcctactggtttttgccagcttctatccaatccactgacctatacataaatgtcatgttgacatttgtaaggaaatctttttgcagagagtttgtttgtttgtttcaattgcatgtagagagactaaccaatgtttcggcgaaagcttcgacctttccgaatgattccatcctggtgaagtctggacctagtccagtgatcgctatactcactgagacgatccatatacatcacctatcggttagctcatgacttctgtctgatccagagagtaaacaaaaagaaacaaattttgataaattttaccattggaagttgaagtttcttgtgggtaaaaagctgtgattgacttgaatccattaggttctgcttgcccgacttgccaatctttatgtgaatgcagatcaaattcattcatcactcataatgatttcgccactatcataagtatctgaaaacagagtttgattagattaccttgtgggattgatatctcgaatttgttcgtttcatctgtgtacacacggaaagcttctgatgcatctgagattcaaaagaagttgttattagaaattctcaaggaatcaatatcatcaaaaacacatagaatcaacaatacttgtctctgcaaatgcaggtgaaatggccaatggaaggaagaaaacagaggaagctatctgtaacatgacgtctcttctcttcatcccaacatgatctctagacctgtttactttaacagattcagaacaaacccagataaagaaaggtagtgaatttcactgggacattgatagactttacgaaattcgatgttgttcctcgttggagctgtcaagaacagagattgccgcagaaattgatgaacatcttctggaatctggaaagaattagctccaagaatatgaattttgtaaactacgatgaatcagtgaagactgtgagagtgagagagattgagaggacctgtaatggtaacgcggggattcgaaaagctctgaggagaagataaccatggagaaatcgctgccatgtgtttcaagatatgtccgcttctctgttttcacgaaatctatcgctactttgctgtttcaacttttattattttttagtcctaaaataatgtttttattaagtgactgaggattaaaattcaatatttataattttcgaataaatgctctaacaattaaaaacatatataaaataaaattatgtaatgcatacatccaagtcgacacataatgacacaacatttacacaattctgtttttgataaaatgtagaaaattataaaataatgaatatctttgagcaattgacgaccccaaatttttaaaattatttgtattaattagaatgatgaatactgaacaatgtacaccttcctagttagttgttaaatattactgtacttggagacactttcatagtttttttcaatcccaaacaataataaaactacccaaccatcatattaaaagtatctattttcctaaataagccacatatatcttttaatttcatcatttctaacttaaaatttttagtactttatctaatacttttgtaaatatttcgagtgatattaacttttagttttaccttagtcatagaataaattatgccagcagtagttggtcatccacatcttttacctgctggcatagaatagtttaccttagttttcaactaaaaaaacataagttaccatagtcatatttcaactttagtatacagttgaaatatgacagagcatgtaaaaatgtggatgtttttggttacaaggtttctttagtcagaatggtcaacaaagtttctgacacgtgtcttattcagagtggttactttgaccagctgctagttatatttttgactcatcaaattcaccggcaaatccagtgagtaacgacggtcacgctgttccacgaagcttcgctgtcaacaccatcatcggaacttaccggagttcgttacggtaccttaaacccaaacccttctccgttttcgctttgttgattatcttcttgagtgacttcgttttgagaatttttctgggtttcggcattgtggaatcgaaattagtttttttttttctgttttgggtctcctctgtctcctttaactccattttcctacgaatctgtttctttaaccctaggaagacgaaaattatcgcttcatcgccacttattctagggttttgaatgcaaagaagaactaatttcataaacctgattgagcttagatttcaaatgatttcgactgattcgtactatgaaactcatcttccacatttagtttctcaaatcatttgagaaatctagctcaaacgattcgagtttcagaacttttgttcatcaaaattaagaatttggtcatgatctagcttagtttgtttcttcccttgtactttcaatttgatgttcttggaatcttccttcagagagattagatccttttactcataaagttttaacctttgctctgtttgtatagaaaaatcttataggtctctttgcttttacatcttcaaacttgacttgtgcttgtgatttgattgttgtcttcttcttttgctttcttaattgtgatattattaacaggtaggtttggattctatctcttgtgaaaaaaacagaaacacaaagatg

SEQ ID NO: 14683 - DNA, 3000 bp, Unknown
  misc_feature (1)..( 3000): cDNA_ID_2730524_gDNA_ID_2684212_Annot_ID_137358 3000 nt of promoter + ATG
cggtcacctaagtaaccaaagatgagctgacctaacgcggtgccaagaagagcgattgcgtaagaagttgagagaagagcggttccgattgagtctttgtggtaatatatttgacttatcattttcatgatcggagctatacagaaaagatcgtatgcgtcggtgaaaagtcccattccggcgactattatcgctttgaaatggtaccactgtatcctcgctgcgtctaacgccgataataaacttaactccggcatcgtttcgtcgattttttaagaattttttcaagatacggagaatgagaacaatagaagtctttgtatttttcatttgaatgtgtttttggagattttttcttattggagacaaatatggaatatgctttggtttgactgtgaggaacacaacacctccctggatcgagtccacttctttagttgactttgacaactttatttataaaatttggattataagttttaaatttccctctttggtacaaagagttttagttgtaagatgtgattgccaaaatcttggttaaaacagttccgtttcacatcaaggtgctttttttcagagtctaagaacatcttaaggaaccggatcattggacatggttctacacaaaagaaactagaacattcttgagtctctaacctctgctaaatccgaccaaagacttacaggtcggccactgcaactaaatgctgattaagcatggaggatatcgtggttgaatgaaaaccggaactatgaagttgggatgcgcactccgagcttgactacgacgacttcaaagatcccatcagatctaaaattaggagaaaacaagcgaggatccacttgtcccggaagattaaacgtgattgagaatggaccaggcggacagagctgttgcacttgcattctgtataagcatcccgtgtcacttggaatcgcaatctcaggtataactccttggatgcaaactctcccctccctctgaatttcacatttgatcttatctattaacagaacagaagatagcattttgggtcaaagttgctttcatacacggatagcgtaaaagaaagcagctttcttttcacgtcattggtcattatctaacccaaaacatgaggaatccattccggtattaacaggttgttattttcattatccaacaacaggacataaggagaaaagaaatgtgaaggcttaccttgatttttctcaatgccaggaagagagactcggaagatgtaagcaacttcgctgacgccaatatcaacaagaccaatgggtggcccaacagagcctagcttagcagtaccagtgcagaatacatgtgagatcactttcgagtgagtagtagtagtctgattattctcagcgttcatctttgtgtttctgtttttttcacaagagatagaatccaaacctacctgttaataatatcacaattaagaaagcaaaagaagaagacaacaatcaaatcacaagcacaagtcaagtttgaagatgtaaaagcaaagagacctataagatttttctatacaaacagagcaaaggttaaaactttatgagtaaaaggatctaatctctctgaaggaagattccaagaacatcaaattgaaagtacaagggaagaaacaaactaagctagatcatgaccaaattcttaattttgatgaacaaaagttctgaaactcgaatcgtttgagctagatttctcaaatgatttgagaaactaaatgtggaagatgagtttcatagtacgaatcagtcgaaatcatttgaaatctaagctcaatcaggtttatgaaattagttcttctttgcattcaaaaccctagaataagtggcgatgaagcgataattttcgtcttcctagggttaaagaaacagattcgtaggaaaatggagttaaaggagacagaggagacccaaaacagaaaaaaaaaaactaatttcgattccacaatgccgaaacccagaaaaattctcaaaacgaagtcactcaagaagataatcaacaaagcgaaaacggagaagggtttgggtttaaggtaccgtaacgaactccggtaagttccgatgatggtgttgacagcgaagcttcgtggaacagcgtgaccgtcgttactcactggatttgccggtgaatttgatgagtcaaaaatataactagcagctggtcaaagtaaccactctgaataagacacgtgtcagaaactttgttgaccattctgactaaagaaaccttgtaaccaaaaacatccacatttttacatgctctgtcatatttcaactgtatactaaagttgaaatatgactatggtaacttatgtttttttagttgaaaactaaggtaaactattctatgccagcaggtaaaagatgtggatgaccaactactgctggcataatttattctatgactaaggtaaaactaaaagttaatatcactcgaaatatttacaaaagtattagataaagtactaaaaattttaagttagaaatgatgaaattaaaagatatatgtggcttatttaggaaaatagatacttttaatatgatggttgggtagttttattattgtttgggattgaaaaaaactatgaaagtgtctccaagtacagtaatatttaacaactaactaggaaggtgtacattgttcagtattcatcattctaattaatacaaataattttaaaaatttggggtcgtcaattgctcaaagatattcattattttataattttctacattttatcaaaaacagaattgtgtaaatgttgtgtcattatgtgtcgacttggatgtatgcattacataattttattttatatatgtttttaattgttagagcatttattcgaaaattataaatattgaattttaatcctcagtcacttaataaaaacattattttaggactaaaaaataataaaagttgaaacagcaaagtagcgatagatttcgtgaaaacagagaagcggacatatcttgaaacac

SEQ ID NO: 14684 - DNA, 3000 bp, Unknown
  misc_feature (1)..( 3000): cDNA_ID_2730520_gDNA_ID_2684212_Annot_ID_137359 3000 nt of promoter + ATG
aaatcagatgagacttgtgtataaatactttgagatctgtgttctctttcgttcactccaaagagcatcctattaagttgctaaagagagagacgccaatggctgtaaagcaaaaggtctgtgttactggtgcaggagggtttattgcttcatggctcgtcaagtttcttctctctcgtggctacactgtccatggaaccgttcgagatccttgtaagggataagatagaaaacaaatcctctcttttttgtgaacttttgaatattctctgtttcttgagtttgaaaaagttgcatgcattgatcccattgttctcaggtgatgaaaagaatgaccatttgaggaaactggataatgcttcaaaaaatctgaaacttttcaaggcagatttgtttgatgatgaaggtcttttctcagccattgatggttgctctggcgttttccatatcgcttctcctgtgccttttgaaggagttcctctcacagaggcaagttcttacatagattcttcttttgtttgtttcttgaatcactaacaaagtctttaaaacattcaggaagaactgattaaaccagctctcactggcaccaagaatgttctagaagcatgcacagaaaccaaagtgcagaaagttgtggttgtatcatcaatcgctgcagttgtttacaatccaaaatggcctcaagatgttgctaaggacgaggattgttggtcagacactcaataccttcactcacttgaggtaatattgtatctttgaagctaccatgttggtcagttgtctctgtgttatacatatacaccaagacagtaatagaattgagtgtttaatgtgatgcaaaaaatctgaggatctcagggttattggcgttattactatcttgccaaaacattaacggaacgtgaagctttagagtggagtaagagaaactttgctgatgttgttacgctctgtccgtctgtcattataggccctaggcttcaatccacgcttaactctagtagtttgggacttctcaagttcataaaaggtgatgtaaacatataatgtgtgttctcttacctcctattgcatattttggttaagtgattgattcattcttgataatttgatgaattggtgtgtctcttcttaggtggtataaagtccttgttgagcgatgaactgtatcttgtggatgtgcgtgatgttgcggatgcgcttttgttggtgtatgaaaatcgagaagcaacaggaagatacatatgtaattctcattcactttacactgattctcttatggagaagctcaagaatatgtatcctaaacgcaacttccctgaaaggtaagaagagtaagaacaaacgcttgatttcaaactttgagatttcggtctgatctgatggaatgtttattggcagtttcacggaggtaaaagagaaggaagtgaggcctctaagtgcagagaagttgaaaaacttggggtggaagtttaggccattagaagaaaccattgatgattctgttgtgagctttgaagcagctggtgatcttccaaaggcataagcttacagagtcgtcacagtgactgtttcttcacttttatcactcctgaaataaagtggtttttgttagaatcatttcattctcaaatccattatctattactatcatattagtgttgttctttgtaacagtcagttatttgtcactttcaccaacatgaataatttgatggaacatgtcagattctcacggtttctttttcacaaaacaaaactggttttgaatccgaccactagactaaagtgtccatagtccgcggcaaaatgaaaaccaatttaaatgtcgttatacaagctttgtagtctagtagagatatacaaatttaattgtcgttgttagttttgtagtctagtagatatgattagtcattagttacggtttcttaataacattgacatttagaccacaatgtggacttgtggggttaaatgagtcacgagctcatgaacccctagccatttatttgggattttccgaggacgaggcttaatctacaccgtccgaattcgttaatgacggcaaattgcttccatgagtagatttttctttgtctcattagtcattatacaatttcaattctaaggataaaataatcaacaaagtttgatttcagttttttacattatttgtgtaacgttactacaacggatagatttgattcagacaaaacaaaaagatcgatgattacgacgttaattacagaattagaggtataaatatatgggtcccacgtcatttacaatggccagaaacaaaagtatctctttctctctctcttcatcttcaacaaatcacgcaccatcataatcatcatcatcttcatcgtcatcaccaacttcttcatcatcaccatcaatggaattccccaaaccaaaccacccttcaccctaaaaatcgtttcatcttttttccttcttctaattttttttaggtttttaattaacttttgcttcaagttttcttctatagatttcttactcagaaaagtttcgaattcgaccctgtagcttagttgttgtttataatttcttgtgatcattcacagtacaaaaaaactaattcacccaccgacttcttcttcttcttctcttctctgtggcccatccttaaacccacactgcttttgcttttcctttttttttccgggaaatttgatctctttacctttcgtcattattagtagggaatgatcttttagttttttttttgtttcccccaaatctcactttttctcacttcctctccatctcaaatttcacacaaccgagtaaaccctagaatctccgcttctcattcaattggtttcatcactggtcttaatcattgctagggtttactcggttacctttatcatcatcaattgatccttgttcataattcatcctcttttctttctgtctttggcataaagtttcaatttttcttcttcttctctttctcactcaatcatg

SEQ ID NO: 14685 - DNA, 3000 bp, Unknown
  misc_feature (1)..( 3000): cDNA_ID_2731082_gDNA_ID_2684212_Annot_ID_137362 3000 nt of promoter + ATG
ataaagctttcacatcaaacctaacaacaaaacaagaatcacacaataacttagtctcagcttgtggggagacaaaaaaaatcacaattgaagattgagaaagtttcaagaacactaacatgttatcgtggcagagacaaggcaaaccatttaccaagactacaagacataatagtaagtagcagagtgtcctgtttaatggaaaatacgattcttttctgattccaatcttgtaatcagcaaccctgaaatcgtagattccaacaagtacaatcgattttaggctccacagtaccttacaccaatgagaaccaaagcaaactaagatacagattctttaattacgtcgtacgagaaaacatcctagtggacagacaggaccacattattgcttagaccttggccctaatgaaacctgttattcagtagctgtttcaaaattagatccaacatatcatcaagcttatcgacatagcccggtttagcctaatttggttacttgaaacttttttttttttttttttaacttgaaacttttatcttctaaacatttttcatttttttttaataaataaaatgaaggatttgtgcgtttgtgtgaaggaatctgaaaacataaaaccaaaagaatataattggaggagcaattcaatcaatcaatgggttttttaatagttaatttacttaaggggaggtaggttttatttgtctgcttacttcgagtaaggtcgagatccaccagaacgtgacaatgtgacttccactgcttcaggacaaatcaaatatgaacctacgtcacaaaattactattataacaatttatccttatttattctttcttacgactatcttgtcttttgctatcatttacatttgtaaaaaacatcgtgatattattatttactagtatataatatcaaacttttcacgtttaataaaaattattaatttgaaattattcatttttgaatttgattgatatagttgacgaaaaagagttgttagtgtaggaagtttgtccggatatgcaattttttttttgtaacgtgtatcatctcgttaagaactcatatgtattatatgaacaaaatcaatcatgtatattaaaaatggtttgccctaaagatattctatgtttttttcgtgaataggtgttaaggatattaaacaaaaatacccttatttattcttacgactatcttgtgtctatagcactctagcttctacgttggtatcatttatattttaaaaagattttgtgatattattatttactggtataaattttaaaatttctcacgtttaataaaactaaacatattaataatttaaaattattttacttttgatttttattgatatggttgacgaaaaagagtgattagtaatggaagtttgtctggatatgcatttttttttcttcgtaacgtgtatctcgttataagaactcatatgtattatatgagccaaatcaaatcgtgtgtattaaaattggttgccctaagaaaattcaatgtttctttcgtgaaagaaagtctattttttttatagatttgattctcttcttgggatttccacattaaaattattatcttagaggctcagtttgatacatacactatattttttatatattgttcaacgtatagtgactgaatggtagttgtttaaaaggattgtgtaaacgagttggatagccaaaactatgttaacttgatccttgtaaagtaaacaaagccatgcatcctctaattcaacaatttggtcccattaccccaagaaaatgttataaagaggttatctttatcaattacttgtaaacaggacattatctttataaagaaaatgatatacatgctgcatttttttggtttggtagttttacatgctgcattttgtacttgcaaccacttctatactaattgttttagataagatagtaccttcttgtttgatcacatcgtaaaaggatcggatatgttaaccgtctttttccaaacgttatatactcttcaacactcatcataatgtatggagatgtatcaagtatctcttacgaccattggtctttgcggcctaatttgcaacagaaagtcagaaatatccatactataactatgctatttgaaaattattcattttgactcatatataaagtagagttaattaggtgtatagccaaattatggatgaaaattagacaaatgatcatgacattcttttttcttaatttcccaaaagaattgtaatatcagaagggaaaaatacattccacacatagttagaacttagaagaggtccaatcaataggcggtaaaaattaatttgtaacggtaaacaaaaacgataaaggataatagtacaaactaattggcaattaatactgtttttggtcaaatatatatgtcacgacagtagatgaaaataccgtttttggttgaatcgttttattttttactttgtcttgaatcttgtctactcttcaataccgtttttcgttgaatcattcaaaaaaaaacagatctcctagtgatatgaatcaaagtttatcaataaaaatcttagtatacatttgcaaaccataacttcataattttgaataaacgataatgtaagacaggttggctcattagaaagcatatcaaattaattgtaaggacacaaatatctataattaatgcaggcttttatgaatcaatcatcatcattcacatcctcgtataattgtctaatttcgtacctcaaaaaaaaaacaacaacgtgaaaacctaaaattagatgagttacgaaaattaggcaaaaataaataaactaaatcatagtattacaaaacaaaatgaaaacgaaaaaatgaagaaaaagcaagctggtccccaacagacatgcgagttcgtctcctataaaactttgttaatctctccttcacacttatcacgccacctcaccacctctctcctctctcctctctctcccccctggagagattattcattccctcca

SEQ ID NO: 14686 - DNA, 3000 bp, Unknown
  misc_feature (1)..( 3000): cDNA_ID_4255053_gDNA_ID_2684212_Annot_ID_191573 3000 nt of promoter + ATG
aaagacgggcgggctagttgataaaagctcaataaatatgggctggtttagggttaaacagcgaggcccatttgtacaaaatattgacatcgattatttttgttttgcatttgtggatccccaggctgagattacaactcagaaaattacaaaaaaaaaatagataataataaacaacgattataatgatgattctttcaatttgttatgttagagaatcacaatgcttccacacgtgcattttatatcacaatttagattatgataatttgaacaatctgacaaataaggattatttaaataattgacttgttatgttattacaaaataggtactatgagttagacaaaaaaaaagaaatctggtggaatggcactgaatcttagatagcacgtgtcacgtcgaaatattgcgtgcaagtatacatgcgccgttactaacgctgttatagacttatagtacactgaaactgttcatatagtgctgtaatattttcgtgaacttatgaaataggttcaatttcttttgttaaaatttgggtgtcaaagcgggttaatatattttatgaattttaatagatagtgctaaaaattggggtcttaaaatagtaactataatgtcgtcgtaccattgcggagtttgcaagccgatctgcaaactcttcaaatttaaattatttttcaaattttttttcctgcttagttctttatcaaagtactaggattaatgagatcgattattaatacttattagtacagaagtataaactagtactgagtgattaaggagatcgagtgggaattggcggtttatattaataaactagtactgagtgattaaggagatcgagtatacaaattactagtgagctatttttaagatgctagtataactttatagtatatcataactgttttttcatacgaacatcggtttaaatgaagtaagttactcaaggctggcctttcatgtgtttaatagtactaaataagatagtaccagtggccggtaaaattagctagctgttatcaattgttatataatatacatgttcatttattttatgtattattagactatgagatgatatgagtacagaaaaaaaatccaataaatatgtatataaatatctagaaatgggtagataaactatttaaatgagtcactcaacgtgcctgagtttccttttcgatttaattgtcctcattgtgaattggcataaaagtcggtgcgaaggaaagccccaaattatttaacttgaaaacgaaagtttggtccacctctctatattcatttttctgaaatgaaattaatactcaaatcaattttgtcataaaaattgtccaattattaaagtattcagtcgtgtttctatatatatcactgtctttagtcagctagtctaatattgcatatttgcattcacctctatatatgtacacacacatctacgtatggagaaaacattgtacattcactacattcgtgatctcatttatctttagatggctaaaaaaaactcagatagaatatcacacttacccaaaatatactattctttcgtacgaaatcttattactagcacatgacgtgtgtgagaaaaagtacactcattggacattcaaaggtgttaatgttaaaattaacaattgggttttctaactatgagccactaaatcatcttctaaagtcaattataaattatacgtgacgttacttaatattggaaataaatattggagaacaattataagtttgaaatagaaatcataattaactattttactactccaaccatttataactacgaagctaccttaaaaaagagaatgacatgggtatgactttgcccgttttttcttaatgaatttgttactctaaagtcataagtctctaatccgtattaatagcagtaattaatggatacaaaaaaaaatcaaaaagaaagaaaaatagacagggtggcatcataatttatggggacagctgtcgaggtgatgcatttatgaccactaacatgcaatggcacggatgcaaattttaattgttagattcttctacaaaatttacttaattcaatacttctgttttcttcttcttcttcttcgtaatttaatagattctgcatattgtttaatatttattttacatgccagtgatgggttgtcattattctgattcatttttctataaaatcattataaaagtattttcaacttcttgacaaaaataggtgtttaattattactacaaagttcaggtcgattgttatttcgggctacataaaaaaggtttgatttctcgtatgggagtgattacaacatatttattggtattttatgaccccatgtcaactcttatgtagtaatttgtccccacttattgaattgttattagctcaaaggcattaattgcacggtttctaacttttcttctatagtagtatgtttttcacatttgaaaaacactaatcattttcattttgcatggaaataagaccaaatattttcattaatccactaaattgcatttgcaacacaagcccaaatcattatatatataaatataatatattattgtgatgagtaaaatatagacatgcaaagtgactatgaactactgtaattatacactgcaagaaaaacattgccataaatatgaaaacagaagacattgacagatagtaataaaaataatactatatctctaaatataattcagatgttaacgaaagtcttgtggagtaaaaactgggtttcacacacttcacttgcctctcaatacccgggaaaacaaaatgtcggtttcacttgctacttttcccggaaagttacaaagtcattcccttttcaggttgtgaagtcacattaacataagagaagaagcaaaaaggcttggagctttattttttgcttttttttttctttcttctagaaaacatgatcttgagtttccgagtaagattcttttaaaaagagtttgcaaagaacgagaaaaatg

SEQ ID NO: 14687 - DNA, 3000 bp, Unknown
  misc_feature (1)..( 3000): cDNA_ID_2730494_gDNA_ID_2684212_Annot_ID_191567 3000 nt of promoter + ATG
tagaaaacaactagctctaaccaacaacaaaaccacagaacaagaaattccagagatctataaatatgcagatgcatgcacacctcttcactggatgttcagtaatgatctgagcatcagcaactttagcagttgccctgaggaaatgagccaaaggctggcctagagtatgtgggaaggcacgggcaatgatatgagcatcaccagcctttgccacagtggttccatcaccaagttcaacacggacagtagtcccctgtaatgtacattgaatcaataacgaattaaactacgaatcatccaaccaaaaaaaaaactacgattcaatcactgttccagaaaatcactccatcatggtagttcacgttgaaaggcaattctacctaccacactaaactgaaatgttaaatcagacgagtaagtataaaaggatcataaaccctagatcccgattataataacagtgtaaacagatctgcatgaacggaaacaacattgcaagttcctcgagtagacaatcaaaataaacagctcgaagggattcaaaatattcgcgacgtgacgaaattgtgagaaaacgaaacagcagaagagatgatatcaatgaaaaacatagagatccaaacattggagacagtgaacgagagaaggaagcaagagatctaaggaagatacgaatatacaaataaaaggaagaaggagaagtacctggagacaaggaggaagctcagggtggtactgagatcggagttgttgaagaggagagagttctctggggattccgaaatctgaatccatgggcgataactttttaggtttttgtgagaaattaggttggtgagagtgtcagagagactcagagaagattcagagaaagttttttcctttggcccgtcaaaagtatttatatagtatgcgggggacttgggcgatacgatcaaccaaacagccaaaatttggtcttcttcttttttttctttcagtccacgctttttctcgatcagcccttgttattctggttatttacgaaaatgccattggatataaatatatacccttacctttttcggtttggtaatgtttggttagtgaccaaattgtctaattcggtttggtgttcatattttatgggttttaaaaggttttagactgcaaatttatcgaactgtatgagtgtacgtttggttttaagtttagtttataaatgcggttaggttttggtttagtttgagttgacaaattccccacctaagtgcgaccaaactttcaaactaagaaaaaataaaagcaaaaaataggatatgatgatatgctaaaagggagagtgaatgagcaccaaaggataggtgaagggtaaatacggaaatagcgagagaaaaaaaaagaagatggaaatattggggaatatagcattcaatagggagatatgcttttacatggtaattacaaaggaataaaggcaaacatatagtaaaagatacgactctctcattccctcttccccaagtattattattgcctgataattgataaactacccatcgaaaataaatatttattatgcacatggatctttaaaaaaatggatttgtttattatttgacctgatttgggcttttaataaggcttcttatttactctgttgaccgtaggaaaggcctgtcattatttaaagatctaccaactgaatttcatcagtcagtatcgatgggattaggtatattaatggtaattgttattttcataatataggcctagtgtgataagacctcaaaaacaataagctttgatattacgatgagagtaggagtatataataaaagcataagattatgatgatacaaaggacatcaaagttggtgaacacctagaacaacaaaaggagtaggtaaaaggggtcagctttgcattgtgcttatctcaactaccttatgagaagaaaataatatttttttctaaagtcaaatgtttgatgagtgtagtttggataatgccgcattaaaaaaaaaaacgtgaaatgacaatcgaacattgatgattggagggcttatttgtaattacgataactatagtcaaacggcccaaaccattaataataaaaggtgaataaagaattttctgaaagacgaagaagagaaacgaaattcgtagaaatgatctcgggctcggcgacggcgagtcatgggagagtgttgcttccgtcacaaagggagcgacggcccgtctcaactggatcaaatattttacgtttcagagaaacagtaccgagacaattcagcctgatgatggtgacgaaggcgacggcaaagtatatggggacgaagatgagggaggagaaactatcggagatgatagaggagaaagtgaaggaagcgacagaggtttgcgaggcggaagagatgtcggaggagtgtagagttgcgtgggacgaagttgaagaagtgagtcaagccagagcagatctgaggatcaagctgaagttactgaatcaggatccgctcgagagtttctgccaggagaatccagagaccgacgagtgtcgaatctacgaagactaaaatttgagttttcgtgtttttaatgattgtagctaatctcaaaacagaggacttagaacagagactgattctgattaataaatctcaatcgtccattgaaaccgttgttcatcgtgttcacttacaccgattgatttggaatgaaactctgcattttggatcttttgctttggaacaaaacggttgttttgattgtttatggatctaacgatgtggcctgttacttaattgggcctataatctggatccgccgagtccgggctttttaaagaactggcgaatatcattacacgtggccagatccataactttgaaaatttggttatttttaatttttgtggaaaattagagaccgcttcttgctcttctaacttcacctctgctttcttcttctcgagtgaaacagacagccaaatcaagatttgacggtgagccaaattcc

SEQ ID NO: 14688 - DNA, 3000 bp, Unknown
  misc_feature (1)..( 3000): cDNA_ID_1032199_gDNA_ID_2684212_Annot_ID_191564 3000 nt of promoter + ATG
tgacatttgcacttcacctgatatcgctaacagcagaaattaccaatatgtttcaggtagttggtgttccggtcactattaatggagatcttaagaatcagtttgtggaagcaaatgttggtttcgatactacatgcaaggtaactttgaaatctagcgcttttttttcttttactttgtaggtattgtagccaacattctttcatttcgctcaccgttcttttcaggttaataacattttaactcgttatttagactaatatcattctactgtgtacaggtgaattctcagctcattagcaatatctgcaccgatgccctttcagcagagaaggtaaatgttgattccttccaaacgttatcatgttttagaaagattgctaggacactcataaccaacctatattttgttggttaataatgtgaaatttattatggtttgataattgcgaagttgggttccttatgattctgttatcaaattttcttctcaataacatactttcctccgtattgccagtattattactttgtccgtctcatgggtcggaagcattcacatgttgcccttgagtgtacacttcagtctcaccccaacatggtattcttccaaattctgaatatattcaatcgatagtcttggcaatgctgcatctagtttctcatttgcatttgatgcgattgtctcaggtgatactgggtgaggaggttacagcatctaagctcacaatatttgacatcataaaacaaatctgtgatgctgttcaagcaagagccgaacaaggtctgataactaaaacgagcttttggtatgttggaagtgatgtcttttgcttgttccctaactttattgataaactgtctatttgtatcagacaaaaatcatggagtcatcctaattcctgaagggcttgttgagagtattcctgaactctatgctctgttgaaggtaacgattcaatactggcaaacatttctatttatcatttaatgtgctattttttattgtttcttgagttccaaaacatagtaagcatttacatgttgttgtgcgatgcaggaaattcatggattgcttaaggagggtgtgcaggttgataatatttctactcagttgtcatcttggtcatctgctttgtttgagtttttgcctccattcattaagaaacaggttctaattctttgacatggtacttttctttgttttttctcacatgtaaacgagtatgtgttcttatgataaattgtcttctttgtttctgcagctacttctccatcccgagtctgatgattctgctcagctatcccaggtaagaagaaagaaaatgatggagttactgtgctataaaaagttggaattctaattgctcatttactttcttcttagattgagacggagaaacttctggcttatcttgtggagactgaaatgaacaagcgcttggtatgttgcacatctttttcacttgtcacaatccatttttttcaaatttttttgaataaccttgcctgaatattcaagttgtccctaaaactaagttttgaaaatgacagaaagaaggaacctacaaagggaagaaattcaacgctatctgtcacttttttggttaccaagctcgtggatctcttccatcaaaattcgattgtgactacgcctatgtatgtgatcgccaaactaaaatgctattgcaacttcaatattatggacattcacaccattgattataactttgatgcaggttcttggacatgtatgttaccacatcctcgcagctggtttgaatggttacatggcgacagtgactaacctgaagagtcctgtaaacaaatggaaatgcggggctgcgcctatctcagttgagttttgtctcttatttataaggctaaagttgtttagtatatgtgttgatttctgacttcaagtttcagttttactgaccccaatctctttctctgtttaaccttaggcaatgatgacggttaagcgttggtcccaaaattctggttctactacgattggtagacctgtaattcatccagcttcagttgacttgaaaggaaaagcatacgagtaagcttttgttcctcactcattagacaaagattagaatgaacatgaaatcaagtgatataatttgtcaaatgattttgcagtctattgagacaaaacgcgcagaaattcttgatggaagatatgtaccgaaacccaggaccagtccagtatgatggtccaggtgcagatgcaaaggcggtaagtctgtgtgtagaagaccaggattacatggggaaaatcaagaagctgcaggagtatcttgatcaggtgaggacgattgtgaaaccgggttgctctcaagatgttttgaaagcggcattgagtgttatggcctcggtgactgatgttctcactacgatctcatcttcttccaccagcggtcagcaatttgcttaaagatttttttattgttttggttttccctttaaccataaacttcattagctctctctctctctctctctttccattttgaagtcgtcttctgatttacgcaaactttattgttcaaagttgagtttaggaaaaggatattcaaagttaaaggatttgagtaatgcttttttaatgaagaagtctgtgtttgggttcactaatcttcttgttgccttctcgatcataatttgtatatggtgcgaccaaatcaaagtacctacggatatatatgacaagtggacacaaatgaataaatgtaaaaattaaaattaaatactatagtacgtggcaaattaaaaaaaggcgtttatgaaaagaccgctcctccacgctccagtttgaatttcgaaaaatcagtccgttgtgaaagcccaagaataaggattctataatttcaggtctcatttaattatataacctatctacactttgatctccgacaattcactttcccaataagaaccaactgagagagagagagcgccggagaagaagaattttagagagcgatg

SEQ ID NO: 14689 - DNA, 3000 bp, Unknown
  misc_feature (1)..( 3000): cDNA_ID_3018575_gDNA_ID_2684212_Annot_ID_191563 3000 nt of promoter + ATG
gggacttaggtctttcaatagagtttaggtctttctctagttctgaaggctcctctacaacacctttggtaccagacggcacatcttgctcttgcatttcagtatccgccatcatgaagctaattctctgagacatagcatcacaacaacaacgcagaattcaaaatccagaaatcataaatagaaacgcactattgataattccagagagaatgcaagacgcatgtaatcgagaattggaacgcatcaaaactctgagtcctactctctcactgattcgctataattcaaacagtgatggcgactaaagcattagaaagcagagcttcacgaaatcatggagtacatacatagaaacaaaagatacggttaccggtttcgccggaagaagaagacgccggagacggtggagtcgtcgcgggttagggttcgatagcagccggcgaaatggaaggacgccggcggagaaaaagaagcgagaaacggaaagatatcaattaaacggagagatatgcagatcaaaagatttatacggatgatataatgaacacatgaattcattaagaaagaaattaatgcttgttacttgtattaactcttaacgaagatcttaatagcaaaacttattaatgatatttcagaaagttggacttttacgacccatttacataacaaagcccattattgtaaactatgggctcaatatgtaaggtatattatgaatataatcttaggcccaattaaacacggaagacaacgtaggtttctgcttgtctcgattgttgttgtgtttttatttgttactaaagatagagaaagaaatatcgaagcattgtgcgttcatgttcaatatagagtttttgttgtaccaaaaaaatatagtgtttgaatctttaattatagactagctagcatataattaacgtgattaactttacaattatggtgatgatgattttctcagtatgtaggtatagtacttgtcaaagtgacaaataattgcaatttaatgaattggtgtggatccaaaggataacaaatagtatgagcatattcattcgaagcaaaatggtacagaattaagcaaagctttttgtccaaaattctaatgaattaaggaccattatttttagggaataatagtctttgatgccccacatttccaatagtacaaatcaagattttcaatatatgtcaagtttgttattttcattcacggacattaaaacgagtggagcatttcaatttgacatatctttgtccttttctttttgttacagatatcttttgttcacgttctttgaatcatcatattcatagctatgagatcatagaaatatcaaatactgttaattaacctctttaaaaatacatattcacaagtctcttgtgtgagtagaaatcctatacaaacaagtttattcatgctctaataagatagataaataagaagatagctcatgacatggccttcattaggcttgttgcatatacaataagcttacatataaggaattaaggatggtctaatatctcttgcttcacatgagaagagttataggattcgagtcacataagagatttttattgtagtgtgtataatatatcccacttctacaattatccagtctattgtgtatttttcattaataaatcactaaaatttgcactttgacaatatatacttaaatatttgtatctcgtatatatatatatacatatttttagcactgtatgataattctaattattcgctaattgtttttttttggtaagaattagtcgactattttgatattggggttgttacatttatatcttgcattgaattttatggacggacactggtcgcagcctcacacactaatttgaattttccgttatcattaatattcgatcgtttcgttggtacgcttccatcacacaattaatttaagccaccacactattatcttattctcattcagttttgtttccatttcaaatttcttacgacgcatatgaaaatgtacatttttataacaattccccttaaaaatagatgacaaaaagaaaaatgttttttttaaaaaaatatataaaataaaataaataataaatcttcaacaatcgatgaacactttgcaatatctccacaccttgggcaagaaccagaaaaaaacatggggcacgtttcgtagtcgatgtgacgaaaggcatgacgacggttaccatataaattcgtcttctcagataaagccttattattctcaatagtgttatacgacaatatacgaaacaaacaaagaccccgcttgagttgagttttccaaaaattgtggaactgtttcctctttctttttgtacataaactaggttacaaaaaattggaaaatatacaaaatcaaaggacataaacttacgagatatatcataactcataagttgtgaaagttggaattcaaaaaggagctaactatgaatctatgatacgttattttgttgcttatacggaacaaaacaattccaaaaacaaagaagatgtaaaagtctgacccggatcatgcggacaccaagttgtacatacaaaatatgtaggatgaaaatatgaaattctcttcccatatgcatagaataataatttaccttagttaaaaagattagtttctaagtttgccccaaataaagagattagtttcttgaaaaaagcattttgtggatagacaagaatttaaatagaatgaagaggcgaccatgcaagtgttgtactaggccaaattttggagacgctctttctctttcatagagagagagtgagaaagttctgatacggcggcttctcactgtcatctagctgtaccactgacgataaatctctctcttcctctaaatcggttaaaaaattcattcccttcttggattgctctgttttcttcggcggttcttgcagctccattgattctctgtttcctctgctacagttaacttatacttgcagattctcgcgttgatagtaaaaag

SEQ ID NO: 14690 - DNA, 3000 bp, Unknown
  misc_feature (1)..( 3000): cDNA_ID_3018579_gDNA_ID_2684212_Annot_ID_191562 3000 nt of promoter + ATG
caagaagattgactccatcgagagccatataaaatccgactgatgttatcaacagaatctcaacgactggttttgatgaagttatgaacagctccaaaagcttcaccatctttttactatcaacgcgagaatctgcaagtataagttaactgtagcagaggaaacagagaatcaatggagctgcaagaaccgccgaagaaaacagagcaatccaagaagggaatgaattttttaaccgatttagaggaagagagagatttatcgtcagtggtacagctagatgacagtgagaagccgccgtatcagaactttctcactctctctctatgaaagagaaagagcgtctccaaaatttggcctagtacaacacttgcatggtcgcctcttcattctatttaaattcttgtctatccacaaaatgcttttttcaagaaactaatctctttatttggggcaaacttagaaactaatctttttaactaaggtaaattattattctatgcatatgggaagagaatttcatattttcatcctacatattttgtatgtacaacttggtgtccgcatgatccgggtcagacttttacatcttctttgtttttggaattgttttgttccgtataagcaacaaaataacgtatcatagattcatagttagctcctttttgaattccaactttcacaacttatgagttatgatatatctcgtaagtttatgtcctttgattttgtatattttccaattttttgtaacctagtttatgtacaaaaagaaagaggaaacagttccacaatttttggaaaactcaactcaagcggggtctttgtttgtttcgtatattgtcgtataacactattgagaataataaggctttatctgagaagacgaatttatatggtaaccgtcgtcatgcctttcgtcacatcgactacgaaacgtgccccatgtttttttctggttcttgcccaaggtgtggagatattgcaaagtgttcatcgattgttgaagatttattatttattttattttatatatttttttaaaaaaaacatttttctttttgtcatctatttttaaggggaattgttataaaaatgtacattttcatatgcgtcgtaagaaatttgaaatggaaacaaaactgaatgagaataagataatagtgtggtggcttaaattaattgtgtgatggaagcgtaccaacgaaacgatcgaatattaatgataacggaaaattcaaattagtgtgtgaggctgcgaccagtgtccgtccataaaattcaatgcaagatataaatgtaacaaccccaatatcaaaatagtcgactaattcttaccaaaaaaaaacaattagcgaataattagaattatcatacagtgctaaaaatatgtatatatatatatacgagatacaaatatttaagtatatattgtcaaagtgcaaattttagtgatttattaatgaaaaatacacaatagactggataattgtagaagtgggatatattatacacactacaataaaaatctcttatgtgactcgaatcctataactcttctcatgtgaagcaagagatattagaccatccttaattccttatatgtaagcttattgtatatgcaacaagcctaatgaaggccatgtcatgagctatcttcttatttatctatcttattagagcatgaataaacttgtttgtataggatttctactcacacaagagacttgtgaatatgtatttttaaagaggttaattaacagtatttgatatttctatgatctcatagctatgaatatgatgattcaaagaacgtgaacaaaagatatctgtaacaaaaagaaaaggacaaagatatgtcaaattgaaatgctccactcgttttaatgtccgtgaatgaaaataacaaacttgacatatattgaaaatcttgatttgtactattggaaatgtggggcatcaaagactattattccctaaaaataatggtccttaattcattagaattttggacaaaaagctttgcttaattctgtaccattttgcttcgaatgaatatgctcatactatttgttatcctttggatccacaccaattcattaaattgcaattatttgtcactttgacaagtactatacctacatactgagaaaatcatcatcaccataattgtaaagttaatcacgttaattatatgctagctagtctataattaaagattcaaacactatatttttttggtacaacaaaaactctatattgaacatgaacgcacaatgcttcgatatttctttctctatctttagtaacaaataaaaacacaacaacaatcgagacaagcagaaacctacgttgtcttccgtgtttaattgggcctaagattatattcataatataccttacatattgagcccatagtttacaataatgggctttgttatgtaaatgggtcgtaaaagtccaactttctgaaatatcattaataagttttgctattaagatcttcgttaagagttaatacaagtaacaagcattaatttctttcttaatgaattcatgtgttcattatatcatccgtataaatcttttgatctgcatatctctccgtttaattgatatctttccgtttctcgcttctttttctccgccggcgtccttccatttcgccggctgctatcgaaccctaacccgcgacgactccaccgtctccggcgtcttcttcttccggcgaaaccggtaaccgtatcttttgtttctatgtatgtactccatgatttcgtgaagctctgctttctaatgctttagtcgccatcactgtttgaattatagcgaatcagtgagagagtaggactcagagttttgatgcgttccaattctcgattacatgcgtcttgcattctctctggaattatcaatagtgcgtttctatttatgatttctggattttgaattctgcgttgttgttgtgatgctatgtctcagagaattagcttcatgatg

SEQ ID NO: 14691 - DNA, 3000 bp, Unknown; identical to SEQ ID NO: 14685
  misc_feature (1)..( 3000): cDNA_ID_2731082_gDNA_ID_2684212_Annot_ID_191560 3000 nt of promoter + ATG

SEQ ID NO: 14692 - DNA, 3000 bp, Unknown
  misc_feature (1)..( 3000): cDNA_ID_3018584_gDNA_ID_2684212_Annot_ID_191558 3000 nt of promoter + ATG
ttgtagcccggcgacgatgatcgtcatcggaagtgcgaggctgataagaacggaaagatccgttggagttgttgttgttggtaaccggtggtttaggaggcctccgacggagatccattggagggaatgaataatctctccaggggggagagagaggagagaggagagaggtggtgaggtggcgtgataagtgtgaaggagagattaacaaagttttataggagacgaactcgcatgtctgttggggaccagcttgctttttcttcattttttcgttttcattttgttttgtaatactatgatttagtttatttatttttgcctaattttcgtaactcatctaattttaggttttcacgttgttgttttttttttgaggtacgaaattagacaattatacgaggatgtgaatgatgatgattgattcataaaagcctgcattaattatagatatttgtgtccttacaattaatttgatatgctttctaatgagccaacctgtcttacattatcgtttattcaaaattatgaagttatggtttgcaaatgtatactaagatttttattgataaactttgattcatatcactaggagatctgtttttttttgaatgattcaacgaaaaacggtattgaagagtagacaagattcaagacaaagtaaaaaataaaacgattcaaccaaaaacggtattttcatctactgtcgtgacatatatatttgaccaaaaacagtattaattgccaattagtttgtactattatcctttatcgtttttgtttaccgttacaaattaatttttaccgcctattgattggacctcttctaagttctaactatgtgtggaatgtatttttcccttctgatattacaattcttttgggaaattaagaaaaaagaatgtcatgatcatttgtctaattttcatccataatttggctatacacctaattaactctactttatatatgagtcaaaatgaataattttcaaatagcatagttatagtatggatatttctgactttctgttgcaaattaggccgcaaagaccaatggtcgtaagagatacttgatacatctccatacattatgatgagtgttgaagagtatataacgtttggaaaaagacggttaacatatccgatccttttacgatgtgatcaaacaagaaggtactatcttatctaaaacaattagtatagaagtggttgcaagtacaaaatgcagcatgtaaaactaccaaaccaaaaaaatgcagcatgtatatcattttctttataaagataatgtcctgtttacaagtaattgataaagataacctctttataacattttcttggggtaatgggaccaaattgttgaattagaggatgcatggctttgtttactttacaaggatcaagttaacatagttttggctatccaactcgtttacacaatccttttaaacaactaccattcagtcactatacgttgaacaatatataaaaaatatagtgtatgtatcaaactgagcctctaagataataattttaatgtggaaatcccaagaagagaatcaaatctataaaaaaaatagactttctttcacgaaagaaacattgaattttcttagggcaaccaattttaatacacacgatttgatttggctcatataatacatatgagttcttataacgagatacacgttacgaagaaaaaaaaatgcatatccagacaaacttccattactaatcactctttttcgtcaaccatatcaataaaaatcaaaagtaaaataattttaaattattaatatgtttagttttattaaacgtgagaaattttaaaatttataccagtaaataataatatcacaaaatctttttaaaatataaatgataccaacgtagaagctagagtgctatagacacaagatagtcgtaagaataaataagggtatttttgtttaatatccttaacacctattcacgaaaaaaacatagaatatctttagggcaaaccatttttaatatacatgattgattttgttcatataatacatatgagttcttaacgagatgatacacgttacaaaaaaaaaattgcatatccggacaaacttcctacactaacaactctttttcgtcaactatatcaatcaaattcaaaaatgaataatttcaaattaataatttttattaaacgtgaaaagtttgatattatatactagtaaataataatatcacgatgttttttacaaatgtaaatgatagcaaaagacaagatagtcgtaagaaagaataaataaggataaattgttataatagtaattttgtgacgtaggttcatatttgatttgtcctgaagcagtggaagtcacattgtcacgttctggtggatctcgaccttactcgaagtaagcagacaaataaaacctacctccccttaagtaaattaactattaaaaaacccattgattgattgaattgctcctccaattatattcttttggttttatgttttcagattccttcacacaaacgcacaaatccttcattttatttattaaaaaaaaatgaaaaatgtttagaagataaaagtttcaagttaaaaaaaaaaaaaaaaaagtttcaagtaaccaaattaggctaaaccgggctatgtcgataagcttgatgatatgttggatctaattttgaaacagctactgaataacaggtttcattagggccaaggtctaagcaataatgtggtcctgtctgtccactaggatgttttctcgtacgacgtaattaaagaatctgtatcttagtttgctttggttctcattggtgtaaggtactgtggagcctaaaatcgattgtacttgttggaatctacgatttcagggttgctgattacaagattggaatcagaaaagaatcgtattttccattaaacaggacactctgctacttactattatgtcttgtagtcttggtaaatggtttgccttgtctctgccacgataacatg

SEQ ID NO: 14693 - DNA, 3000 bp, Unknown; identical to SEQ ID NO: 14684
  misc_feature (1)..( 3000): cDNA_ID_3018588_gDNA_ID_2684212_Annot_ID_191556 3000 nt of promoter + ATG

SEQ ID NO: 14694 - DNA, 3000 bp, Unknown; identical to SEQ ID NO: 14683
  misc_feature (1)..( 3000): cDNA_ID_3019499_gDNA_ID_2684212_Annot_ID_191555 3000 nt of promoter + ATG

SEQ ID NO: 14695 - DNA, 3000 bp, Unknown; identical to SEQ ID NO: 14682
  misc_feature (1)..( 3000): cDNA_ID_2730528_gDNA_ID_2684212_Annot_ID_191553 3000 nt of promoter + ATG

SEQ ID NO: 14696 - DNA, 3000 bp, Unknown; identical to SEQ ID NO: 14681
  misc_feature (1)..( 3000): cDNA_ID_2730530_gDNA_ID_2684212_Annot_ID_191552 3000 nt of promoter + ATG

SEQ ID NO: 14697 - DNA, 3000 bp, Unknown; identical to SEQ ID NO: 14680
  misc_feature (1)..( 3000): cDNA_ID_2730534_gDNA_ID_2684212_Annot_ID_191549 3000 nt of promoter + ATG

SEQ ID NO: 14698 - DNA, 3000 bp, Unknown; identical to SEQ ID NO: 14690
  misc_feature (1)..( 3000): cDNA_ID_2730513_gDNA_ID_2684212_Annot_ID_137364 3000 nt of promoter + ATG

SEQ ID NO: 14699 - DNA, 3000 bp, Unknown; identical to SEQ ID NO: 14689
  misc_feature (1)..( 3000): cDNA_ID_2730509_gDNA_ID_2684212_Annot_ID_137365 3000 nt of promoter + ATG

SEQ ID NO: 14700 - DNA, 3000 bp, Unknown; identical to SEQ ID NO: 14688
  misc_feature (1)..( 3000): cDNA_ID_1032199_gDNA_ID_2684212_Annot_ID_137367 3000 nt of promoter + ATG

SEQ ID NO: 14701 - DNA, 3000 bp, Unknown
  misc_feature (1)..( 3000): cDNA_ID_2730501_gDNA_ID_2684212_Annot_ID_137368 3000 nt of promoter + ATG
caacagtcaacagttagttagaagaatcaggacagcctctaattacagaacaagctaaggttagaaatagaaaggagaagactcacttgaaatacttatcaaaggtcaaacgatctttgccaagtcctgcaatgtcgaaaccataatcccctggaagttctcctgtaaggtatggaggataatcatatgggattggaccaaaccaacggggacgttcttttccataccacttgctgcacacttacaggaacaaaccaaggaaatgtttgatccatatagttacagtaacatagaacttttgtatgtatctatcaaataatcgttgccgcagaaaactgaatttatctaccattttatcaaacattgccttcacaaaaaaacactgataaactcaatcttacctgtcgtttctagcttcctgagctttagacttgaatcttgaagaattctctacggcttccttctttttctcttctaatctccgccgtagagaaactcctattgagctatttgcaattgctttaaccgcagtgaatggaatcgccgagaaaaccaacactccggcgagctaaaaacaacagcaaagtttcaaaaagaacgaggagaaaacaaaatgatgatttctagtaagaagataaattcaacaaaaacctcttgccacgaagctctgcaaatcgaacgggactttgtcacggcaattctattacgaggcttggacacgagaatcctcggaagagaatgaattgacgaataacttgaggaaagtgatgaaagcttctcctgaaacagtgccatggaatttggctcaccgtcaaatcttgatttggctgtctgtttcactcgagaagaagaaagcagaggtgaagttagaagagcaagaagcggtctctaattttccacaaaaattaaaaataaccaaattttcaaagttatggatctggccacgtgtaatgatattcgccagttctttaaaaagcccggactcggcggatccagattataggcccaattaagtaacaggccacatcgttagatccataaacaatcaaaacaaccgttttgttccaaagcaaaagatccaaaatgcagagtttcattccaaatcaatcggtgtaagtgaacacgatgaacaacggtttcaatggacgattgagatttattaatcagaatcagtctctgttctaagtcctctgttttgagattagctacaatcattaaaaacacgaaaactcaaattttagtcttcgtagattcgacactcgtcggtctctggattctcctggcagaaactctcgagcggatcctgattcagtaacttcagcttgatcctcagatctgctctggcttgactcacttcttcaacttcgtcccacgcaactctacactcctccgacatctcttccgcctcgcaaacctctgtcgcttccttcactttctcctctatcatctccgatagtttctcctccctcatcttcgtccccatatactttgccgtcgccttcgtcaccatcatcaggctgaattgtctcggtactgtttctctgaaacgtaaaatatttgatccagttgagacgggccgtcgctccctttgtgacggaagcaacactctcccatgactcgccgtcgccgagcccgagatcatttctacgaatttcgtttctcttcttcgtctttcagaaaattctttattcaccttttattattaatggtttgggccgtttgactatagttatcgtaattacaaataagccctccaatcatcaatgttcgattgtcatttcacgtttttttttttaatgcggcattatccaaactacactcatcaaacatttgactttagaaaaaaatattattttcttctcataaggtagttgagataagcacaatgcaaagctgaccccttttacctactccttttgttgttctaggtgttcaccaactttgatgtcctttgtatcatcataatcttatgcttttattatatactcctactctcatcgtaatatcaaagcttattgtttttgaggtcttatcacactaggcctatattatgaaaataacaattaccattaatatacctaatcccatcgatactgactgatgaaattcagttggtagatctttaaataatgacaggcctttcctacggtcaacagagtaaataagaagccttattaaaagcccaaatcaggtcaaataataaacaaatccatttttttaaagatccatgtgcataataaatatttattttcgatgggtagtttatcaattatcaggcaataataatacttggggaagagggaatgagagagtcgtatcttttactatatgtttgcctttattcctttgtaattaccatgtaaaagcatatctccctattgaatgctatattccccaatatttccatcttctttttttttctctcgctatttccgtatttacccttcacctatcctttggtgctcattcactctcccttttagcatatcatcatatcctattttttgcttttattttttcttagtttgaaagtttggtcgcacttaggtggggaatttgtcaactcaaactaaaccaaaacctaaccgcatttataaactaaacttaaaaccaaacgtacactcatacagttcgataaatttgcagtctaaaaccttttaaaacccataaaatatgaacaccaaaccgaattagacaatttggtcactaaccaaacattaccaaaccgaaaaaggtaagggtatatatttatatccaatggcattttcgtaaataaccagaataacaagggctgatcgagaaaaagcgtggactgaaagaaaaaaaagaagaagaccaaattttggctgtttggttgatcgtatcgcccaagtcccccgcatactatataaatacttttgacgggccaaaggaaaaaactttctctgaatcttctctgagtctctctgacactctcaccaacctaatttctcacaaaaacctaaaaagttatcgcccatg

SEQ ID NO: 14702 - DNA, 3000 bp, Unknown; identical to SEQ ID NO: 14687
  misc_feature (1)..( 3000): cDNA_ID_2730494_gDNA_ID_2684212_Annot_ID_137370 3000 nt of promoter + ATG

SEQ ID NO: 14703 - DNA, 3000 bp, Unknown
  misc_feature (1)..( 3000): cDNA_ID_2730490_gDNA_ID_2684212_Annot_ID_137371 3000 nt of promoter + ATG
ttctatcgtagtttttttttcggatgtgtatcttagaaagttttgaccatcccaaggaagtagaattaagaatctgatcaaaatattcgtttacttagggatttgtaaacgccttggagatatgttccgtcggtgaattatgaaatatatttgttgtggtgttattttcgaatattttttgggagatattgtaaccgacacctgatttctcccgtgactcgaagaggatactaagaccatcttcattggtagtcttttaggagattttcattactaaaataataaaaataaaaaaaaaaagaagagagagagcgtagaaagtttttcaagtgagaaactatgagatactctctacaagctatctttacatttttctcctttcaattggtttaattttttattaaaataaaaatttaatcatataataaaaatttaataaaatactaatattttttttgtttgagaaactttttgagtttcttcttaatggagatgccctaactcaacaagtgaccaaataagttaatttatttatgtgtatggttaagcactccaacgtcaacttaacatgaaaatattccttagcctaactcaacatatatttcaatttagagactatttggctctctgtaacaaccataatccagataattaatagaatatcttgacatgagatgtgtatctatgcacatgagatatgtatctatgcatgtcgatggaaacaaaaacagtttgtcctcatgcataggttccaagagatgtgtcggccgacaaactaaatacgctcgttagtaaatacataaattatacgatacgaaattattaggggtataatttccaaccataaatgagagtcgttaattgatgtgaaaacaatcttgtaggagtagtaatttagggaacaaaacagaacctccacgttacgtaattagacactaaaataaaactctcccaagaatagcgtaaaagtttttaaaatatatacagaatcgaaagcaatcaaatcatatttttcttatcgttctaaaacaattaatcacgaagagcttcttttcggcattataaaaccgaacatgtacaatttcctcatatccattagttgtttgattggtggtttttttttttttttctcgccaattggtggctttatgatcgctgtataactattgtcaacagagcccattactaacgtaacgtgcatgttcttcggtcaacacttccaatatctcaaatcaaagccataaccgtgattaaataactattttatgagttttttataggtaaaattgagtgatatactatatagtaagaaatttcagaagctcactacattttagtatcttgtttttggtcgtactaattgagaaaaatcgttttattttcataatattttccaattcatcgtgaatgtaagcaaaaaggttgaaagaaacgaataacaattattttaaaagattagaaaaaagtgaaaagagagttttgtagtacaagaaatgaaggaagtacaaacagagaaacgaatgaatgggtgtcagtattctcccaatcaaattgacatctactttccgtaccatacagctgtttccccctcttctcaaacctttttccccacttctatgtacaagtacatacatactattagttagattcacacactaaatctcgtgtattgtacttccttagaaaaaaaagtgcacacagagtaagaagagagggtttaagttttttttatacacatccggaaaataaagaaaggagaaattgaatagctacataaatcaatccgtacaatgcgagagatttcatatagtagttttgtaaaataaaagggtacttatgtctttttgtatcgacaggttttttgtattttatgatgccgacttcctccaaacgtggacgcgctttatggttagtgtgtttaagtaggctaaaaatctctaaagtgaaactcaattgtcaacgattaaagaattaagaagatgtaaaaaaaaaactaattttccaaattaattaataagctcataatatagcgtgattcgcgttaccgaatgtaatttgacttgtggtatactaattgtgactttgtttttatttctttgacattacgtaaaatttgtttctaccaattttgataagtgcacggtcaaatcaaaagaggaaaatgaaaacttggggttgaattctcaacttgaacatatatgatagtcaacacgacaatacgttgtattccttatattgaaatgaagctaattaaggtctatatggaaacaaatatgttatttatttatcaatgacgtatcacattttgacgaataaagagattaatgttatcctttacaaaataatgaaataagaaagaaacagaagtttatgtttgtccaattatcctcaatgtttgttgatatacgaattttgagaattcaaactgaatacaagaaataaaaatgtagtgagataataatacaaatttgcattatttcttccaagattgttttctttaagtaaatgaaaagtatcttggattattacagaaatgaccctaaatctttttgaatttacagtttgtaccaccaccgaataaaataagaaaaagtttcgttaaatgttacgagtgctcgttgaagacgaagtttcgaagacgaccaacaaagagaaagatcaaaatttgagagggaaacaaaaaaagaggaagagagaagaagaagaagaaaacacccttgattaataaagtctcagactttttgattcgattcgaaaaaagtgagtttatgcttgaagctgggaattccaaaactcggaattcgtgtaaaactagttcgatttatcagagttatgctaaggtaacatagtcgattcatttcaaatttacgaactttatgttcatctgatctctctctctttctcttctatttttggtaacgaatctcgaaatttcttgtgttgaattttgtagttagtgaaggtgaatgaaaaagagttgatttttgagagaggagagaa

SEQ ID NO: 14704 - DNA, 3000 bp, Unknown
  misc_feature (1)..( 3000): cDNA_ID_2730478_gDNA_ID_2684212_Annot_ID_137375 3000 nt of promoter + ATG
gagaaagacgggcgggctagttgataaaagctcaataaatatgggctggtttagggttaaacagcgaggcccatttgtacaaaatattgacatcgattatttttgttttgcatttgtggatccccaggctgagattacaactcagaaaattacaaaaaaaaaatagataataataaacaacgattataatgatgattctttcaatttgttatgttagagaatcacaatgcttccacacgtgcattttatatcacaatttagattatgataatttgaacaatctgacaaataaggattatttaaataattgacttgttatgttattacaaaataggtactatgagttagacaaaaaaaaagaaatctggtggaatggcactgaatcttagatagcacgtgtcacgtcgaaatattgcgtgcaagtatacatgcgccgttactaacgctgttatagacttatagtacactgaaactgttcatatagtgctgtaatattttcgtgaacttatgaaataggttcaatttcttttgttaaaatttgggtgtcaaagcgggttaatatattttatgaattttaatagatagtgctaaaaattggggtcttaaaatagtaactataatgtcgtcgtaccattgcggagtttgcaagccgatctgcaaactcttcaaatttaaattatttttcaaattttttttcctgcttagttctttatcaaagtactaggattaatgagatcgattattaatacttattagtacagaagtataaactagtactgagtgattaaggagatcgagtgggaattggcggtttatattaataaactagtactgagtgattaaggagatcgagtatacaaattactagtgagctatttttaagatgctagtataactttatagtatatcataactgttttttcatacgaacatcggtttaaatgaagtaagttactcaaggctggcctttcatgtgtttaatagtactaaataagatagtaccagtggccggtaaaattagctagctgttatcaattgttatataatatacatgttcatttattttatgtattattagactatgagatgatatgagtacagaaaaaaaatccaataaatatgtatataaatatctagaaatgggtagataaactatttaaatgagtcactcaacgtgcctgagtttccttttcgatttaattgtcctcattgtgaattggcataaaagtcggtgcgaaggaaagccccaaattatttaacttgaaaacgaaagtttggtccacctctctatattcatttttctgaaatgaaattaatactcaaatcaattttgtcataaaaattgtccaattattaaagtattcagtcgtgtttctatatatatcactgtctttagtcagctagtctaatattgcatatttgcattcacctctatatatgtacacacacatctacgtatggagaaaacattgtacattcactacattcgtgatctcatttatctttagatggctaaaaaaaactcagatagaatatcacacttacccaaaatatactattctttcgtacgaaatcttattactagcacatgacgtgtgtgagaaaaagtacactcattggacattcaaaggtgttaatgttaaaattaacaattgggttttctaactatgagccactaaatcatcttctaaagtcaattataaattatacgtgacgttacttaatattggaaataaatattggagaacaattataagtttgaaatagaaatcataattaactattttactactccaaccatttataactacgaagctaccttaaaaaagagaatgacatgggtatgactttgcccgttttttcttaatgaatttgttactctaaagtcataagtctctaatccgtattaatagcagtaattaatggatacaaaaaaaaatcaaaaagaaagaaaaatagacagggtggcatcataatttatggggacagctgtcgaggtgatgcatttatgaccactaacatgcaatggcacggatgcaaattttaattgttagattcttctacaaaatttacttaattcaatacttctgttttcttcttcttcttcttcgtaatttaatagattctgcatattgtttaatatttattttacatgccagtgatgggttgtcattattctgattcatttttctataaaatcattataaaagtattttcaacttcttgacaaaaataggtgtttaattattactacaaagttcaggtcgattgttatttcgggctacataaaaaaggtttgatttctcgtatgggagtgattacaacatatttattggtattttatgaccccatgtcaactcttatgtagtaatttgtccccacttattgaattgttattagctcaaaggcattaattgcacggtttctaacttttcttctatagtagtatgtttttcacatttgaaaaacactaatcattttcattttgcatggaaataagaccaaatattttcattaatccactaaattgcatttgcaacacaagcccaaatcattatatatataaatataatatattattgtgatgagtaaaatatagacatgcaaagtgactatgaactactgtaattatacactgcaagaaaaacattgccataaatatgaaaacagaagacattgacagatagtaataaaaataatactatatctctaaatataattcagatgttaacgaaagtcttgtggagtaaaaactgggtttcacacacttcacttgcctctcaatacccgggaaaacaaaatgtcggtttcacttgctacttttcccggaaagttacaaagtcattcccttttcaggttgtgaagtcacattaacataagagaagaagcaaaaaggcttggagctttattttttgcttttttttttctttcttctagaaaacatgatcttgagtttccgagtaagattcttttaaaaagagtttgcaaagaacgagaaaa

SEQ ID NO: 14705 - DNA, 3000 bp, Unknown
  misc_feature (1)..( 3000): cDNA_ID_2730660_gDNA_ID_2684216_Annot_ID_137395 3000 nt of promoter + ATG
taggcattttaccaaattccttttttttttttcgtttggaccacagagaatcagtctagtagtccattatttacaaacaatcgtgggagctagggactcatctgaggtgaaaacgtttcactactaatctaatgaaactattgtcctttttcgaattgttgtcctccgtatgtaatatattttcttttatctttatggaatgttgctataatagttattattaagtgcttaacggaaaacatagagtgaaaaaaaaaatagtaagttaagagatatagatagcagtaaaagaagaatgtgtatgtataaaacagagcaatactgaatacaaaaatagaattagggagttctagaagagaaaggcccaccgtgcatggatggaccatggccatgccaacaaattttattaaaaaacaaaattcttccttaataagaaagttattcaaggtctctttgtggaatggggacccttaatcaaaatgttaaatctcctaaataaataaattaacttacatttcatagtaattatgttttaaaacaaatggcttagcagtcttcttacatgcatcgtttctgaaaggtattattttcttaccaccattttttattaaaaatattttatgaaatataagcttgggatctaaattctgatgcatctaaataatcatctatatgaaaattgcatcgtgccggagaataaaatttggtatatggaactatttataatgaacttttgggttatggtgattagttcatgaacccaacaatgcctaatttaattagcttttctctaaccgccgccaaatataaagatacttctaaataattaagcaaacaataaattaaccacaaccacacattgtcttaattaacagcacgaaaatgattagaaacttccactcatgtgtttatgactgtgtttatatttgtacaaattagtaaaatacaatgaatatgagctaatgcagcttaatttaagaaatttaaaataataaataccaaagtggttgtccccgtcggaacaagaaatctaaagggtttctaatttcgtgccctttgtggactctcaagtaacgaaagtcaagaatgttgacccatctggtctgtgtttagttatgaaatcatattcaaataccaattagacttaatttatttagacaagttaagaaaaaaagcaggacaactaaccgtcgtgaatagtagtattaattaattcgaaattaaactacagatataaataaagagtgaagccgtacgtataatacgcccaagtgcatgcaatgaaaagaaacaacgaaaaagaaaagtgatacacgtaggatttgcgtacgaattttatcattacaaaactaaagagagtttatagctactagtttcgactgaaataccacaaactgttagatagatttaggtgcaatcgtttttgctcctgtgggcgtttcgctctgtttctttgtattttcctattaaagtgcccaaaacaagaattgatacgtcctctaatttggtaaaccaatggatctctgtgctatggctatagctaatgcatgtgatcgttagaccgacaaacgatatttataactcaattcttcataggcccatagtcatatccttagccacagtattcgaactacagaaatttctctaccccatctctattgaaataacacatatatacagataacacgtttataactgcataagtgtatttcaaatgcagatactcttttaagaggacaaatatataaagaatatatattggagtgggcaccgagcggttaaaatctaaaatataagtttctgaatatgcctgctatgtatttcggtgaaattttaccttttcttgattcctaatcttacgaataggaaccgaatatatatcattttccgagatcatgtagagatatgatttttgatcaaattccttaatatattaatacgttgatgtgtatcctaagaatgtcgaataatcctcaaatctcaaggttaagtgattagaaaatattaaaaacattccacgccgtaacacttggtaaattcaataaatatacaaatcatattaagacgaccaatccaacagttttttttttttttttttttttttttttgttgttgttgtaaaactaccattccaacaaattcattttaacataagcctgcctaacctttgagctttgatctactcccttttttttggtgtctaacctttgatacagccgtaacattaattagctgactatttaagctaaatcaatacactgtctatttttagtttaaaacgacacttaaataacactaatttaaaagcaaataaccattcttaacatagcttggatgattaaaaaaacaatctgattcttaaataaaaaggatcttatttcgtgtgattaccaaaaaacaaagtcttctttcttgtgccatcaaaagctacgctcgtatctcatgctacttaattaaaaatatagaccaattatgaaaagattaaacgcattattataaaatcagatagtgcggttcataatctttcaacatggatgaaattaattttactttttccgctaaggttcgagtttaacacatgtctgtctactccaacgaactttttttttttttttttttttctgtatatatggttttaaccgattgactccttataacatttttttttccgatgttctaaatttccattattgtactctatacatttcatttacattgagacatcagacacgtagaaaaaacatgcttaaaaacctaaataactaattttccaaggatccaatggagagtgaaaataaaaagagagaaagagaggcataatgtggccaaaaaggtacagagggagccaccaatgatagatgaagttttttcctatttcttttgtcttctcttccttcttcttataaattcctctactcctccttcaccatttcctcctcctcaccttctctctctcaacatctctctctttctctgtcttctctctgtctcaacgagaat

SEQ ID NO: 14706 - DNA, 3000 bp, Unknown
  misc_feature (1)..( 3000): cDNA_ID_2730608_gDNA_ID_2684216_Annot_ID_191691 3000 nt of promoter + ATG
gatattttcattcattaatttaaattgaaataatttaaaaaactatattaaagttataaaataggatgcagatgaaattaatcttattactattatgcttctatagaaacattaaagtagaagaagatctgcacaagttggtggagaagtccatatatacttggacgatagtatgggccttttaaaagcccaacagttagaacccaaaaaataagagattgatataaccgtaaataaacaatacgacgatatttaagtctccctcttggctaaaatatgttgacttggtggtaaatgatccacatacgcgtaatatattctggttatgaaaatctttagtgaaccggattaaacccggaattaagttgtgtgtttaaaacgtttaattatctataaaatagaaaagggacaccaatactcacccagcaaagtggtagtgactcagcatgatgctggagtcgcaccagggttcgagtaacgaaattggtaccccgagtgagaaggaaaaattgtttcctctcgacttccatcgagtgatgatggttggcttccactgagtgtcaatggaagatgaatgacaaaggagtttattgtgactccgtcatgaccagactgcagtctggtgtccgggtcttccctgaagtgaagattcggggtcgggaatgtttatcacagagaatcatgcctctggtgatagccgaaatgaggtaatccaaattacctctttttttataaaagacagagaatcaacttctgttactacaaacgaggaacagagcatcaccttaattatctgcaaattaaaagacattgacttgttctttgaatagtgtgtttggctgattcattcaaacttcccatcatactactactaaaccgactctgaccagtgcaaaaaataccagctttccaccaaaattcactatttcgtttcatattattctgatttctgaatatatgcaactataatatattatgaggttttttcattcatttatctttatgtagaattatcttcttcttcttttttttgactctatgtagaattatcttaatgtagcttttatctataagtgttgaaattttattctgttcaaaataatcgttgaggcaaatcgtccgtactatatttagattggacccattctcttataatatttgtttagtttattgctcaaatctaataagattttattgtggagataacataacaaaatgttagtagattttctttagtatgtttaatgtaacttgtaacgacataaaaaaaaaaaaaaaattgtaacgacacgtatatataaaatgaaggacaaaatggttttaacttcatatcgcttacgtccaccttttgcatattttcttataaccgtttggatttgttttgaaattaattattcttagagattgtgtgattaacgataagattttgtgccaagtttcatgatttttttgtaagaaaatgaaaaggaatctagaaacaaaaaggaatgtcattttcccagaaaaaagcactaacaatttataaattaaatatattttctatctgatgtttgattcttttgtcctcgtacaagaatggagtatatattttaattggaacctgattttctttatcattttcaataatttaaaaatcgaacactatttaaaaacacagtatgattgtattaatgtttactgcataaccatacaatataatcttcaaaagtaattatattcttgcaataatgttgtcaggtatgagttgttttattttattctaaatgatttgagttgtatgttttggagcatgttacacgacataagggaccattacatggatatagagtgctaccaatgaaatatagccacgtcatcactaacagctgcgattatgatggtgggaccatagatatctgactttgacggctaagattgagtggagaaattagagtccatgtgagattgggtggactacaaagcaggagagagtttgatggacgtcgttacttgcagctaccggacgcaacaaaccggacttgatgcttaccatctcttgtttctcttactctcttcaattgttttgtcttttctttacaactatttcgagaagaaaaaagttctcacatttcattattgctacataatttattattttctacaaattatgaggataagtataaatttcatttatcaaaaacaaaaaagtatgaatttaaaaaatctaacagtataagaatttatcagttatagtttggattttcgtacctaagagttttacacctaaaatccatcagaatttatttcaaatccttcaaacttcagcacattaatatatatcactactttaaattttgttataaaatatcactagaaaaatatataatctgatgtcaatatatataatacaaaaatatggtatatttaactgctttttaatgtatttaattaattttgttgccaccaactaatcatgtttcttcaatgcattgcgattattattcaaaaaacattataatagggaagaaatatataaataagaaactccgtgtattggacgcggatacatagatagaaatacattaaaattttaggaatgaataatatattattataattatggttgaaaattgaaagtgaagaataaaagaaataaatacgtacacacatctttttctctgtctttaagagttaacgaaaacaccattagatttaagtcacatgtggctcttttgcatgttctgtcataaacacgtccatttcattcatcctcttcttcttcttctccttctatcctctgttttttgccctctctctttgtttagtggctgtggtcgtttgtatttggtgaaacataatttaaaaacaagtgcggctatctttaactctggccgacacatcggcggattcgactgtggtcggatcaagaagtgcttcctttttttccggcgtcgtttcttcttttatattcatcgatttggtgctctcgcaacttccaatagattacggctaatttctaaa

SEQ ID NO: 14707 - DNA, 3000 bp, Unknown
  misc_feature (1)..( 3000): cDNA_ID_3018678_gDNA_ID_2684216_Annot_ID_191688 3000 nt of promoter + ATG
atattatatatatatatatttgtcaccatatatattacatttctatcaacatcgagcatcccttaactcacataataaacatagaccgagagaacttagagatcaaagttatggagaatgagagagaaaagctgatttacttggctaagctcggttgccaagctggaagatatgatggtatcacatattctcacatatttgcccttttcatagagatagttgatttgatttaaactaggaggttaattatcatattggtttatgtttttcatgttgtcaccgatccagtttgtgtgttttaaacaaacttatggttactcgaatcatatgataacagaagatgtgttatgtctctcttcaaatatcaaatcatttcatttgatatctattatcagggtcttagaaatgcccaaaattactcttgtatacgaagaaatcagtgtagcaactttatccatctttctataaccttataagaagtaactaagcggttgttgtggcagatgtgatgaaatcgatgagaaaagtatgtgagcttgatatagagctaagtgaagaggaaagagacctactaacaactggatacaagaatgtcatggaggctaagagagtttcattgagagtaatatcatccattgaaaaaatggaagactcgaaaggaaacgaccaaaatgtgaaactgataaaaggacaacaagaaatggttaaatatgagtttttcaatgtttgtaatgacattttgtctctcattgattctcatctcataccatcaactactactaatgtcgaatcaattgtcctttttaacagagtgtaagtcatattccgttatcataatcatgatcaactctttttttttttttttttttaattagcattttgttatattgtttcttggtatgtgtaggaaaggagattattttcgatatatggcagagtttggttctgatgctgaacgtaaagaaaatgcagataattctctagatgcatataaggtcttctttcaatcatgtttaccctcaactttaatattttattttcccctattttcttcgaaatattagtttggaaaaagcatggaaaaacatgaaaaaggcatatattttgtaggttgcaatggaaatggcagagaatagtttagcacccaccaatatggttagacttggattggctttaaatttctcgatattcaattatgagatccataaatctattgaaaggtaatatcacatttgcttataaataaaataagtgcggcgtttcaaaatctatcaaaaactttgtatatataataactaatttatattttcattgccaattaattttaatgaacagttttttacagttttttgaatatcttagtttcttacagttaactaatagtaattttatatgtgaatttatacagcgcatgtaaattggttaagaaagcttacgatgaagcaatcactgaactcgatggccttgacaagaatatatgcgaagagagcatgtatatcatagagatgcttaaatacaatctttctacgtggacttcaggcgatggtaatggtaataagacagacggttagaaaatgtaatttgaggcgatatgatgaaggtaaatcattgatcgtgtttatcaggtttaatagtttacataactcaattagtcttcttgttaactcctagtttacaataatactgtgtatttgttttttgtcgtctactgtgtattttaactctcggctttgtgctttggttcatctatcatttcagttttatatacaactgttccacaccattttgatcatcatgcactaattagttatcgaactttgtaaaactatagcatcatttaatccaaaatatttattacgagtatataagtacatacatgaagccacgccagtaataacctgatacatgcaaagtacatcttaaatattgtagtaataagtaagctaccaacatatctaccactttgtcttcaattgattgtcctcgtaacgtgtcctaaactctaattaaaattaggttagccataagctgaagaaatgaacgtttttttatttcaaataattctgtgaaaaatgatttttttttcttcttcttctagagtattggcggattcaagactctccaaactttgacaaagaaaagacgcttataaccaaaattgacaaagctttctaagtcgtctatataatttttggtcttcaacaaaatatctgtgtctcagtctaatatacttttctttttaagaaaaacttgaatattaagttagatagtcgaatttaatttcccaacctacgcactgtcgcaaccttatgttcacattaaagactaaccacatgcctctcgatctcagatacaaagatttttgtaacattcgtgccatctactttttatcacaaataataacaattgtatgtgctgccaaataaaaaagcctatactttaggtcacataacacacattttgcacacaacttcattcaatttcgttttttctcaatttcgaaaaattaaataatccagactctttgcccaaaaaaataaaataatccagactcttgtagaaaaccttttttctcttactagaataatgtgtacacatgcaatgcaatcttttgacttatagatagagtttacatgagaccaaaatacaaatagatacattaatataattatataacaaattataagaaaagaaaaaaaaaacaatttacgaggaacgataaaaacgttttattttctcttaacacaaataagaaattcgtaaattattaattattttacatgtgatgcgactccagtcactccaccgttataacttataaccacatttcaatttaagtctccttcaaatttattgttaattaataataaaaatgtgctcattcgtaataaatcccccaaccgataccagagaaccaaacacaacacaacacaatatctttcaactcaaaatctttttcatttctctgtatcctcctcatatttttattcttttgtaatg

SEQ ID NO: 14708 - DNA, 3000 bp, Unknown
  misc_feature (1)..( 3000): cDNA_ID_2730646_gDNA_ID_2684216_Annot_ID_191678 3000 nt of promoter + ATG
agtccacacgccatatatccaatcatattgtttgccatcttttacattatgcgtggtaatttagtgttcaaatccatgctatgaagataaatcgatatctattgtttttaatcgctaaaacaaaactagttgataatctacagacaacttttttggcaactgattttgtttacgaaacttaaattaagccaattgaaaagtttttcgcgggctgatttttttctccaagtttacaaattttaaaagtggatcaaatgatatgcttatataaataattatataaatgatatgagtcatataaataattattagttatcccttatttttaattacccgtctaatatacatgtttacattcgtattatgaattatacatatgtacaagtatgatgacttcaagtatataatataccgcaatcattttatcacctatttcctctttagtttcatcttgtctttttagaaactatgataattaacggggaaaaagaagtcatagatgtattgcttatgtcaaatttgtaatcatttagttgcacaagatgtaaaaaaaaaaaaaaaaaaaaaaattcgtgtggttgcatataaaagaatttatgcactttgagtatagtagaggtttatcgaatgactttccttgtatatatatatttggttgaagcactttattaaatatattcctttgtgtgtgtgtgtatatatcgatcctctttaatgcatcatactcaaaaatatgaatcagtctgtaacatatatgctttgagttaaaattagccatgcctaagaaattagtacataaattgttttttgtgtgttaaataaatcacaatatatatgcatgtcttctaccttaatgctactaaaacaattgctatgagcctatatactagaaaaaattaccaccgttttacttatttctgaaactagcaatcattttttataatgggttacgttatgtttttaattcataaccgaattttaaatcagtggtttttatgtggaaaaatgctttatttgttagactagagtcgtactgtatatggtccatatacagccccacattatgatgaatagtatattgaaattatgtttgcgttcttggaggaaagaaatcttgaaacaagtatataaatcattatttcgaatagaaatcgttggtttttgactacttttggtatttttgttgaatatttttggaaaaagagagatttaagagaatctggctagttttggattcattaatatacctttggccttcttcgtcgtcttctttaattttaagctagcacgagtttgccaagttgtcggcaggaagatataagcccattcattacatgtacactttctaagaatgaaaaaaaaaaactatgcttatcataccaatttgctgaaatatatcatgaactagatcataatctgtaaaaactgtcatatattcagataatctaagccaatttctaagcagaagtactatgtagatgaagctttaatttgtttgctctagcttctctttagtccgattttttagtgaaatctataaaaaggtttggactttggaggcatacgtgtgtaggtgagaggacaaaaaatgaagataaagcggtcaaagctaaatcaaacatacaacaacagacaaagagatatgaaaagctgccgtaagagacagaaggtccccaacaaagccggcaccgacgaactcacacgaacgaacaagacgatacgagagtcacgagaccgtatcactgtcctcttccacacactgtatgaacataataaaatcagtttatctcaactaagaaaaatgaatcatcacttatctcacgtacaagtcttagttaaaaaaaaaaagttctcgttaatattattttaatggtttaagcgtaatttcagcagaatctattcacgataataatttggtggtgattatcaatatactaatatggatatgacccactttattattgcggatgctttgggcgtttaagaggatagacttaattattccattacttacttttaataaagccactattaagcattgacccgttggttcttaacttttttgttagtgtaccacaggctaatgccattatcataagttggtcgaaatagacaaattttacttccatccatatcacaaattcatgacttttacgttttatcagtcaaaatcacatcataaaacaccaaaatatcgttgatgtttttattacttaacatagcatattagctaatcattgtaggatattagctttaatatccacatcaataagagtcattggatatatttttaatacaattttgatgttgtttacctaaattgctgttgctactattagttggaattaaaaaagtttcaaattagcaatatgagaaagatttattcaaaagaaaacaaccacaaagttatataattatagtgcacagcaactactaacagaattgcttactttaatatgaatcaattgctagtagtgctcgtaactcataattgtctaactaaaggttttgagtttttgtgctctatgatagtcctgtatgttaaaaagtttcgctatctttgtattaattatttccgtaaatgtcgataaataatgataacaacaacaatagtattaatctttcactaggctccaaaaatatttgaaaaatatttcgtctttatcaattaagacaataaacaatcaacgatagggtcagcaaataacaggaatgttttaacgaatcgaccccattaaatcaaattaagatctaatttttggattttagaaaacaaaagtaagatttttgtgttatagcaaaaggcagacaaatcaaaaagttggtttcttggaaagtactccactgtaactcttttcttagacttatataaataatacataaacaactttcatcttcaactaagaaaaaactctctttctcctctgtttcatcaaactcttcatcagtgcttcttattttcttcaaagcttcaaatttctttttttccttcttgcaatg

SEQ ID NO: 14709 - DNA, 3000 bp, Unknown; identical to SEQ ID NO: 14705
  misc_feature (1)..( 3000): cDNA_ID_2730660_gDNA_ID_2684216_Annot_ID_191673 3000 nt of promoter + ATG

SEQ ID NO: 14710 - DNA, 3000 bp, Unknown; identical to SEQ ID NO: 14708
  misc_feature (1)..( 3000): cDNA_ID_2730646_gDNA_ID_2684216_Annot_ID_137399 3000 nt of promoter + ATG

SEQ ID NO: 14711 - DNA, 3000 bp, Unknown; identical to SEQ ID NO: 14706
  misc_feature (1)..( 3000): cDNA_ID_2730608_gDNA_ID_2684216_Annot_ID_137410 3000 nt of promoter + ATG

SEQ ID NO: 14712 - DNA, 1696 bp, Unknown
  misc_feature (1)..( 1696): cDNA_ID_3018798_gDNA_ID_2684219_Annot_ID_191746 3000 nt of promoter + ATG
gaattccgttaaaattattgaccacgtgtatggtcataaacaaattatgaattcatgattcgatcaatattacgacctactacatatgatatgatgttgtaattaaccacattctcttgctttttatctcattaaaatttatttattttaattcattattttataccaccactattttccacgttctatggatgatcatagtggagccacgcatgaacatggcaaaaatagaaatatgcacatggcaatatatatacactatctacgtatgtgtcaatcagggcaatccaactttgttgtggtataaactctaagctcgaacagatccgaagatattctttcgttctctgacctgattaatgatcacgaagctaaaattgattatcttttatttttgtttataaattattagttatccttaatctgaaatcattttaacaaaaattttactgaatttaatcataaaaataggcttatgtataagctaacacatattttccaatgtccattattatttaatggtggaattcgatgtttaacgatatgattcaagttataaaaaaaccgaattaagtatctatttgtttctataataaaattctgaaatccaacatctctaaactatatactgcattatataataaacagatcatatttatttgaatagagtagctaagattaggcatactagttcaaatgtttgatggacatccgatccagttagtccgggccttcaatatttgggctcaaatgggccgaaactatattgggtcgtatatgaaaagttgaaatatctccaaactgaattttggatgggaaaaagcgggaagtcgagagagtaccttatttctaattttctataacgagggtagggcccaccaagaccatatagcgtaaagcaaaatcaaaatcaaacaattaggaaaaaaacataattttctcttttttcgaaattcgaaccgtaattagccttttgtttttcttggaatctaaaagaaataaaagagaggaaaaaaaggaggaacagtgagcaaaatcgtgcgactgggaaaaatttcgaatttttttctcttccggcgagggattcaaacttccgcctccaatttctcgccgtgaatctgagttttttttttccgtagcatttcaataggagcagtcttcattctccgtcgtctacactatagagaggtttatctacaagcttcttcttctccttatggcgttttaggttcgtatcgttttttttttttttggccttcgtctctgtgttacaaaagcgttgttggcttcttagggtttttgactggatctgcgtgattttggtggaatatagagctgattttatgggttgatttggtcgacattgtggatatttgctaagcgagatgttgaaatgtttgaacaaacttcatcattgtttacaatttaaagcaaattttggctgtttatctctttaattggggaactagtcttatctgaaattgaaagcatttgataggtattttaccatatgaggatttggtgtagaatgatgaagtaaggtctttcatgatttaaccatggattaggaattaggaagtatatgtgaaaccaattaacattgatgctaactttgttgttggctaattggttcatttgctttagggtcttctcgctactataattctgggagtcgcgtaatctctgagttgaaatg

SEQ ID NO: 14713 - DNA, 3000 bp, Unknown
  misc_feature (1)..( 3000): cDNA_ID_3018751_gDNA_ID_2684219_Annot_ID_191760 3000 nt of promoter + ATG
gaataaagattcaatttttatacatgccaagataaaaaaaacctagaaattataattcaagaacagtgagtgaaattgcaattctagggtttttagtaaatttaccttgaaattctgaaagagaagaaacagaacagagctcgtgaaactagttaaacggagaagaggaagtgtcaagaatgttttgttttgacgaattttgtttgtgaagatttggaaaaaacaataaagattttaattcttttataaaggctctgttactgaatttccaaaattgggtttggttagtaacggaaattacgggacggagacaagtagagattttccgttcgtgtctaatgagaaaggactttgtgccgtttttatgaatatacactgcatgacgtttgttatgatcgaagaggtactacgtgtagttttctatttaaccgttttgggctttgatttctaaggctttttgattggtaaggctaaggcccataataaacctgcccaatggactcactaataagctaatattatagggacaatttgtaattaggattttttaaaataaaatatatatattttaaatctagatagactaaactgctttaatttttatggtaaagggattaaatttggaatttaggatttacatttagacttccttaattcagagaacttttaaatattttataatatgatctaacattgagactatttccataattttcctaatattcattccatagaaatttggatttgaggttaggtctatagaatatagtgatactagattttaacccgcggtataccgcgggacgatttgtttttaaaagtaatatatattaaaacttgcaaattttatttttataaaatatttatattttacagtttataattgttattaagtaacgctataccacgaattcatgagacaattgttaaacaactgaagttttgacccctattaaaacagcatattaataatattttaaaattttataaatattgattcaaatacatccaccatataacccaattccaaaataaaacacgttctgtaatttttttacccggcccatgatttttttttaaagtagtaatttttaaaattttagaattattttttatatataaaagttttgcaaattgtatcattctctaatacatttatattttatagtttaaattaaattaattaaaatttagatatcaaatcttataagttgattttgattggctattatttttggaaattaataatgtatttcgttttttaattaatttaattaattaaattagtatttgactttttaatccttaaagagataaattaatttactttttaaaatattatttctaatggcatacctatgtaattacttacaaaaattaaggttacatttaaaatgtacttcccaaataatatagtaggatttcttggttgtgatctctctagctcattagatgtcgtttttttgcgacaataagaaattttaacttatcattggaaagtaaacatctctatatcttcggaagttgtcgaaatgatttgttatggatgatggatcaatactaatcttctttaagactgtatcgttccaaataaaatgagttgactataaatgtctttcctagggacatctcattcaatgtttgtcttagctctctcaatcgacaagactgtagaaagtaaatttcaactatcgtttactagttccgcacatgtaattttcaagttaataggcaagagtcaactttgcatcatttactatacaatctttgttgacacatataacgctttgtctctaattaatccgttcttctaaaccaatattgtaatcgatttttgagctaaaccggaatgtaatcttgaaccaagtcataagaaacaaaataaattgggttctcgagataagataataagggaaattttctcgatatcattcacaggtacgagggggtggtcggtgaaaaggcgtttctactgttggaaaaaaacaaaaataaaaatgtaagagcgttatgtcggtggcaaattttgattgaaactaattttccttctccacgttcacattatcctattttcattcacattatcatatttttcatacttcatagcgattagaaaagaacaattgttacctaaatagctatatgcgacaaaggacatggatgtgtatatatagtaataactagttatatgaaatatctatatactatttattgacaggccagctatagatcgatttgatggaattgtaatatggtaatagtgtgtaaactactcctatgcgacgcgtctaaattttatcattgatccaaataattcttatttcaagttgacaaaacttttaaactcattgaaccaaattttcttgaatatgttgactaataataaacaaccaaatgttctaaaaaaaaaacactgtgaatagaagaaaaatggttattgaaaatggcaaatgggatggtcattggtgatagcaaaaatgagttgtttcttagttatttatttgacccactggtgagttgacttggtgaggcctgctgctttgctgtttctctctttttttataaaacaaaaaaagtttcaatttttaatttttacaactttctggcaaagttctctgcttttgtctcccccaaacaaaaggataaagaaagttgcagaaaacaatctctctgttctttgagctttccctttgagctctcacacgagcggcttcttttgtcatctcaccttttccttcattctttcttccttcaaattctggtttttttcacagatcgttttctcagattttgactctttttggtgttgttgttgttcttctccttcgtgaagtggaagaagaatataacaaaactgggttttttatatctggaattctgaagaaattcttcacggatttgatctgtttaaactataaaagtcttgatttttataaatcagctaaaaataagacacggtttagggtttatggtttgactagaaacaacaatactgaaatg

SEQ ID NO: 14714 - DNA, 3000 bp, Unknown
  misc_feature (1)..( 3000): cDNA_ID_3018764_gDNA_ID_2684219_Annot_ID_191757 3000 nt of promoter + ATG
caagaaaatgtccaatccattttcaaacagaaatcctctgttaccagaatcaggccaagaaatgttctcaagaaacaagtcttcacctgttcatctacatgctcatctaaggatggaatatgaacttgggatgcctgttttcatattctcgctagacctcccggatgatgtatatatggccagtacaagaatggatgataaggaatctcggtttgtctattcgtttagctacattggaggtagaagcaataagaatgtttcaggtaaagaatcttcactaataggacagatgcaagtttcaactcaaatctgcttagagcaagaaccatatgaagaagatcttgtggcatcaactgtctctgaattcgttcttttcgacattgcacgcgcaaggagaagtggcttcaagcatgaaaacctgtcaagacaaaacagtttcagacgaggattgatattttcagaaacagagaactctgtatctgatctactacaagaaaagctgccaaggcagaacagtttcaatcgaggattgactcgtagtctatcaaaacattcagagaacactgcatctggtccttggcctgtctcagatttacatccaggacttgagattgcagcaattgttattcaagactcttcttcaaacagcaaactctcgagtcgtgagatgaaagtcatagttccaacaggaaaccacggtttgcctgataccgaaaactcgtgtcctacgccgatactgcaaagatggagatcaggtggaggttgtgactgtagcggatgggacatgggatgtcacctttttgtccttgaatctccagaactcatcaacaatcatcatggtttggaacttttcatagaggtaagaatttgttcattgtgataccaaaatgtgttttaacttgtctcccttaatcttgaaatataaaaattctatgttgcagagtgggaaagagatcacaccagcaatgacaatgacatgtatcagagaaggacattatgaggtaaaatttcacgcgaagctctcagcattacaagcattctcaatctgtgtagccgagctgcaaagaactgaagtctcaagaggagaaagaaacatatctttgtctagatgcagttcactcagagagcttattgaaatggaaactccgatgaatacaagagaagtccttccttctttcatgcctaatgtcacattctctccaatctcaagggtttaaaaacacatcacaaagtaatcaatctctagtccctcttatgtgcatatatagtcactatacataccatacaaataaatatcagccagaatctagctaccgggatattatatattagtgtttagaactttagcatcataaatgtttgttcttcttcctcatgactcaaagaacccgtttctttcaatattatctatctttcttgttcttggtttcattgtcatattcaacgcaactgagtttgagttactcggtttagtttgtaatgactgtgcttcttgtaaatgcagttacaaaattaagtagacaaaaaaaaaaaaaaaaaaaagtagatgaccaaaggaaacatagttttatttatttttgtgttggaaattccaacataaaagatgttgaatcagaaaatgtgttggggtgtttctagcaacaatgaggatttccgggtacgcattgacaagtatgatagacacagttgtggattggacctttgcaaaacttggcacaatctgcattggtattgcatgttataggcttcaatatatcgtttgtgctttcttgtatccttgcactcatcaccacacctatatacatatacatgtacaccaaactcattattttcacaacattaattagaaatgaatctacaaatatatgaggaagagatgactaaccagaggtaaagagaagagctaagaagaagatggtgaatgtgaaggagcttttcatgtttctttctactaaaagtctaaaccgtgtgtttgagaagagacaaagacttgtgaaattttgtgtgattttttatcccattgaatatatacaaatattttagggagatagtttgattagaaggaaattaacgttagctattttagtacctaagcgttttgaatttgactaaacaaatatatttttctatatagtctctgtttgtttgaaaagaaacaatgacttgtaagattttgtgtgatgtgttattccattgatatgcaaatattttagggagataatttgattaaaaagaaatttactttagctattttggtaactaagccaatttaatttgactaaacaatatggtttatgaaaaaaatcagtttttctatataaaatattttaaattttcaaaacatggccaaaatttcaaaaaatcattgtattatccatttttcttcctagcactttttttcttatcaacttgtgcctaattcatgaaattatccatttagttaaacttgacagagatttcatgaatttaaaataaaataatttaatcatagagaaagtgattagagagccttccggcttgaaaacaacgccacaagaataggaagaaaaaaacagaatgaaaaaaacaatcttccgaggaagcgttaaagagacgcaggcaaagtcaaagtcaaatctctcgtttgtttataaaatgaaacctcaaagtgctcttttccttcatcagaagatcaccatttcttttgcctcagtaagctcctctttcactatctccgtcgttgctccgcttcctactggttcaaaggttcgatttgtgattcttgaaacatttctaatactgatctctgtctttgttttgcttgatttgggttagatcatattttccttctgcaattagggctcttgagttgcttcttttgcacgctttctcatactgtttccttatcttctactttgattctctgttttcgtttgtaagtatcgattcaacagctttgtatcgattctctgtttttcttttttcttctttgttaacagtttgaaagacaaaagaagaatg

SEQ ID NO: 14715 - DNA, 3000 bp, Unknown
  misc_feature (1)..( 3000): cDNA_ID_3018719_gDNA_ID_2684219_Annot_ID_191770 3000 nt of promoter + ATG
accttatctctgaatggttcgggaatacggtaattatggctatgcatttctttccctggccaagaacttatacctaaaagtttccaagattaaaacacagtcacacttctcatttattagtcttgactttcatgaaattccaataccaaattcctctcttttttttcaaaatttttttaactcaatctttttaaccaaaatattaaattttatcatttgaaattattaataatatgcaacgaaaatgttttttttttattgtttaatattcaacaaccttttggtaaataagataatttgacaattcaaatttcttttaatgtatacgaattttcaatttgaatcaaaaagaaatatctactaaaaacacaacaaaaaatatcaatatctcacaacatttttgagaattaattaaaaatactttttttaacataaatataaatattttaataatataaaaaatgtactactatatattaccaggaatttgagcgagacgaggttcaacataatgtccattacaaacaacaacagcatcataaatctcatcacgacgaactttcttctctttctccgtcgattcaatcctccacttcccgattccttcctccgccgccggagaaaccttcacaacctccgtctcaaacctaaccatctcctcaatcccaaactccttagcgaaatctttcaaatacgccaaaacttcgccatgactcggaaacctcctccgatctctagacacaccggaacgaaccacgaacgggaaatctctgtatccggtacactctcgtgtaccgttgattcgtagagatctatagacgcttgaatgaacaacggatcgggtcgggtcaacacttaacggatccgattcgacttcatcggtgtaaatccaggttcctcccacttgtttttgtttctcgaaaacgaccactgagtgaccttctcgtcgaagctctcgtgccgctactagtccggcgggtccagcaccgataaccgccacgtggtgtgatctggttggtgataatgcaggtgccatttgtgtgttctttgattagaatctatgaatcacaatcacacacacttgttacaatttatgattacaatgtttttaataatcaatttggtgtgttagaaacttacacgaatctgttattacagacgtagattgccacgttttggttgatagagagaaatgcttttattatataacttgtgtcattgtatttcttctccaccgagacagtgaaacatcaatcaatatgagcaatcatcaaactgtgagatttcttttctctcattttgcccttccactttcttgatgattgtttgttttttttgtggacagaagcaggtattgaagcaattggagccatggtgtgaacttaaagataaagtggttcttgtgacaggtgcttcctctggtatagggagagagatctgtcttgatctatgcaaagctggttgtaagattgtagcagcagctcgtcgtgttgatcgtctcaactctctctgttctgaaatcaacagctttggtgctatcggagtccaagccgtagcacttgagctagacgtttcatcagaagcagacactattcgaaaagcggttaaagaagcttgggaaacctttggaaagatcgatgttttgatcaataatgccggaatcagaggcaatgtcaagtcgagtttggatttgtcagaagaagaatgggacaaagtctttagaaccaacttaaccggatcttggttaatatccaaatacgtctgccttttgatgcgtgacgctgagcgcgggggctcggtgattaacgtctcgtcgatctctgggcttcatcgcggtttgttgcgcggtggactagcgtatgcttgttccaaaggtggtgttgacaccatgacgaggatgatggctattgagttagctgtttataagatcagagtgaactcgatcgcaccggggattttcaggtcagagatcacacaaggtcttttccagaaagagtggctcaagaaggttacggaaaaggttgtaccattaaagatgcaacagactgtggatccggggcttacatctcttgttcgctatctcattcacgattcttctcaatatgtcaccgggaatacatacattgtcgattccggaactacactgcccggtgtgcccattttttcttctctttctccgtagattcaattctccatttcccgcttccttcttccgccgccggagcaaccttcacaaccgccgtatcaaaccgaatcatctcctcgatcgcaaactccttagcgaaatcttgtaaatacgccaaaacttcaccatgactcggaaacctcctcggatctctagattccgatacaccggaacgaaccacgaacgggaagtccctgtatcccatacactcacgggggagattagttcggagagagccataaacgctcgaatgaacaacggatcgggtcgggtcaacgcttaatggatcgggttcgatatgatcggtgtatatccaggttcctccgacttgtttttgtctctcgaagacgaccaccgagtgaccttcccgtcgaagctctcgcgccgctactaatccggcggctccggcgccgataactgccacgtggtgtgatctgattggtgataaggaaggcgccattggtttttttaacgagattcgttaacgatggtgaatatactacggcctttttataaatatgtggcccaaaaactcatgatccacacacaccacgacacaatgttaaaaaaacaaaaacaaattcctgagaaattatctaaacgctgcgttttatctagagggtaagtggaagtcccaaaacagttttatggcccgcttcaaaattcaatcgttagtaaaccggtttggtaatcagttctaaaccagaatcccaccggtttgcatatctctctctccgtgtagggtttgcgatttgcagagaggagtgagagtaagagtgagattgagaatcagctgaagccaaaacgagaagatg

SEQ ID NO: 14716 - DNA, 3000 bp, Unknown
  misc_feature (1)..( 3000): cDNA_ID_3018727_gDNA_ID_2684219_Annot_ID_191768 3000 nt of promoter + ATG
attgtttctctcgttttgaagaagagttttttcttcttttgcttttattcgtatcatattttctaaagaattaaacctgaaatcatttttattttgtgtttccattcatatactataattttaaaaatattctcagttcgtttttaattattagatatttgaggtttttctttgattttgtagaactttttatgcaaagttcaaatctattttgatattttatcaccaattgtatttttaatatctgttcttattggttgagtatttttttagttaagtcataaagaaaattttcctaggaatatatagataacgtttttaaaagttttgttacgaaatttttctaaaaatgaaaatagtgtctcgcatatgaagcttgatgaaggtttaaaccaatattctcgattgtgaatttcagaacacaagattattcaacataatagcaactgctagactagtctagtaacaagtacttgagtatcaaacttgttgttactagacgaattgtcattgccaccagtgccaaactacgtacgtatgctgttgaaacttcattcagagacaagaatgtttgagccgactcaggatcttcaacatcattttatctaaaacgaagattacatttttttaatgtttattaatggaatcgattcatgcccacaaatataatttctaatcgataattaatctttagaatgactcacgcagtcaagtacgtacacattttaataaactgagttatccttgattttttttgaaattaaagattatagagattttgtaattagtgggttacacgtttcatttcaggccacaaactaaacccgttttaaagttttaggaccaccattatacatacatacggttaaagaaaatttagcgcactcataattctataacatttttttcatcttatcattatgtacaaacgtttgttatcttacttaagtataaaataaataagatcatgcacgaccatataattaattagagagtaaaatattagaaaaaggtcacacatatttacacttattcagtttgggaccctaatgtttgacatcattgcaaattgaaacattaaaaaccttataagaaaaccgagacacaaagtttatgcatgttttgtctcttccgacctcatcattcataaataatgatgtaaatagttctatcaactttgtttcgattagaaaattatacaattgctacatcgtaccattttttgtggttcataatgaatatcaactgttcatttggctatttttttatttatgaaataaatgatgagttgcatcgcatcgcatcgaacaagttaaaacaataatataaagaagagtacagtcagctaaataatgaaacaagtgataaatgaaaaaataatattgactttagagttttgagattacgtcttttaactatttgtcggagattaattcaaaggtgattggatgatccaaatgaatccataatgcaaatatggtttccgttccataggccttcgggggattgaagtttgagttttgaaacttcacatcccatgacttggttcatatcatacaacaacagagagtgtgttaaatgatatttgcaagcatcttaggatcaagcctcaaatttccaataaactcaacaatctgctctcttgaaagtgataatgggccttatacaagagatttcgttatattttatgggatctcatctctacttaatggaccttgtatttccagtaacccaacgatttttggttatggtgactaaacttgcacaaatatcaaaaattatatattaaaatctatagtgattcgacaaattacatgcataggactataggagtgttggttagtaatttttaatattgagattaaattggtgagttttgaaatttttatatatacataacaaaatgaaaaaagtatataaatttctttgtcaaaaccccctataatgtactttatttgaaatgaatggtgttaacagcctctcttttttattccctacgaaaagcctcagcgccggtgttcttcttctatgcaccaaacaaagatcagctatctcaactcgtttttttgtgaaatggctagacaagaaaaaatctgcttaacttacactcgtaaaacatgaatttgagtgttttgggaaaaaagctgttctccaacacaatgtgtttaaattgtgtagttactaaccatcaagttaccattttcgtaatataaattcaaattttatcacacgaattaaaaacaagtcactctttccttcttcgtgaatgcgcaaggcaagaccacaagaacaacttataaagattgcttcatattcttcttttagtagtcggtaattagtataagaaattcaatagttgaatacctttcttgagccctcatgagaatgttatagagcaagtatatgatctcactaccgaagatgacaacgggccagcagaaaggtaatgaaggcttcctcctatttgcttgatttgctcgatttgctcatctattttgatataagtttaaaatttgaacaattttatttgatgaagcatagtggattaaaaaaccatagtgagatacttgaaagacaaaaaaacacttccatcgaaatcccttttaacttttatccacatatggccacgctttaaatagtagtactatatgattatcatatgttgaacagaaaaaaattattctatacgtataatctatgtaaataacgtaattgaaacgatcgagtgataaagttgactagtttaaatttccgaattccaaagtatatactagtagcaaaacaagtccactatcatcaatgtcgtgtgactcgtgtcctcatcattctctcaaacccacgaggcattttcttttctacttttttcctcaacctttttaagttcaaaaaaaaaaaaatagaaagagaaaccccccccaacttgttttcgagatatcaacaaaaatgtcaaagacaaaaaaattcccttaataatccaagaaagaaaaaatcataacgatg

SEQ ID NO: 14717 - DNA, 3000 bp, Unknown
  misc_feature (1)..( 3000): cDNA_ID_3018731_gDNA_ID_2684219_Annot_ID_191767 3000 nt of promoter + ATG
atttgcatacccggtttagatctaaacccgaatactgtacatataagctcaaaccttaatttgagataactgctgacttccaaattctgcaacattaaattattaaatccattggaaaaagggtactaatcctttggttagaaagtatgattgaacaagtgccccgtatttaaatttgatgtcatcacaaagttgtgtattcatgatggttcttatcaatttcccttagcatctactcaatgtttgcttgtaagcattgggcgtgacgacaagggaaccttcatgtccaaactgtaacagaagtgtatgtatatatttaattagaaaatattcttagtaatacgtttttatatcttgattataaaaattaaaaaaacagtagaaagtatataccatacgaattttaagtgcataagcagtcaaaacataaacataaatgatacaagagatctaatcatctaatgggatgtcgacaagtcttagaaacaaatatgtgtgtacgtttatataacgaaataaatataacacgaaaataacttagaaacaaacaaattgggacacgcatgggtaatttgtccccttctcttgtttgttgttcaattaatgaagttacgatctcttgaggccaattatataatttatataaagacttattaaaaaaaataagaaacgtagaatgtactagaaataaacgaggggttagttggattcatctaaaaatgtttatgtagattttgtaccaaacattaaaaatatatgttgtgtaactttgttgacaattaaaagaaattatttaattgatagagttgttgagcgttgtatcttttaaaccatttgattttccctactttattgtgttaatttgcataatgtttttttctaatattctgacattatgtttgatttatttccatgaaacaacaattgtttctagagaaagcttaatggagattttagcttttttttgttttttcttcatttagtcccacaacatcatagtcatgatttttcgaacttgtgaattgtgatagttaatgattctaacttccaagtggtaacaataaacctaaaatacggagagtattcgtcacgcgctccaagcataagctcgcatgattggtggcgtaactttcatgggacattttgtctctcacactaaaaataataattcttgtagcatactatatttaaatagcttattattataattgacaaatacgtattatttgaagtttgtttatagccttcacgatactattttattacaatgaaattgaatttactaacaaaatataattattttatatattagtattgcatgttaatatgttgaccgttgattaaaatacaatttaatgatcatagctgtgatctacagtagtacggtatgttgtaacaacagcttagcaaggctctagatcaccgtagtggactagtagacactagacaccgtgaccgtaccacgaaaaataaattctctttataaattaaacgcactattatttcaatgattagcaacaatattatactcttaattaggaatcttccaacgaaatttattcatttctaccattattctaatgagatgttctcttccattttacgttcgaataatagtctgtcctattattaattttttgaatatctaaaaattcactactaaaaaatttacctctttcaaaaactagatccacattaaattagtgaagaaaaatctacggcacactatttccatcagtaaaaataaggaaagtttttcaaaaaaaaatatattaatattttaatcaaaacaaatatattaattattatttaatagttgaactaataatatgatgacatctgtacaaatttgataagaatagtttctcaaagtttctcctccgaaaaatttaactctccttctctcctactttttctcacctctctcatattttttttttttgctcttactacacaaataccacattagtatctataattaataaagttaataaaaatcaggttctaaaataattttactcttacataataacgatgatattggaacattacacttgatgcacaattttttttgtataaaatttacattttattttaaaagtaaaatagcgataatatatatttgaataacaatacaacgattatcttttcaacagatcatttttttaacactaacaaatcattttttaatttactgtatattacaattaaaatctcatgcaaaaatacagttgtacatatgcccctagattcctgatatagaaagatttggatatttccttattattaatttggtgttaagctttgccacatgattgatgtatatatattattaatatagataaatatatttctcacttatataaatgaatagaaaatcgatctaaaaactaaacaaacattcatgtaaaaaaaacatccataattcagaatatttaaaaacaactcagagtcacataaagttgcccaaagtaaaagaaataaaaagataaagaggatgagaacattcttcctttctgtgatattttttatttaaattgtatattttcatagctatttttattctataaaaaaattaaagctcatttttcccctccaacaaggaaaaacaaaaacctgtctttgaatccaagtctctctctctctctctttctcgccacacttcatcatctctgctactttttttttgttctcgtctcagtgagttttctttgataggtttattgctaaatcaatcaaataatcttgtccagtttcacttctcttttaccatttccttgttccattcttcagcttctctctctctcgctctttactttactaaacttggtctcttcttgagcttatacatctcatttctgcagagagtacttgtcaaagaaagttgtcgtctttctccagattcttcttgagcttatactgttgatcatccgtgaaagaatctaggttccgcttcttttttaatgagccgaatttgaaggaatctttcaacagacgatg

SEQ ID NO: 14718 - DNA, 3000 bp, Unknown
  misc_feature (1)..( 3000): cDNA_ID_3018735_gDNA_ID_2684219_Annot_ID_191766 3000 nt of promoter + ATG
gagcatcaaaacctaaatggcttctagctcttgagatagtcacagggtcaatggttggtttgctccttctggttgcacttttctctgcagttcaccgctggaacaatagatcaactctcatcattccttggaagaaatcttcaagtgaaaaggaaaagttcacagtctacgtaggttagaatctttcctaattctttaccttccaatgtagaatccatggagcaaagaactaaaaaaacgtggcatgtttttattttaactacagattctgaaatgctgaaggatgtttcgagattaacaagacaagagctcgaagtggcgtgtgaagactttagcaacatcattggtttatcagcagatagtcagatctataaaggaacgctgaaaggtgggtctgagattgcggtgatctctctttgtgtaaaggaagaagattggactggatatcttgagctctatttccagagagaggtagcttcctctcatgttatcatcatcaccaagccacttggattgaacaatctttaaacatatcctccttttttctgagattttaaatccatctcctcactgtttcaggttgcagatttggctagattaaaccacgagaacacagcgaaattacttggatattgcaaagagatctcaccatttacaagaatgcttgtttttgagtatgcatcaaacggaacactatatgagcaccttcactgtaaatagtctaacttacctcagagctttgttgcatcatcctgtattgttttagctagataacatttttatgtgaaatattttgatgcagacggggaagcggcgttagtatcgtgggcaagacggatgaagattgttataggcatcgcacgtggtctcaagtaccttcatatggaacttgatcctccgtttacaatctctgagctgagctcaaacgcaatttatctcacagaagattttactcccaaggtaaagtaaagtgagacctgcttgttatctgagtaatacaattagctaagctaagctttatgttcacattctttcttttttctgactttctctgatgcagctggttgatttcgaatgctggaagacaattcttgcaagatcagaaaagaatttgagaaatattagtagccagggttcgatatgtgtactcccaaacggaatggagagccgatatcttgatgtgtcgggtaatatctatgcattcgggattcttttgctggaaattgtcagtggaagacctccttattgcaaagacaaaggattcttaattgaatgggtaagacaaaaacaactcagtttctctaaacacttgaaactgagttacttcctcctcctcttttttcaccatttatatcaaaaactttgttactgttagcctagtaggaatggagtcgtctgttcagggagagacgagttttcgtctggatgtggaagtcttgaccttgttcacatgtttagttatatcgcacctcaaatgtggtttttgtggcaaaagttttgaatttgaaacgtatctattgcattttgcaggcaaaggagttccttgaagcaccagaggcaatgtcgggattggtggatccagagctgaaacattttaaccaagaagatcttgagacggtatgcgaagtggctagccaatgcttgaaccgggacccaaccaacaacaacaacaatcacaacaagccctcagtgcaagagctatgcgagacattggagagcagaatcagtctgtctatttcagcggagcttagatcatcttctttggcttgggccgagctggcgcttgactcgtgatgagaatgatgaaaggaaagaaaacgagtgttgaatgatgcaatgctaactaactaaaaaccaaactctcaactctgtaaatcaatcgactgattacaacatttgatattgtttttttttgctctgatcttgacgagtgtgtctgtgttcttgattagttttgagttttgggtggttcaaagtgtttgtaaatgaagagatgaacatagtttctgaaagattttctctattatttgaaaatctatgagaggttgaagaatgttaatgtagtgtgtttggatctaacctttaatcttatattatatagagcattgtatctattgtttgacatgattagtctcattggaaaaagcttcaaggcaatcaatttgagatcaatatcagtctcagacaagtgtttgcggaccaagaagaagaagaaacgtagttgaagttcataaatcataatgcatggatcaacttaataaaaggcccacatttagcctcgtatcagtctaaatgggccacacaagtcaataggcccatttatcaatgctttgactgttttcaatcttcaattttggtatgacttcttcttacgaggttgagtgccataaaagattagacagacacgtaaaatagattccattttacctttagttaaaacagatatggattagccaagtttcgttagtatattgtcatattattttattgaaacagaaaaaaacaagtaaagattacttaatcattcttaatcaggcctgttcttaattatcaaaaaaaaaaaaagattacttcatcatgtcgtaataatatcactaatcaatccttttttttttgtcatcactaatcaatccatttttttagcgaaccttaaagtcaaaggtgttgttactttggacgattaaatttgaattatataatttaaaagaaaattggaatttaatctgttgaggttgaaattctctctttttatatatggcggttgaaatttaaaagtaaagtattgtttggtagggccctatagtttaaacatttacaaatcggcccacacatttttgtcattttagatgtcgtaaaccgctttccctcgtcttcgttccaatttaaaaagcaaaacaatttcaaaaagtctcatcatttcccataaacctaaaagctttttaaaaactcaaattcgatacgagaagaacaagattcgcgcacaagacgatcgattacatg

SEQ ID NO: 14719 - DNA, 3000 bp, Unknown
  misc_feature (1)..( 3000): cDNA_ID_3018739_gDNA_ID_2684219_Annot_ID_191763 3000 nt of promoter + ATG
ccgactttgattactgggtaattttaaaaccgccattgttgttctctttactacttttgggaattagggtttatgatttctgggtattagattagataaatttgtttcctttttttgttaatcaatttaaaaatctcttatttctgttaaagacttgtaattttggagtttttaatgcatggacggaagagaagcaatggcatttccaggctcgcattctcagtactatcttcaaagaggagcctttactaatctcgcaccttcccaagtcgcgagtgggcttcacgcgccgccgccacatacgggattgaggccaatgtctaaccctaacattcatcaccctcaggctaacaatccaggacctcctttctcggattttggacacaccattcacatgggagtggtctcctctgcttctgatgctgatgtgcaaccgccaccgccaccgccaccaccagaggaaccgatggttaagaggaaacgtggacggccaagaaagtatggagaaccgatggttagtaataagtctagggactcttctccaatgtctgatcctaatgaacctaaacgggccagaggtcgacctcctggaactggaaggaagcaacgcttggctaatcttggtgagatctcgagttttctattctgtgtactttgtcaagttaagtttttgctttagctctgttagctagtcttgaaggacatgagcttgaatcttatggatgctagaagctttgaatgattctatagttaagttaggttttgttactttgtcgttactgatactcaatattgattgttggctattagtttgacggatctatgtgtggtacaatgctaggtgagaggagtaattggttattagtagatgtggacgaaatcgacttcttgatttaagttattgatttaggtttttaagctgtgaaagagtaatcttactaatccattcatgtttaagtaattggtcatcataatgtgattaatcaaactttaagtaatagcaaactcttgactctgataatttctttaggtgagtggatgaatacttcagctggacttgcttttgcacctcatgtgatcagcattggagcaggagaagtaaactgaccaaaactcctttatatattaatgatcatttatgcagcttttcattgtatcaatttccttttatttttctttgcaggacattgctgcgaaagttttgtcattttcacaacaaagacctcgggctctttgtataatgtcaggcactggaaccatttcttcagtcactctgtgcaaacccggttcaaccgatcgtcacttaacatacgaggtttcaaagtcgttcattcagttaatcgaaaaagaaaaacctgaaaagatttcttatttaatcctctttctgtgtttcttagggaccttttgagattataagttttggtggatcttatttggtgaatgaagaaggtggatccagaagtcgaacaggcggattgagtgtctctctttctcgtcccgatggtagtattattgccggtggagttgacatgcttatcgcagccaaccttgttcaggtatattaaattcttcttcttaatggttgtaaagtgaagctaaaacgaggcgaaactaactacgaatgttagcctttgatatgtttgtgctgtcactttctttcctcttcaagatatcatgtggtagtgtttgaaaaacttgtttgttattcaggtggtggcatgtagttttgtatacggagcaagggcaaagactcataataacaataacaagaccatcagacaagaaaaggaaccaaatgaagaggacaacaatagtgaaatggagaccacaccgggtagtgcagctgaaccagcagcatctgcgggtcagcagacgccacagaacttctcttctcagggaataagggggtggcccggttcaggctcaggctctggcagatcacttgacatttgcagaaacccactcactgattttgatttgactcgtggatgatatacactattagtctttgaagcagcagcatacaaaatgtgattgctgtacatatgttattgtagatttctctctgggaatgttgaaatcagacatttaaggattgatactagatctctcagctccttctaacattgttaatgtaacagaaccctcccactttcatgctattttaggagatttttttaactcttttatgatctcattgtggtcatcaagaacttggtttctttactagttcactatttttctttcaggttctttaacatatttagtaaacttgattcctcttatttggtagacaatgtgtaattcaacacacacaagatttaggatccttaatttataggaagatgacaagctcataatttatacatgaaaagcattaaatattaatgaatatatatcctcaaattgacttaaatttctttttcagtcagaaatctaatgagacattagattttgttataaaccattgaagaaagtctatatcctttttaataaaaaaaattcttaaacaacccaatttattttttttgtaaaccaattgaatatttttttttgacaaaattaattaaagaaatagtatataaatagaaacaatggtcttcacttcctttctcttctttttttttctttccttttttttttctgagatttgctttctctaccagagagactgtaacagtagtagtagctacttttgcttgttgtcttcatttcaaatctgcaattttactttctttttgagttctaagtgaactcaacatttagcttctttttcttttctaggtttcataaaaacagtttggatcttaagctcacagctgaaaataacccgactttgattactgggtatataaaagccgccattgttgttcttttcactctttgggttattagggtttacgatttctgggtggtagataaatttgttcttcaaaaaagtttccttttttaaaaaatctcttagattcttaaagaattgtaatttagggttttaaatgc

SEQ ID NO: 14720 - DNA, 3000 bp, Unknown
  misc_feature (1)..( 3000): cDNA_ID_3018743_gDNA_ID_2684219_Annot_ID_191762 3000 nt of promoter + ATG
ggagatattagcttagatcttagatttaaagcttgtttcattctttgatgttttattcaagtttaacacatttaccattgaaatttgtattcttattcaattatagatttatagtatgtatttgttgatatctctcactttttaaactcaacaaactctaccaaaatcaaactaccagcagctattagaattttgaactattgttggaccaccaatgtgtgaagagaatcatatctcttaatccccacaaattcatgagaaggaaaataaaaaagcaacagttgagatcactttccttacaagaatcagaaagagacccacttttgatgacatcatgtttcagagacccacaatcatatctctctatatatgtatgtatcataatgtgtgtatatgtgttgtgaagtaataagtaagggactttcatagaaacagagccttattgtaccttttgagacaccatcctcaagctgaaagcttccttcaacactcttcttccatttttgaaaatctatctagtacatttattgtgaatttcacactgtccatatcttgtttatttattaaagttattaatgttacatgtagatgaaatggactgatttgtgtatgtttatagctatttatgtaagaagaacaagtaaaatattgtataagttcagtaatggtcggcctcaaatttttcctatcatgaaatttctaagtaaaaaaagacaagtcacattactttaggtaaaaagttggcaaaacaaaaagtgaaagaaggaaagtcaaaactctttattttattgtcaaaagtcaaatgtgtgcaaatgtaatattgttgacattaaacaaaacaaattaatgtaaagattattcataatggagtagcaaaacaaatctaattaaacccaaaatatataatatatgatatatctctagaaaacttttatttatatctagcaccaaattttgactatttggattttttggtcgggtactttagccaccggatattaaatgcatcatacaaactttcaaattaggtggaaacaaaatatatgtacgtatatatatatatatatatattaataaatcactttcaaaacttttaaaagaaaataaaaaaaaagaattttagataaaaagtaaaagagaaaaaggggaatataaaaatggaaaacaaataaagttaggagagagggctcactgtccgaagcaaagaaagaaatagcaaagtgagttagacatgtgagagagaagagattcaagtgtgtccccattctctttcctatcctttagtcaacaacacatctctctcatatttggatatttctaatcaagatcaaactttttacaacaagatttgattttttttgttcttttaaaatcttaatttgaattaagatgatatgaagtcatttcatactagtcttgcctcttgtcaaagtgtaactgaatgaaatttcaagattatatatttataagaaaacctaaaatttttagatatattttgaaataatcttataattatctatactaattaaaaataaattataaatatattatagagcagttgaccaaaaaaaattacagataactattgaagatatatagacatgattagttgaggtgtagaaagtttgtaaagccactaaaatagctccaaaattgaaataatcatgttgtagttttttcttttttctagcaagaataatatatttttgattattttaaaaggtttgtacatttttctctttttattttcactttatttttttagtttctttagaaacattattatacttttcatatatatatattgaatttatcttcaaattttgcatacatattttacccactaaacatgattccatataaaaacggaaaaagtgtgtcacagaagaaataatatattacatgatataataatctaaaatgtcaactgttttctttagaatatgttagaaaagattttttttttaaatctttattggtagcaatgtttatgagaataaagcacataattgtctctcaatgactaataaatttcggtttcagtcaaagatctaacgagatattagatttgtaataatcatcaaagaaagtctatcctttttattaaaaacaaatattcttaaacaaactaatactttaaataaactattcttaaacaaactaatacattaaatattcttaaacaaactaatacattaaatattcttaaacaaatattcttaaacaaactatgcttaaatctttcataataatctttctctcaattgaatttatctttcacaaaattaaataacaaatcaattaaagagatatataaatacgaaaaacaatggtcgtcactctcgttcagcttctttagttttcttctaactttcagagaaagacctctctcaattcaaaagttcacaatattaaaagtataaatcagaatcattaaactgttagtctctctctctctctctctctctctctctctctctctctctctctctctctctctctctctctctctctctttttctcttcttctccctgaattgtctcatctgtcttcttcctttgtctctcctctgatatacattgtgttctccttctcagaaaccctagatttctctcaatcaaatctagcttttctcttagggggagatttgatttttttctctgcaagactgtaacagtaggagaagctactttcctctgttttcttaatttcaaatctgcaatcgtactttttcgagttctataagtgaactcagattttagctttttttttttagggttcataagaacaaattggattttgagctcacagtataaataacccgactttgattactgggtaattttaaaaccgccattgttgttctctttactacttttgggaattagggtttatgatttctgggtattagattagataaatttgtttcctttttttgttaatcaatttaaaaatctcttatttctgttaaagacttgtaattttggagtttttaatgc

SEQ ID NO: 14721 - DNA, 3000 bp, Unknown
  misc_feature (1)..( 3000): cDNA_ID_3018747_gDNA_ID_2684219_Annot_ID_191761 3000 nt of promoter + ATG
tgtcttatttttagctgatttataaaaatcaagacttttatagtttaaacagatcaaatccgtgaagaatttcttcagaattccagatataaaaaacccagttttgttatattcttcttccacttcacgaaggagaagaacaacaacaacaccaaaaagagtcaaaatctgagaaaacgatctgtgaaaaaaaccagaatttgaaggaagaaagaatgaaggaaaaggtgagatgacaaaagaagccgctcgtgtgagagctcaaagggaaagctcaaagaacagagagattgttttctgcaactttctttatccttttgtttgggggagacaaaagcagagaactttgccagaaagttgtaaaaattaaaaattgaaactttttttgttttataaaaaaagagagaaacagcaaagcagcaggcctcaccaagtcaactcaccagtgggtcaaataaataactaagaaacaactcatttttgctatcaccaatgaccatcccatttgccattttcaataaccatttttcttctattcacagtgttttttttttagaacatttggttgtttattattagtcaacatattcaagaaaatttggttcaatgagtttaaaagttttgtcaacttgaaataagaattatttggatcaatgataaaatttagacgcgtcgcataggagtagtttacacactattaccatattacaattccatcaaatcgatctatagctggcctgtcaataaatagtatatagatatttcatataactagttattactatatatacacatccatgtcctttgtcgcatatagctatttaggtaacaattgttcttttctaatcgctatgaagtatgaaaaatatgataatgtgaatgaaaataggataatgtgaacgtggagaaggaaaattagtttcaatcaaaatttgccaccgacataacgctcttacatttttatttttgtttttttccaacagtagaaacgccttttcaccgaccaccccctcgtacctgtgaatgatatcgagaaaatttcccttattatcttatctcgagaacccaatttattttgtttcttatgacttggttcaagattacattccggtttagctcaaaaatcgattacaatattggtttagaagaacggattaattagagacaaagcgttatatgtgtcaacaaagattgtatagtaaatgatgcaaagttgactcttgcctattaacttgaaaattacatgtgcggaactagtaaacgatagttgaaatttactttctacagtcttgtcgattgagagagctaagacaaacattgaatgagatgtccctaggaaagacatttatagtcaactcattttatttggaacgatacagtcttaaagaagattagtattgatccatcatccataacaaatcatttcgacaacttccgaagatatagagatgtttactttccaatgataagttaaaatttcttattgtcgcaaaaaaacgacatctaatgagctagagagatcacaaccaagaaatcctactatattatttgggaagtacattttaaatgtaaccttaatttttgtaagtaattacataggtatgccattagaaataatattttaaaaagtaaattaatttatctctttaaggattaaaaagtcaaatactaatttaattaattaaattaattaaaaaacgaaatacattattaatttccaaaaataatagccaatcaaaatcaacttataagatttgatatctaaattttaattaatttaatttaaactataaaatataaatgtattagagaatgatacaatttgcaaaacttttatatataaaaaataattctaaaattttaaaaattactactttaaaaaaaaatcatgggccgggtaaaaaaattacagaacgtgttttattttggaattgggttatatggtggatgtatttgaatcaatatttataaaattttaaaatattattaatatgctgttttaataggggtcaaaacttcagttgtttaacaattgtctcatgaattcgtggtatagcgttacttaataacaattataaactgtaaaatataaatattttataaaaataaaatttgcaagttttaatatatattacttttaaaaacaaatcgtcccgcggtataccgcgggttaaaatctagtatcactatattctatagacctaacctcaaatccaaatttctatggaatgaatattaggaaaattatggaaatagtctcaatgttagatcatattataaaatatttaaaagttctctgaattaaggaagtctaaatgtaaatcctaaattccaaatttaatccctttaccataaaaattaaagcagtttagtctatctagatttaaaatatatatattttattttaaaaaatcctaattacaaattgtccctataatattagcttattagtgagtccattgggcaggtttattatgggccttagccttaccaatcaaaaagccttagaaatcaaagcccaaaacggttaaatagaaaactacacgtagtacctcttcgatcataacaaacgtcatgcagtgtatattcataaaaacggcacaaagtcctttctcattagacacgaacggaaaatctctacttgtctccgtcccgtaatttccgttactaaccaaacccaattttggaaattcagtaacagagcctttataaaagaattaaaatctttattgttttttccaaatcttcacaaacaaaattcgtcaaaacaaaacattcttgacacttcctcttctccgtttaactagtttcacgagctctgttctgtttcttctctttcagaatttcaaggtaaatttactaaaaaccctagaattgcaatttcactcactgttcttgaattataatttctaggttttttttatcttggcatgtataaaaattgaatctttattctcgtaggatgttatgattgtgcggttttagttgatgtgtttggta

SEQ ID NO: 14722 - DNA, 3000 bp, Unknown
  misc_feature (1)..( 3000): cDNA_ID_3018778_gDNA_ID_2684219_Annot_ID_191752 3000 nt of promoter + ATG
atccatatcctttcgactttacgttctaaaatgaaaaaaaaaaaagattttctgaattgttttgaaattatatttctgaagtgttttaatttgaaattatattaggtttaaggatcttcaactaaatgaatttataattattttatttaagttttggaatatgattatggtaatacttttttgtaaataccacaattcttccaaatgatagttcgtgctgtttgtgaacaggcacgactttgaccctagaaattttcttctttgcatcaaatctttgttttcgaattaaaattggatataacaagtccatgttttgtttcatacgcttacaaagctaataatatcaagtcaactttatgattttttcatagtttcaagaacaagtaacattaaaagatgatgtttgttgttcagatttatagattcaacttgttattgatgaaatcatctgattgttcaattctgaaacaacaacacatattatatatatatcttctccctctgaattggtatatatattaggacgttacatgtttgaatgaattaaaaaataggagaagatctttccctatataaatggctaggtttctgctcagttttaatctaccttcataaacacgaaagtaccaaaaaatggcaactttcatcagattcactgctcctttgttttgcttcttcttcttattctctctcttttctcaccaaaccatgtcccaacctcaacacatggccactttctgcgacgacagattatccgacaacttcacacaaaccagctcatacaaagcaaaccgtgaaaccctactttcttctctccgtgaccgttcctcccttggaacctattccaatgccacaatcggtcttagccccgacacagtctatggcatgtttctctgccgaggagacctcaccaaaacatcatgttcggactgtgtcaaaaccgcaaccctagaaatcactaaaaataataactgcacttccagaaaaactgctctaatattctacgaggagtgtatggttcgatactccaatgtttccttcttcacgctcgtagaactagacgggccttacgtcgctaaatactctctcgccacttttcctacttctctttttagttctttccaacaaacgttatccaataaggtagagcaactaattatcctcatagcatcaaagtcttctttgtctgcttctacgccttattacgtgaaggatatatcacgtgtaaatgaattagagggctcgtatacattagacacggtggttcagtgtagtcctgatcttgatccagcaaattgcggcgtctgtttgagacttgtggtcaaaggtctctcaggctgttgtaccaatgctcgttttgctcagttctatctttctaaatgttttttgaagtatgacacaaccggtttgccaacttctcaatcaccaagcggctcatcgtctattaacgttatgaaaggtgagcataatatatgccctcgactctaatctttttttttttacaagttacgtcaaaagataatgttttaatttcttcccgccaagacaccgcagctgtttgtgtagtaatcaaactttatttgtctatgagaactataaactcgcccatgatctaaaaatccaactatcatgaagataatcgactgaggaactaaaatgtttatgtgtttggattttcttattgtaggaaacgaaatattgaggagaattttcatcacagcaatgacaacttcggtgttagcacttgtgggtctgtgattcaatccaatgataatgaagattttttaaactttgtattctgcgattgtgtgtgacgtgtgatatgttattttcttgtctaataagaactcattccgcattgtccgcggaaaaaactattaaaaatattatgatgttttaacaaaaaaaaaattatgattgtatgatgacctaaaaaatattaatcattatgtaaatatatagatcctcttttactaattagtcggatggtaaaaatccggatcactttatccttaaattgttttttatacaaaccaatttaatttattctttagtttgtaaaaaacgtacaagaaagaaagattaattaaggagatgcatgcaagacataattgatttttttttctaaatttccattgtcctcatcatatatatattcagaatctgagtatagtatattggttaattatggtgcacttgctgctcctacatcatctaaattgcagtcaacgcaagctcctgtccaagttacttatgttacttcttgttgcttaagtaacaatcctagcacttcaagcctatcattgtttcattattctcctattcgttaccatgtctctgaagcaattttttctccgtcttccaaaattctttagggtgtcaaatatattgaaattgactcatttcattcgtgatgaagttataaaccgaacaattgccaatgcccatgtacgaccgaacccgtcattagggtcttggacgcaaacattttgaacaatttcttttcaattttgacgtttgtgatcttcactctccaacttgaaagaggatatctatatatacattaccgtatcttgcttatatttttttacttatatttgttattaaggcatataacgcatgagtcttttcggaattaggtcagcttgtaaagctatataaaggccctttagagccatatcaatgatatagtgatataaagagaaaatcctttcatacaccctaaaggtttttgacacaaattgtaggactaagtttctgttttgcttaagataaacattaaactctgatctgcgtcgactttatgattttgtcttactaataacataattatcatatatgagaaaaaaatacactagttttacatattcttcctctgaattggtattaccatatccttatttagacactattttgaaaaaatcaacaaagaaaagctcttttcattccactataaattctctatctcctctgtttcgtcgaacaatacagaacaaaatg

SEQ ID NO: 14723 - DNA, 3000 bp, Unknown
  misc_feature (1)..( 3000): cDNA_ID_3018768_gDNA_ID_2684219_Annot_ID_191755 3000 nt of promoter + ATG
acatatcttctttcaagccttatgtagataaaagccatgatgaattaaggtgggaatattacaagaaagaagctaaaggtaactatctcatcatttaaatctttggtatgtatattttctcttttatatgtctctgtaattttgactaatctcatgttcaggtgggtcgtttcctgctgctcatgcctctcccataggctcaaagccaaacgctgtgttttcaccatcaacggtatcgacatcattatttgcttctccaagcgtacctgatcatcatcagaggacaaattttagtacaacgctaggaaactttactggtcctgcttttggtttcttccctgctgctgctggtggtgctacaacattttcatctaccggtttcggtcaacctaatgcgcctttccctggtttcgattcccagtttccgagcgctttttcatctttctcgacgacatatcctgccgtaagctcgagtgttcagagaccccatgaaacaggtgctgtttcttccccagcatttggatgcacagcctgtggagcaacaagtagctcctctgcttctgatcacttcacctttaatggtgccacaactcctcccgggttgttctttcctaccactagttctggtcctatgatgtttggaacaactcttgctgctcaaggcacaactccagcacttcaaacctatcctgttcaaggtttcattcttctcccattcgccgccatgagtctgcagtaatttctttactctccagcagttcaaggctatcttgtccaaggtttcattcttctcccattcaccgccatgaatctgcacttctgcagtaatttctttactttctgcatcaaactctgtcttccaaattgtaggactaagtctttgtcttgatttaagaaaaaaaaaaaaaaaaattgtgtcaaatttatgattgtctttgtaaaaatatagctgtcatggatgaaaacagttcgtgttacatgttcttcctttgaatgtactatataaaaacatcattgttttggataaatcaaccaaaaagctctcctctgttttgtatgctatgtatgatggggagtatgtggaattctgactaatgtctaatgtctttatcctctccagtttcaagcgttaatacacatcacatagtactctctagcttcctcttatgtgcatatatatagccattatacatatcatacaaatatatctcagcgagtgttaataaataactttagcataaagaagtcggttttttgagtcatatttaatggttttatctcttggttccattaattgtcatatttaatactgctgattagcttaagttgttcggtctagttgtgtagagattttgcgtcttgtgaatgcaattagaaaatcaagagacgaacaaggaaaacataattaacaaaaaaaacacacaaggaaaacataattttattttatttttgcgcggaaataattaagccactacaaaaaaaatatatatatatatatattgaatcagaagcaaaagaattttagaaactaatgtgtggggatgtttctagcaacaatgaggatttcccggcacgcaggcacaagtatgatataggcagttctggattggacctttgcaaaacttagcacaatctgcattggtattgcatgtctttggcttcaataatataccctttttgctttcttgcatccttgcactcatcaccacacctatacacaccaaacacataattatatcaaaaagtccttcaagctatgtctttggatgaggacgaacctatcacacagtcgactccaatacttgtttttgttgaagtttggtatgatataagggcatctccatcactgagataccttcttggtttctcaaaaaaaaaaaatattagtattttaataaatattagttatataattaaattttaacaataaaataatatttgacctgatatacaagtgttcttatgggtttctcaaagtttctcacttgagaaactaattctactctctctcatactttttaattatattttatttttatattgaacagtttctcaattaagaaattattgatggagatggtctaagtataaacataccttttcgctcttattgttttttttttttgggaatcaaattttcttttctattttctcattttagtgaaatttatttaaagtgaaaaatcttaacaagttaaaaaaaatatatataattgtctggtttaaattttaaattgattgagatttccattagattgcctaaaacgtccggctagcgttaaaacaacgccacaagaaaaaatcagcaaggaaaaaacaatcttagaggaagcgttagagcgacgcaggcaaattgaagaaatcgtttcctataaattgaaaccacaaagttaactcttttttcttcttcttcacactaaccctaactttgatttcatcatcagactcggaaaccgcaccattgttgttgtctccgtaagcttctccttcaatcacttggtcggtgccctgcttcctactttgataaaggttcaatttttattaaactctgacgattttgggcgattttaatacttgcaacaattgtgaattgccgatcagtatctcttgatcttctatgtctttgttttgcttgatttgggttagatcatgttttctctttgtaattagggttcttttgttgcttcttttccacgctttctacatactgtttcctctgtggattcgagaacagtgctctgttatcggttggaactatcgattcaatgatcctgcaattactcatttgtactgattactgaataaaaatcgttactttctgatgtataacccccaaatttgagtggaaattactatcttaacggatctggatttagggtttttgttacttagtttctgcaatacgaattagtttctgaaagttatcctctaatccaaaacaaatttgcgtcctttcttatttttgtgtggttaacagtttgaaagatcaaaagaagaatg

SEQ ID NO: 14724 - DNA, 3000 bp, Unknown
  misc_feature (1)..( 3000): cDNA_ID_2724724_gDNA_ID_2684220_Annot_ID_137430 3000 nt of promoter + ATG
atttaacttcattctacaacattatattattatatattttagaaaaaaattgcagtcttgtggctcttttgggactaactttaccaaatcaataaaaaaacacatgcttttgtgcatcatatagtatttttatctactgatcacaagaaacttcatagaatcatatggaccaagaatagcataagtatatacatgcatggcagtctaatttatctatatatcaacgttaaatcttttacaattgagacttaattggtacaccatttacaaagtattttgctaatgaatgtcaacggcaaatgatcatgattgacgttattaggtcgttttgggacatcaatgtccaacgacagcttagaagtgggattcataaattcaaaactgttaacataactactgtaattttcttatttgtactctcattagcttttgataatatgaccaataacgccaattctccgtggcggggacgtaacgcgtatgtttagtttggttgccgagaggttgagatgctagttatgggttttgtatgagtttcgggatgtattatctcacacaaaaagtttgtatcgtggaagtcccttgatcgaagattaacatttctaataaagtttagcggtgtagaactgcccacgcctctgtgtatacgatttaaaaggtattgaatctaaaattttgagattttattttttactttttgtttcaaactaaaatatatattagtcatattttctaattaagaatctaataaagctcagcagtctagacccgtccacgcgtctatgtatacacaatttaaaaggtattgaatccaaaaatttgagattttatattttttactttttgtttcaaactaaaatttatgtttttttttttggtaagccaagggagacaatgtctcccaagatttatgttagtcatactttctacgtgattatctaataaatctcgtttatctaaacctgtccacacgttgacaacggtttatcatcaaatctccaaacctctaaaaacattgggggttcggagttaaaaaaaaagcaagaaaaaagagagatagtgagcgtaagtgaaaacagccatggaagaggtaaaggggaaaagaaccatcagtaacacttggaaacttgttacaaggtcccaaactgacccctttgaaggaatgcctctgcatctgaaagagaagattctcatgaaattgaaggccaaaatcatatcgacgttcatcctcctttccaagtcctggtcatcgatagtccttaacaaagatttcaccaacatgtatttgataataaagttctttgaatctttgaatcgaccacgtcttcttttggcagtcgacgatcgagaaataaatatgcagttcttccactcttgctctcgagaggatccatcttctgatcatcaaacggttggctgttaccctgattcgtatccgcgtatctggtatgacttttctccacctgttcgtggcttgatctgctgtctaaacaattctactaaagtggtaattggaaatcctactacttgtcaatttgaaactttaccgagagtcagaaccaaaatataccaagaaatatttcccttctttggatacgatcatgttaaggatgaatacaaagtcttgtgcatgacgatatcggatgagtactatagtagatcaggaaatattgtgtccaaggagcataaagttttcactctaggatgtaaacagaagaaatggagaatgatcgaatgtacgattaatcattatcttactcctggaactcaaggaatatttagcaatggggttatctattacttcgctagggtcaatgatgatcagtcgctaatgtgctttgttgtggggtctgaaaagtttagtgtcgttgagttaccgaggccggccgtcgaagttctagcgaactacggcgaaaagatagctgtaacgaatttgttatatgctagtaatgatagactttttgtatggattctagaagatgccagcaaacaagaatggtcaaacttttgtgtcttggttccttcttgggtagatatatagatttcgaccattcagcttcacgggtatacttggaaccggcgagcttatatttacaccgggcttaaagcgtggccccttctatttactgtgttacgatctcaaggaacacacagctagaaaaatctgcttcaaaagaattggttattatacttctttgaaagtctttttggatcatgtagagaatcctatggttctgccaaagataaggcaatcggttggtgatgagttctttggtgttgcatgaactaatctctcttctttcttttcttatttttcaagtttcaattaagtggtcggatattatttgtttaagactagttcttattggatttgatggtcacccattggttagtcttttgatcaatggatatttatgtctgtggaatattgtaatgcaatgttttttttctcaacatctttggaatgcaatgtttatgacttaacaagaaaaatgtttatgacttgattataataatctctggttttgtgcggagcttatacagcttcggttttcttcttatttgatttcttttggggagaacaaagagttttgtgtttggctagatggatctttatcatcattttggtcgccttttgaattttatttcataaagaaatcttatgtataagaaaataaaactaatatcgattctgaaatagcaaaaatacctcaatattttcactaaatcataaaacgaactacattcatcatacaacacattgtaacatttcaccattaatttcttaacccaagcaacaagccaataagtagatagtttttgtttgactaaacatacacacgtgttcggagtttgatgtacacgcgctgactgcgcgtggatgtaatataatcttaattcttaagtatattcgtcgacgttgccttgttccaaagttataaaccgtgtggaaccatcgagaagcgaagccagaataaattttcgaatcctccgacgatg

SEQ ID NO: 14725 - DNA, 3000 bp, Unknown
  misc_feature (1)..( 3000): cDNA_ID_2730695_gDNA_ID_2684220_Annot_ID_137433 3000 nt of promoter + ATG
aaaagtaaaaaataaaatctcaaaattttagattcaataccttttaaatcgtatacacagaggcgtgggcagttctacaccgctaaactttattagaaatgttaatcttcgatcaagggacttccacgatacaaactttttgtgtgagataatacatcccgaaactcatacaaaacccataactagcatctcaacctctcggcaaccaaactaaacatacgcgttacgtccccgccacggagaattggcgttattggtcatattatcaaaagctaatgagagtacaaataagaaaattacagtagttatgttaacagttttgaatttatgaatcccacttctaagctgtcgttggacattgatgtcccaaaacgacctaataacgtcaatcatgatcatttgccgttgacattcattagcaaaatactttgtaaatggtgtaccaattaagtctcaattgtaaaagatttaacgttgatatatagataaattagactgccatgcatgtatatacttatgctattcttggtccatatgattctatgaagtttcttgtgatcagtagataaaaatactatatgatgcacaaaagcatgtgtttttttattgatttggtaaagttagtcccaaaagagccacaagactgcaatttttttctaaaatatataataatataatgttgtagaatgaagttaaataagcttctttttgaggaagtatcgtttgagatacaaaacttgactaatcgaaacgacaatagctactcctaaagacattaagccgagctgattgaccctcgtgtttgtcttctcgtttatttccctcatatatgcttccctgcaccatttttttataagagaatcttaattaaatccttttttgcgtattccacatatatacgtaagattgatatgaaagttattaataacctgattctcaaatagagtatgttggccctaatagcacttgcgtattctgtagatcttcgaatctcaagctccacaccctggaaccatatattcaattacatgtgtttttttagattattataatcatatattagaattggaaatgaaggacttgcctcgatcttttcttttttagcaacagaatcccagtctttggctctgatacccatcttccaatcaagactgacgataacagagctattgactgagtgatgtgactggtcgtgatgcattgctaaacaagctaagaatgttccactctcgctcgttgtaaacgcagcctgaccgtgtgtcacgtttgctatcttgtacagttccttcccatatggagatgttacctatacattttaaccaaggcatatatcaacacacacaagtttatactatattttcactccaactatagacaacttataaaccaaattaacccttattttctcaatctattaatccgaaatctcttggtagaaaagttcatgtgaattttgtggttaactaattgatttttcctatacaaatctatcagcagtttaatgttgattttcgatctctaatttgagtgatcttaactcgtagtcaaattatttctatctcaaatatataacgtttgaccacacagtaacgaaattttcccggatgcatgaaatttacgaagaaaaaatggagtatatatggttgatgtacaaacccgaacatctaatgttggaccaagttgagtgaaagcatcgtcgatgcaaatgtaatcaaggacaacgaccacgttggcttggatctcttcgtagacgcatctctctcctgattctggaaccgttaaccatattgcctccacccccggaaaaagagagccaccgccggcgaggtaaatcaaaccaatgaatagtaccggtgagatcgccattttcgagagagagaggtaagtttaaggttattgaaaaccaaaaaaagagagaagaggaacaagttcaaaggctattcacgttattatgcaagagaaggttttaagacattggcgcgtggagttaaagccatcgttgtatccaatcagtaagggccatgtaggatgtggtgaagattgtctacggagccgtttttggagtatttttacttttatggaaactacgtttaattttgaccaacaatatcatcttaataaggaagtaaatccaaacaaaatatcttcacattaaatgtccttcaaataaattttattttatttctcttttctgtcaactctagataacaacaactagatttttaggcattccaatggattgattatagacgtgtttcatttggaaatttactaatgtaaaaatattagagagaattgaccacgcaacccacaaaacatagtaaaccacgcttgaaaaagtgaatagccatgaattagtagctttaagtttagaccatatcatgcatttaagatccattaagtagattacgtaacgttcgagattaactgctcctaattcagtgataagattacactgcaacatttcctacgctaattatacttggggagaagatactttgtttttcggtgcattgatatttgtttgacaaaattgttcagaacgatgcaccatggaaaaatgaaatgtgacaccaaccaaacattatacttttatgattccaccaaaatcaactttacaaaacccacttctcgattaaaaaatgtcacactgtattaacataaaatattcaaaaagtccgacaaattaactcaagaaaaaaacacagagaaaaatgaatgaataaaaaaaaacaggaaaggaagcaactttcgtattattctcttccccacttgattgcgatttgagagagataaaggtcgagaaagtcttttcatctccttcaccctcatcgtttcgcgtctcttctcttctctctcagaaaatgctcatcagaaattgtctcctttttgtttccttgatgtgttttctcttctaatctccggtgaaacaaagaacaaaggattcataagacacaaagcagagaaggagagagagatacgaggcttttcttcatcttt

SEQ ID NO: 14726 - DNA, 3000 bp, Unknown
  misc_feature (1)..( 3000): cDNA_ID_2730683_gDNA_ID_2684220_Annot_ID_137436 3000 nt of promoter + ATG
taaaaaccacagagggaaacgatggccttttcaaggcatggcatattctggatggagaaattgcctcctaaagagtcaatgatgctaaggtaatttaatcccggggaatctataaccaatgacctaccagaaccatttttttcaagtgattgcgaatcaatgaaccttgtcacattgtcactcttatttcggatcaccaacaaatatctgagaacagggcaactcaataaaagcctaacatgagaatcttggtctttatacaccacattgacaaggagcagcgattgaagggacgggaggcaagccgcggaaggaacatcaacaagaatcttgcccataagattcaatttcacaagcgttttgctggtgtaaagcctcttactggcaggatctgagagaaaactaagacttagggttagctctctaacgtaccggtcaactgcattcgagacccactttccgacatctacatcaacaggacattgtggaccaagcatgatacgcaagctttctactgaaggtgccttgtgtagttgcaatgacttttctagcaagtcccaaatactctttccgccttcgttgctttctgtgtactcgagtttaggcaacatcgtccagagaaaacgccatcgtttcgacaaaatcatggtggtcaccgcatcttttgttgggattagacacagtatatgcaacagaaatcgtcaggcaaggcactgatcctgtcagacagctcgtttaaattttttccgatagatctccgcttctgatgacatcctttaagatcttgttcgtcagaataagaaagccctagtttgattacgtagatagaggcgagttaacattcttccgtagcaagataagttagtattgggctaggccttttaaaacaagttgaaactcgaatatgtttagaaaaaggaattgtgtcattgtacattgggctttttaaacaagttgggcttaagtccatgtttggtcaacactctatttcgggtattgtctctgtcttcctttagcggcggctttactttagattcttctagggtttctagattgtataccctagataagcatcctataaagtaaacacaagtacttgcagagactttagattagagggctagcgactgcagaagaagagtaacacgtcatctctgtgcttctttgtctacaattttggaaaaagtgatgacgccattgctctttcccaaatgtagacaaagcaataccgtgatgatgtcgtggagattttgttgagatgctacgagcgtgtaaatgtttcatgtttgttgtttgattttactgactgctgatttctttttttcttggatctcgctcaaaactagatcctcactacagagcataactgttgatttttcttattccagatcttgctctgaacaagggcatctaaagtcacagatgcgtgtgattattgttctagacttgcagacttccttcttttttttttttttgcaaatccagatttgttttctgaatggtgaattcgtggtccagtaaggttttgatacctttcaaagagataaacttaacagaacaaaattttgttaaatatcgtatcaattcgaaagaacaaaaatatggtattgaagaacgaacataaatagctaatttctcgtggttaacttcgaaggaaattggacgtgattatttctcataggacaacatgttcttgacactgtttaatgtgcaaacacaacaataggttagaagccctggtgtcgaactaactagtgtttctacatctccatggattttattattttaagctgagattatgtagaaaacctttgagatagaagtttagatgtagatgtaccaaacacaatcattatagcatgtttattagtatctctcaaatgagagaatgagacattatggttatcctaacccacttaggcatttaaccacacatgtatataaaaaaattcctaaccaaattaagatccggagattagtgtggattcaatccgagatcttctgcttaaaaaaacaaaccaaacaaaaaacagttcctccgattccgttgaagacatgcaaccaaatgatttggtatggtaggtgtatgaaaaaattattatccttatccaaatttcagcaaagaattaataatagcattatccaaagtggagaaacatctttatccaaaaaagaaaaagagaaaataagcgatagatgaacaggtggaacgaggttcgttcagtagtcgtcgcttctaatcaacttccacttcttccacggaaacaagcaattcgatcaaacgtgaaagcaatatttaagatttttgtctcatactctaagcaagcaatatccaaataaacattcttatacctccactcctcctctgtctgattccttcacccaattcttgtctcgtttccatcaatccattgtctttgattccagaggtttgtttctatttcttgttgattccaattcgggtttcttcattgtgcattctcttgtttatgtcatgattcttattctttgcttatcaaagctctatactttatgaccatgatttgagagattctctgaaaagatcacacctttgcctctgaatttgagaaattttagtttctctgtatctgtctggtttagttcttgaagccatttgtgatttaatgtctgaaggttttgactttatgagttgagattgaagccactcttgatttgcaacaagatttgtcattttctatcatagccttattttatagctttggcatcatatcttaaattgagaaagactctgccttgttgcagttccaatgaggacaagaaaaacagtaatgggtcctatatattctcatgtgtttgtcttccttttggtctagacaaactgataagtttctttttgtagctggtactttcttttgaggcttttttaaaaattatccaacggcttgaactgaattggattcaatgtttctacaaatgtctcttatatgtaggttcttggtttatttggatgtggtgatt

SEQ ID NO: 14727 - DNA, 3000 bp, Unknown
  misc_feature (1)..( 3000): cDNA_ID_2730679_gDNA_ID_2684220_Annot_ID_137437 3000 nt of promoter + ATG
caaaagcgaccgatcctagtgcaagacttcagttaacaacaaccaagaaagggtcaatatggattgaccaagtctcggccatgccagtggatactcacaaggttcttttttcgctctctctgattccctgtagagccttgagatggaagattacagattgctaatagagaaaatattggaagaagaactctatcaaatactcgatctttttggttgattgcagggacatggttttagaaacgatcttttccaaatgatggccgatataaaaccccgtttcatccggttcccaggtacgtattatttaaggctagtagcatttttgttacttattctatccatagacgtacctcttagttcaatatgacaaaaagcatgacttaagatgaaataagctaaagtctattctttactctggatatttgtgaatttaggtggttgttttgtcgagggtgaatggttaagtaatgccttccgctggaaagaaaccgtaggaccttgggaagagagaccgggccattttggtgatgtttggaagtattggaccgatgatggccttggccactttgagttctttcaagtgagacttcttcttttctattgagtacataatgatccccgaagctcgttattgaatattaaatgaacattcttgcagatggcagaagacatcggtgcagccccgatatgggtgtttaacaacggtattctttcactctccaaaaacttagttgtaactgacttatatcattttgtcttccaattctgtcaaccttattttttactttgtgcagggataagtcacaatgatgaagttgaaactgccagtatcatgccctttgttcaagtatgattactaaaccttcctctgtttcactagtgaagaagccggaaaaccaaaactttctcctctttttgtttcaggaagcactcgacggtatcgagtttgcccgaggagatgccaattctacttggggatctgttcgagctaaaatgggacgccaagaaccttttgaacttaaatacgttgctattggaaatgaagattgtgggaaaacttactacagaggttttgcatttctctatgatcacatcttgacttagatttttgttgagcatctttgacactaaatgagattacaactttacaggaaactacattgtgttctatgatgctatcaagaaagcctatccagatatcaaaatcatctccaactgcgatggatcctctcatccactcgaccacccagctgattactatgactatcacgtaaaattttctatcttgacagaaactgtaaccgttgtcttgtgttctctcttccgcctgaaaaaagtgtttcctttttgtcacagatttacacttctgctagcaatttgttttccatgtatcatcaatttgatcgcacttcacgcaaaggtccaaaggtgcggtaatagattataacaaaacttaattccaacaaacacaagatgaagctttcagcgttttactcactcgtgaactttgtttacaggcttttgtcagtgaatatgctgttactggaaaagatgctggtacaggaagccttcttgcctctcttgcagaagctgcgtttctcattggtcttgaaaagaataggttccctttgaatttctcttcccaggctttgatctcaactaaaaacatcaaataagttaaacatcttatgactttttgcagtgacattgttgaaatggcaagttatgctccactctttgtgaacacaaatgatagacggtatctctcacttacttttccgttcgaatggttactcaggaagataaggcaataatctcaaattgttaaattggtttcaggtggaaccctgatgcaatagtcttcaactcctctcatctatatggaacacctagctattgggttcaacggttttttgcagagtcaagcggagcaactcttctcacttcaacactcaagggaaactctacttctcttgttgcatctgctatctcttggaaaaacaatggcaaagattacatacgcataaaggtaaaccgagtgaaagattcaaccggagctctgatattgaccctaaaaaactgtttcaaaatctgttatttgcaggctgtaaacttcggagctaactcagaaaatatgcaagtgttggtaactggattggacccgaacgtgatgagagtttcgggatcaaagaagacagtacttacctctaccaatgtgatggatgaaaattccttctcacagccagagaaggtaaaaatcaagagatggaagaaacatcattatcatcacaaattctgagtgttcccatgttcttattggtttttatttgcaggttgtaccacatgaaagcttgctagagttggcagaggaggatatgaccgttgttctcccgccacattccttttcttcattcgatttgttgaaggaatctgcaaagataagaatgccaatctctgattcttcttcccatcagaaaactaccactgtgtgaagagaaacaatgacaaggaagtatcaactttcatgtcaaaagtctctttgtggttcaaatctaattacattccataaatgcttataacgtacccttgtgtatatataataatagtctggtgaataaatttactttctttaatcatgagcttatctcgactctagatatcttgatatgcaagaatgatgaagcaacagtttcttcttagcataaaagaagatgacgaggcgtgaaagtgggctgggccattttatttccattattgggcttttaaaagcccatcataatgaattttgaaaaaaatggaggagcatcaaaacaaataaaaatggcgaaactgaagaacacacgattcagattttcaaaattgaattttgtagtgatctctctcctatataaacttcctcactcttcttccatttcaaatctctctctctgtagtcaaaattagggtttatttattcataaggaagagcatttcgaattctgtagttcaaaattgaagatc

SEQ ID NO: 14728 - DNA, 3000 bp, Unknown
  misc_feature (1)..( 3000): cDNA_ID_2686679_gDNA_ID_2684220_Annot_ID_137438 3000 nt of promoter + ATG
tatttattcataaggaagagcatttcgaattctgtagttcaaaattgaagatcatgtcggcgtcaacggtgtcaatcaccgctagtcctaggacaataaggcggacgccggttctctccggtgagaagaaatctaattttgatttcccgccgagcgaatctcatgccaatgcggcaattggagagtcgtctgctggtacgaacaaggatctgattcgcgccgaggctgccggtgagagatccaacacctacgacgtaggtccggtgacaaggaaatcaggatccaccgcgacggggactaatacaaccaccacgcagcgtcggacgcggaagtctcaggggaataagatagatagagggaaatggaagacagtggttagggtattcgcgaagcaatttggggctcttttgttacttgttggattgattcagttgattaggaaattgactttgaaggattcgtctctgtcttcttcgaatttcccaattgaaacggaaatggtgctttcggaattggagagtcggatttctgcagttgatggtttggtgaagactacgacgaagatgatgcaggttcaagttgagtttcttgataagaagatggatagtgaatcaagagcattgaggcagacgatagattccacatcttctgtgttacatagtgagttgaagaaggtagagtctaagacagagaggttacaggtttctgtagatgagttaaatgctaaacctttggtgtctagagaggagttagagagagtttacgaggagttgaagaagggtaaggtcggtgattctgatgttaacattgataaactgagggcttatgctcgtgacatagtggagaaagagatagggaaacatgttgcagatggccttggtcgagtagattatgcgttagcgtctggtggagcttttgtaatggggcattcggatccgtttcttgttggaaatgggcgtaattggtttgggacaagcaggagacgggttcatagcaaagcggttaagatgttaactccgagtttcggggagcctggacagtgttttcctctgaaaggaagcaatggatatgttctagtcaggctaagagcaccaataattccagaagctgttactttggaacatgtctctaaggtagtactaacatctcaatactaaactttcacaaaatgattgatttttatatgttaatttgagccttcaagaagggttctctgttaaatgttgttggtattgagatgccctgtacttcggattggattgctggtgacaataggttatcgaatagagggcaagaaactagttttgtgaatttgagttcttatagtttgaggtttagtttaggcactagctgtgacaatatgcattgaggaggattttacctattgttattttctgcaaatcactagctttagcagttcctttgtctaatatcaatgccactgtgttgttgtgctttgtttgggacatcgttgacagagaaaagaaccgtatgtatgggaagagcttgtaagtttacaattagtggaactgtaatattcactgtttacggatatccttaggaaacagtagctgaagggaaatagtctcaagagtgtgtaatgtgatggtcacacattgctttccatcattgttcatccttgtgatcatttgtctgataaatttcttcttgtctgaccactaaaaggcaatactaatcttacggttatgttatgcaccatttaatcgaacaggctgtagcatatgacagatcgagcgccccaaaggattgccgtgtatcaggatggctaggtgacatagatatggagactgagacaatgccccttcttacagaattcagttacgacttagacaggtccaatgcacagacattcgacattgcagactctgctcactcaggacttgtcaacactgtcaggctagacttcaattccaaccatggaagctcttcacacacttgcatctaccgcttcagggttcatggccgtgaactagactcagtctctgttgctcatgcttgatctgaaagtccacgtcaaacttttcttctctttgtaacattccctctaatagatatctctcttctttttttgtgttagtttatgtggtgggaaagcttctcttagtctgtaatcagaatcatttggttgtattcgtgattattagcttcaaatctgttttggttcggtttatttggtcagggtatgtatcctccgaattgaataatatagatcttagtttgatgtccggttttggttttgtaacagagtttcaatttaagctttcacctaaaacaaatcatacaaattctaatagagtatacatatttcattagttgaaacaaatattgaatttggattattaatggttaccttgggtacttggtattacaacgatatgtgatgaataggaagagtgtgtatatagatggaccataacttgttagtgtgaattgcgtaatcgacaaagtgacgacttcttcttctaggctgcaccgtcttgccttgtctaaaagcttcccaacacatcacatgcaaaatctacggtcaaataatagatatgaaaccctcttccaagtcaacacagcttgtttgattataaattaaattaaatacaaattcatctttgacatgtctgattaatgttaattttttacagtgtcaactggcataacaaattgagctaaacaaaattaagctctaaaaatagccattttttacggttaaatcacatgaagaaacctttcctaaccaagtcaacccatgtttggtcgtcgtgacggtggaccaccggctccaaaaaaactcttcatttgaccaaaacgagtataacccttaattattagaccaacatgcattacataaatgataaattcagtttccctcgagcccatgcattcattaaatagcagaaagctcctcgtatagtctatatatatagcagattttagatccaaaataacaaacaccatcaatacacaaacaaaacaaaaaggatgaaa

SEQ ID NO: 14729 - DNA, 1744 bp, Unknown
  misc_feature (1)..( 1744): cDNA_ID_2034898_gDNA_ID_2684220_Annot_ID_191829 3000 nt of promoter + ATG
cttagtaatccactaccttctctaatcacatttgtttcttatcatatgcagtccttatggatactgagaaacaagggaagcagaaccattaccgctaactgtagaatctcattgcgtttcctttcaccaccactaaatccttcattgacatttctgttgagaaaatcggtcttcatattcacaacttcgagttttgataccaagtggctgtagaactgcatgagccatgtgatatcagtaagacataatacatagacagttctacaattgggaccatttagcaaacaacaacaagtaagaaacagtgcaaaccaaatccaagtcatttaattcgataaggcacctggattggatcaagctctggctgaccaagctttcttttccgagcattgaatgccatattcaagaaatccatattgctaacaccagggatctcaactggggactggaaactcataaagagaccggcaagagatctatcctctggttccatatcaagtagattctgccctttaaacacaatactccctcccgtcacttcataatcgggatgaccaacaagaacctacaaataataagactctcactaagataacaaacagaaagagaacaatactctgcagcatcaatgttaatcctgagatacaagatatacaaataaaatgttcaccttcgaaaacgtgctctttcctgaaccgttcttccccatcactgcgtgaacctattagcaaccacaaaagaagccatggattacaatcggcagcaatgcaaaacaaatccacacaaatagaattcacaagttatgatatcaaactcaaaactttatcatataatgagacagcactaccaggcaaagctttctgcaaattaaatttcaagtcttaaccataaaattgcattgattaatacgcacctctccttcgtagacaaccaaattgacgcctttcagtatctcttgtctcgattcagcaatcactgctctcaaatccctaacttcaagcaacgggatcctccccacgtcatcacgatcttccaccaacgaatccgaatcgacggctgaggatacggaagacgccgaaacaataactgaacggcgagtagttcgcaggattggagcggcggcggaattagctcggagattgcataatagaacacgagagggtgaagtcccgaggcgaactcgctgagtaggaagaggaggaggagaagaaacagttggaacgaattgagctatggagtatgcgtgacggagctgtaggttaacgccggccatggagacagaaattgcggcggaagaagacggtggaggttttatccggtgaagtgatgtggttagttaggtccagggattcttttaatttcacatgttgaatgccacgtaatatatatatcggctactagcttaattaaaatggaaacaaaaaaaaaatggaaataacaaataaaacgacatcactttgtgttgatacgcatattcttcaaaaccttaaaagcttctttccttgaagtacaagaaactatttacacatatgagaccttgggatgaagaaacagacaaagtccataccctaaagcaatcctaaacccataccgtaatctcaaaatctcttcttacctctctttctatcttatatacatcattcaaacattttttatgttttcatatacagtttgattcatttatttcgtaaaggctttgaactttttgtcctgatatagtgtgatctatatataaacatatatg

SEQ ID NO: 14730 - DNA, 3000 bp, Unknown
  misc_feature (1)..( 3000): cDNA_ID_2034901_gDNA_ID_2684220_Annot_ID_191828 3000 nt of promoter + ATG
agcacgccatctccatcgaaggaaaaaagtatctggggtacttatgccagaggagcagtttatgcgttacagagcagcaaaaagaatctcaaacaggtaacaggttcaaatttggtcttctggttatagctatagataaagtttaccattaatgggaaatgaggtttagcctgcacatttgctgtgtgatcttctggggttccacatttacccttatttggttgccatacctgatcttttaggccttgatttccccataatagttgacataattgtatttaatggaaaaggtatttgaatatgtttctaagtaattgttttgatctttgaagggcattattggttacctcagtggctcaaatggactagatagctccgggcttagctcatcagctgctgtaagtaactgaatcccgcctgtttttgtacagcagaaatttctccggaaagacaatttttactgctctttaatagtaactaaacatttttagcatatgagagtggtgtttacttgtcatttttggaaaatgaatcttgtatattattttatgatcgccagaaatgtgacaggttggtgtggcatacctgctagctctagagaatgcaaacgaattgactgtatccccaacagaaaatatcgaatatgacaggtatattcccttctaatgtaaccaagaagctcttctgtattgcttcatgagcagttgtttctctgtgaaaccagcaattagtgctgcaaattggtcaatttatatgtgacttactgcgtctgcaggcttattgagaatgggtatctgggtctgcggaatggaattttggatcaatcagctattttgctttcgaattatgggtgtctaacatacatggactgcaaggtaaaattccttgatttgtaagtgatatagtgtgcaaaaaagcaagaagcttgttcatgtggcaaaaccaagactgttcaatgggatgcctaagatgtttttgatctctaaactgaaaatgactcacgatcaaatcagatctacaacattctcattgctttcacgagaaaataagtgtttaatcttttcaattgcttcgattttaatgtatttcaatgctgagttcacttcttcctaaaatgaaaatgaatggttagaatcaggaggccttgaagaaatccttcctaaccagccatagatagggaaactttattttcttccagaaactgccatctcagaaaaactgtttgaaatatgcagactttggaccacgagcttgtacaggctcctgaactggagaaaccgttcaggatattgttagcattctcaggcttgaggcaggcgttgaccaccaacccaggatataatctgcgagtttctgagtgtcaagaggcagcaaaagttcttttgacgtatgtgcaaatctgtttgattcatatttatctacattttcgcttatttagatttaaatttcagtggaaatgctgcaaagtttatttctctattgcttgtgatactcatttttctgcatcacaagattcacacccttctcttgatttactttttcttttcagtgcatctgggaacagtgagctggaacctacgttgtgcaatggtaaaaaaactttaagtgtggactttaacttattcgttgcatgctgattagtttttctttgttgccatgtctctaactgtcccactgaatagttgagcatgcggtctatgaagctcacaaggtaagaaaataagattcttaagcttttggtaaaacaggttccacctatatcaggcctatgtaaatatgtaatacaataatacttgttcgtgcagcatgagctgaaaccggttttagctaaaagagcagagcattatttctcggagaacatgcgagttatcaaaggcaaatgttcttgaattcttgtagatgtctctttatgtgcatgaatgattcattaagctctttatgatgcttaacggacttttatgaatgtttgttcttaaatttcaggacgggaagcctgggcttcagggaatcttgaagaatttggaaagctaatttcagcatccggcttgagttccattgagaattacgaatgcggtacattacactctcttttcttctctcccaaatgcaacatatcctatagtgaatacagaccactagtatgcttacagacattattctctcttagattcattattttggttttaaattctgtgagttttgtgaaggtgcggagccactgatccagctatacaagattcttctgaaggctcctggtgtatatggagctagattcagcggtgcaggtttcaggggatgttgtctagcctttgtagatgcagaaaaagctgaggcagctgcttcatatgtgaaggatgaatatgaaaaggcccaacccgagtttgctaacaatctaaatggaggaaaacctgttctcatctgtgaagcaggtgacgctgctcgtgttcttctctgatcaatcctggagtttttggtttcttccccacttaaactcgatttttttgtcccttatatctctcacgcttattgattctttgcttgtttatctctttttgatcctgtctgagaaattctctggtctctttggtcggagtttcatcattgcttgatacattttttttgctacaaatacataatgtaaatcattctctaccgttttcgagtcgatagaagaatcgcaaacttcaaaaatgtgactaacatttctccataaatttgttaaattttcaacaattggtgaatttagttctgtaattgatctaacaaagacactatacaagtatgaaattagaaattgaaatcgaaagttagttattataatcttgtttgtataaaatagtgtatatctcaaatagagatacagattagttttttgtttggacacaaagacccccgccaaagtattgaaattcgcgcctgagaaattctccggtgtggctctctagggttttagcactttaatccatttgtacttgtaaaaatccctaaaaccctctgggc

SEQ ID NO: 14731 - DNA, 3000 bp, Unknown
  misc_feature (1)..( 3000): cDNA_ID_3041159_gDNA_ID_2684220_Annot_ID_191827 3000 nt of promoter + ATG
tacgtccttgagccgtgattgtgttttgttgtcctttcattggtcggcgagggagaatccggcagctttggagaactgaagctgagttaccaaagatgaaatctactgttccgataatggtgcattcacggtagaattggcgttgtgcatgaacgtaaagcgtgtcttggtatgcgttcatcgtgcaacggtaaaatgctgtgagatctgcgcttaccattagagcaacagcttgatgtttggatggaccagctgtgttgatgaagcccatgtctcttgccataaacccttttccaaacacagctgcagaaaacagagcatgtcaaaaaccgatttcttgggttataagtaatgatattatgttcggttttctagttgatattatttcagaataacgttaccaatcataattctaaacattatatctttgatttatgagattatttagtctactttgatattattaggccataattaaattaatgaaacaaccaagtcgtgctatttcgaaatcctctgtttccaaaagtaaacaagaagaaaaacaaaaacagagagaggtttaccgaatgtggcggtcttaaaagtgggagttccatcgatgacattaagtctaccagagacaatactcttgctctcgccatctccaaccacaataacattccacatcttcttctccaccttcacattctcaaaataaactcctttcttcacatatataatcgtcctcttctcactcttctctggcacatcttgtaaagccctctttatcgttctatacttccctgaaccatccttcgccaccacaatatccgccactttcctcaaatccgtgctctgcaacaatctccgacccgcgtggaagtccacctccacgtctgcagttgttaacaaacgcctccggagtttgaaagagtcagcgatcttcccgagccatgtgatgatcgctagtgcgttactcgtcaactccgttgagttcttgagatgactttcgccgaacggcctcatatctggagccaacgtttccacgcacgtccgttgatacgtcccggctgaactcagccatgtacggagatcatcgactagctcaggaaccgtgacatcaccgtttgatgatgaggttaacgtgttgttgaggttatctatcgttaggtcaagaagctcagcgcaagcgttcatggtgatgttgttcttttcatcgcctaaggatgaagagaaagcgttgatagcttttgaaacttcggcgattgtgattttgactgcgtatctgaagagctcttctggattgagactgcttgcgtttggagctgatccgagggtttcgaagcatttttctttatgcaacgtaacgtcgcaaacggctttaacggaaacggagattgagtctccgttgttattagtctccactgtctctggtgacttcttgtgagccatggttccaaacacagctccgatcacgattccggcaagaatgactagtgatacagcgatgattgcgatgttctttctcgtcttacgacgagcttcgagccttacatgttcacgctcgtcgactttgccgtaaggagaggacatatttgtatcctccgtccctcttttctaatttttctttgtattcttttgaagtttctcgttagttatgtttggtttgtagatgttggagttggagggtccatataaagacgaaggaaaaatataatcatttgaatagacctctaacaacttacgtgcgaggcacaaagggggattataaatcttcacattaaaataccaaggatgtatttaactacaagtgctcctcatgttttagtcttttatgttaatataagcttgtcggtgaaacatatttgtttaagattgggcactatgttttctgttggatttcagcttcggcatgtttcttggtttaacgaatttattttttcaaggagttctatctctagtttacaaagtttggaagtatatattcaacttgatgttatgtttatgatttgtggttcaattcattctcggtttcttcttttaatatgattatattttgaaaaaaagaagaagaagatctttctatttatatgtttatttaatagaatctcttgaaatcctaatcagacattacaatattcatagggattataatgtcaactttggatagttagttaagtttgatataataaagctgtcaaagaatatttttactaaaaaaatttgagagcaattcatttgtttttcatctgacattgtcggcggatgtattctcctgcttccgtgagagagttttcaaaccttgttttgaccaattacatatactgatgatatacattgtacaacttcttgacccttttatttgaataatcttgacgctaagtcagaacatataaaattaaatcaagaaaaactcaaactgtaagtagaaggtcatctgatcaagaaagctcgcaaagaggtaatctggcgttggagaagagcttgcgttgtaagatcttatatatctgatgggttatatcttatatgagatcaagtcttgggtaaaaatgtaccaaggatcattgtacgtataaattgacattgatagcgagtatgagtatgagagatacctatatcacttaaagtgaacgaaattcatatggataacaaatgagatgagatcaatgttatctcgtctctttctatttgaaaatagttcaattagtataagcagacatattttttttgatttgaatcaatatatactactgtttttactaaactcaaccagtcatggaatagaaaagatggtgaaaataatcaaggcttttaactgaagggaaattaaaggtttaccaaacactaaccaaaaggatagaattagacgtgttaccaagcagcaccttatttggtcatcttcctcattcgaaggttactcgcacttcctctgcacacttcttcctctccatctaacctcagtactcctacaatcctctaagaatccatagatcaactgctgggaaaagcttcgcgaca

SEQ ID NO: 14732 - DNA, 3000 bp, Unknown
  misc_feature (1)..( 3000): cDNA_ID_2730675_gDNA_ID_2684220_Annot_ID_191826 3000 nt of promoter + ATG
tctataatttcagaacccgaaaagctattagcattatgcatagaagatcttcaattcctttaccaccatgacgagtacaaaattgaaatgcactaaggaaaacaaaaatacctttagaaaaggtaaaatagaatgcatgaaacagaaactagaaaatcatgcaagctcatccaaaacggatacttttgtatcccttacagcgctaagggtcttcaatttccaatgaattctagggaattatgagcaaacttaaaggttgaatctgataaatgtctaagacttaagtgaaagataagttcattttcatactaaaatgagatataatggaatgctggccagatcgaaatacttccacaatatccaaggtgcactttaccctatacggggcttagtaacaagcttatgcacgtctgaggatggatataaaagtttgaaaacactaacgacaagatgagagatcatgaaagatatgcacacctgaaacatacttctccttcaaattgtgcagagcgcaactggacctgcatataaattagaaagagaataaacggtacagagacttcaaggctcaagtgaaacacacagacacaaggaactttcccagctccgaaatatatgtttgtctcctgtctacaaaccacattcattttaaattatccaattctttaatgctttctcaggtcaggtgagaaacaaaaagagaccaggatactatattgtacacaattagaatctccatctactcttaagctgaaccaagcccagaatacggaatgctacttaagagaattgcattataccatcaacgagacattcatctaaaaattagaatggtgcttatttgcgcaagaatccaagcatgtcaaacatatgaatttgattgacaagttcacttataagaaacgcagaggtataccaaaacacataagaatcatgataactaatacacacctgagtatcacccgatggaacaaaaccaagaaggatccctttattaatcgtcatagctgatacagttccaccctgtgaacaccaaagatgatttgaattcacaaagaaatggtatgaatcagactaactcttgtagttgaatcaaaacaatgattacatcgctacaatcagaaaccaacctggtgatcaatgtgagctcctaaaggacatatacgataaggagcgaccaccactcgaacttctcctttatctcttccactcatctgagccactgcctcctttatggaatttaactggagacataaatgaacgatctcgtaggattaacaccaaagccaaatttcgaaaacatccaaacacaaaaaacaaacactcgcggcaatctgcagcatatacattgagctccacacatagaaactaatgaaattgttcgatcacatgtgcgattgacaattcgccggggaaatggttaaccggaaaacacatctccgtcgctaattctaacgaaaattaacacagtggaggatattggcaccgagttaaccaacgataacaagcagattcgttgcgtaaatggaaaaaaaaatgaagaataacctcagaatccgtaggccaagacattgtcgcgaagcttttcccagcagttgatctatggattcttagaggattgtaggagtactgaggttagatggagaggaagaagtgtgcagaggaagtgcgagtaaccttcgaatgaggaagatgaccaaataaggtgctgcttggtaacacgtctaattctatccttttggttagtgtttggtaaacctttaatttcccttcagttaaaagccttgattattttcaccatcttttctattccatgactggttgagtttagtaaaaacagtagtatatattgattcaaatcaaaaaaaatatgtctgcttatactaattgaactattttcaaatagaaagagacgagataacattgatctcatctcatttgttatccatatgaatttcgttcactttaagtgatataggtatctctcatactcatactcgctatcaatgtcaatttatacgtacaatgatccttggtacatttttacccaagacttgatctcatataagatataacccatcagatatataagatcttacaacgcaagctcttctccaacgccagattacctctttgcgagctttcttgatcagatgaccttctacttacagtttgagtttttcttgatttaattttatatgttctgacttagcgtcaagattattcaaataaaagggtcaagaagttgtacaatgtatatcatcagtatatgtaattggtcaaaacaaggtttgaaaactctctcacggaagcaggagaatacatccgccgacaatgtcagatgaaaaacaaatgaattgctctcaaatttttttagtaaaaatattctttgacagctttattatatcaaacttaactaactatccaaagttgacattataatccctatgaatattgtaatgtctgattaggatttcaagagattctattaaataaacatataaatagaaagatcttcttcttctttttttcaaaatataatcatattaaaagaagaaaccgagaatgaattgaaccacaaatcataaacataacatcaagttgaatatatacttccaaactttgtaaactagagatagaactccttgaaaaaataaattcgttaaaccaagaaacatgccgaagctgaaatccaacagaaaacatagtgcccaatcttaaacaaatatgtttcaccgacaagcttatattaacataaaagactaaaacatgaggagcacttgtagttaaatacatccttggtattttaatgtgaagatttataatccccctttgtgcctcgcacgtaagttgttagaggtctattcaaatgattatatttttccttcgtctttatatggaccctccaactccaacatctacaaaccaaacataactaacgagaaacttcaaaagaatacaaagaaaaattagaaaagagggacggaggatacaaatatg

SEQ ID NO: 14733 - DNA, 3000 bp, Unknown
  misc_feature (1)..( 3000): cDNA_ID_2730679_gDNA_ID_2684220_Annot_ID_191823 3000 nt of promoter + ATG
tgtcgagggtgaatggttaagtaatgccttccgctggaaagaaaccgtaggaccttgggaagagagaccgggccattttggtgatgtttggaagtattggaccgatgatggccttggccactttgagttctttcaagtgagacttcttcttttctattgagtacataatgatccccgaagctcgttattgaatattaaatgaacattcttgcagatggcagaagacatcggtgcagccccgatatgggtgtttaacaacggtattctttcactctccaaaaacttagttgtaactgacttatatcattttgtcttccaattctgtcaaccttattttttactttgtgcagggataagtcacaatgatgaagttgaaactgccagtatcatgccctttgttcaagtatgattactaaaccttcctctgtttcactagtgaagaagccggaaaaccaaaactttctcctctttttgtttcaggaagcactcgacggtatcgagtttgcccgaggagatgccaattctacttggggatctgttcgagctaaaatgggacgccaagaaccttttgaacttaaatacgttgctattggaaatgaagattgtgggaaaacttactacagaggttttgcatttctctatgatcacatcttgacttagatttttgttgagcatctttgacactaaatgagattacaactttacaggaaactacattgtgttctatgatgctatcaagaaagcctatccagatatcaaaatcatctccaactgcgatggatcctctcatccactcgaccacccagctgattactatgactatcacgtaaaattttctatcttgacagaaactgtaaccgttgtcttgtgttctctcttccgcctgaaaaaagtgtttcctttttgtcacagatttacacttctgctagcaatttgttttccatgtatcatcaatttgatcgcacttcacgcaaaggtccaaaggtgcggtaatagattataacaaaacttaattccaacaaacacaagatgaagctttcagcgttttactcactcgtgaactttgtttacaggcttttgtcagtgaatatgctgttactggaaaagatgctggtacaggaagccttcttgcctctcttgcagaagctgcgtttctcattggtcttgaaaagaataggttccctttgaatttctcttcccaggctttgatctcaactaaaaacatcaaataagttaaacatcttatgactttttgcagtgacattgttgaaatggcaagttatgctccactctttgtgaacacaaatgatagacggtatctctcacttacttttccgttcgaatggttactcaggaagataaggcaataatctcaaattgttaaattggtttcaggtggaaccctgatgcaatagtcttcaactcctctcatctatatggaacacctagctattgggttcaacggttttttgcagagtcaagcggagcaactcttctcacttcaacactcaagggaaactctacttctcttgttgcatctgctatctcttggaaaaacaatggcaaagattacatacgcataaaggtaaaccgagtgaaagattcaaccggagctctgatattgaccctaaaaaactgtttcaaaatctgttatttgcaggctgtaaacttcggagctaactcagaaaatatgcaagtgttggtaactggattggacccgaacgtgatgagagtttcgggatcaaagaagacagtacttacctctaccaatgtgatggatgaaaattccttctcacagccagagaaggtaaaaatcaagagatggaagaaacatcattatcatcacaaattctgagtgttcccatgttcttattggtttttatttgcaggttgtaccacatgaaagcttgctagagttggcagaggaggatatgaccgttgttctcccgccacattccttttcttcattcgatttgttgaaggaatctgcaaagataagaatgccaatctctgattcttcttcccatcagaaaactaccactgtgtgaagagaaacaatgacaaggaagtatcaactttcatgtcaaaagtctctttgtggttcaaatctaattacattccataaatgcttataacgtacccttgtgtatatataataatagtctggtgaataaatttactttctttaatcatgagcttatctcgactctagatatcttgatatgcaagaatgatgaagcaacagtttcttcttagcataaaagaagatgacgaggcgtgaaagtgggctgggccattttatttccattattgggcttttaaaagcccatcataatgaattttgaaaaaaatggaggagcatcaaaacaaataaaaatggcgaaactgaagaacacacgattcagattttcaaaattgaattttgtagtgatctctctcctatataaacttcctcactcttcttccatttcaaatctctctctctgtagtcaaaattagggtttatttattcataaggaagagcatttcgaattctgtagttcaaaattgaagatcatgtcggcgtcaacggtgtcaatcaccgctagtcctaggacaataaggcggacgccggttctctccggtgagaagaaatctaattttgatttcccgccgagcgaatctcatgccaatgcggcaattggagagtcgtctgctggtacgaacaaggatctgattcgcgccgaggctgccggtgagagatccaacacctacgacgtaggtccggtgacaaggaaatcaggatccaccgcgacggggactaatacaaccaccacgcagcgtcggacgcggaagtctcaggggaataagatagatagagggaaatggaagacagtggttagggtattcgcgaagcaatttggggctcttttgttacttgttggattgattcagttgattaggaaattgactttgaaggattcgtctctgtcttcttcgaatttcccaattgaaacggaa

SEQ ID NO: 14734 - DNA, 3000 bp, Unknown
  misc_feature (1)..( 3000): cDNA_ID_2730683_gDNA_ID_2684220_Annot_ID_191821 3000 nt of promoter + ATG
ccacagagggaaacgatggccttttcaaggcatggcatattctggatggagaaattgcctcctaaagagtcaatgatgctaaggtaatttaatcccggggaatctataaccaatgacctaccagaaccatttttttcaagtgattgcgaatcaatgaaccttgtcacattgtcactcttatttcggatcaccaacaaatatctgagaacagggcaactcaataaaagcctaacatgagaatcttggtctttatacaccacattgacaaggagcagcgattgaagggacgggaggcaagccgcggaaggaacatcaacaagaatcttgcccataagattcaatttcacaagcgttttgctggtgtaaagcctcttactggcaggatctgagagaaaactaagacttagggttagctctctaacgtaccggtcaactgcattcgagacccactttccgacatctacatcaacaggacattgtggaccaagcatgatacgcaagctttctactgaaggtgccttgtgtagttgcaatgacttttctagcaagtcccaaatactctttccgccttcgttgctttctgtgtactcgagtttaggcaacatcgtccagagaaaacgccatcgtttcgacaaaatcatggtggtcaccgcatcttttgttgggattagacacagtatatgcaacagaaatcgtcaggcaaggcactgatcctgtcagacagctcgtttaaattttttccgatagatctccgcttctgatgacatcctttaagatcttgttcgtcagaataagaaagccctagtttgattacgtagatagaggcgagttaacattcttccgtagcaagataagttagtattgggctaggccttttaaaacaagttgaaactcgaatatgtttagaaaaaggaattgtgtcattgtacattgggctttttaaacaagttgggcttaagtccatgtttggtcaacactctatttcgggtattgtctctgtcttcctttagcggcggctttactttagattcttctagggtttctagattgtataccctagataagcatcctataaagtaaacacaagtacttgcagagactttagattagagggctagcgactgcagaagaagagtaacacgtcatctctgtgcttctttgtctacaattttggaaaaagtgatgacgccattgctctttcccaaatgtagacaaagcaataccgtgatgatgtcgtggagattttgttgagatgctacgagcgtgtaaatgtttcatgtttgttgtttgattttactgactgctgatttctttttttcttggatctcgctcaaaactagatcctcactacagagcataactgttgatttttcttattccagatcttgctctgaacaagggcatctaaagtcacagatgcgtgtgattattgttctagacttgcagacttccttcttttttttttttttgcaaatccagatttgttttctgaatggtgaattcgtggtccagtaaggttttgatacctttcaaagagataaacttaacagaacaaaattttgttaaatatcgtatcaattcgaaagaacaaaaatatggtattgaagaacgaacataaatagctaatttctcgtggttaacttcgaaggaaattggacgtgattatttctcataggacaacatgttcttgacactgtttaatgtgcaaacacaacaataggttagaagccctggtgtcgaactaactagtgtttctacatctccatggattttattattttaagctgagattatgtagaaaacctttgagatagaagtttagatgtagatgtaccaaacacaatcattatagcatgtttattagtatctctcaaatgagagaatgagacattatggttatcctaacccacttaggcatttaaccacacatgtatataaaaaaattcctaaccaaattaagatccggagattagtgtggattcaatccgagatcttctgcttaaaaaaacaaaccaaacaaaaaacagttcctccgattccgttgaagacatgcaaccaaatgatttggtatggtaggtgtatgaaaaaattattatccttatccaaatttcagcaaagaattaataatagcattatccaaagtggagaaacatctttatccaaaaaagaaaaagagaaaataagcgatagatgaacaggtggaacgaggttcgttcagtagtcgtcgcttctaatcaacttccacttcttccacggaaacaagcaattcgatcaaacgtgaaagcaatatttaagatttttgtctcatactctaagcaagcaatatccaaataaacattcttatacctccactcctcctctgtctgattccttcacccaattcttgtctcgtttccatcaatccattgtctttgattccagaggtttgtttctatttcttgttgattccaattcgggtttcttcattgtgcattctcttgtttatgtcatgattcttattctttgcttatcaaagctctatactttatgaccatgatttgagagattctctgaaaagatcacacctttgcctctgaatttgagaaattttagtttctctgtatctgtctggtttagttcttgaagccatttgtgatttaatgtctgaaggttttgactttatgagttgagattgaagccactcttgatttgcaacaagatttgtcattttctatcatagccttattttatagctttggcatcatatcttaaattgagaaagactctgccttgttgcagttccaatgaggacaagaaaaacagtaatgggtcctatatattctcatgtgtttgtcttccttttggtctagacaaactgataagtttctttttgtagctggtactttcttttgaggcttttttaaaaattatccaacggcttgaactgaattggattcaatgtttctacaaatgtctcttatatgtaggttcttggtttatttggatgtggtgattatggat

SEQ ID NO: 14735 - DNA, 3000 bp, Unknown
  misc_feature (1)..( 3000): cDNA_ID_3018838_gDNA_ID_2684220_Annot_ID_191818 3000 nt of promoter + ATG
agatctatcggaaaaaatttaaacgagctgtctgacaggatcagtgccttgcctgacgatttctgttgcatatactgtgtctaatcccaacaaaagatgcggtgaccaccatgattttgtcgaaacgatggcgttttctctggacgatgttgcctaaactcgagtacacagaaagcaacgaaggcggaaagagtatttgggacttgctagaaaagtcattgcaactacacaaggcaccttcagtagaaagcttgcgtatcatgcttggtccacaatgtcctgttgatgtagatgtcggaaagtgggtctcgaatgcagttgaccggtacgttagagagctaaccctaagtcttagttttctctcagatcctgccagtaagaggctttacaccagcaaaacgcttgtgaaattgaatcttatgggcaagattcttgttgatgttccttccgcggcttgcctcccgtcccttcaatcgctgctccttgtcaatgtggtgtataaagaccaagattctcatgttaggcttttattgagttgccctgttctcagatatttgttggtgatccgaaataagagtgacaatgtgacaaggttcattgattcgcaatcacttgaaaaaaatggttctggtaggtcattggttatagattccccgggattaaattaccttagcatcattgactctttaggaggcaatttctccatccagaatatgccatgccttgaaaaggccatcgtttccctctgtggtttttacccgaatgacaagtttctgacatctttctcctctgtcaagtatctctatttggctcatatcaaggtaattaaccaaccattttgatacccttctctcgtaatatatcttattttcttcgtgatactatcgctgcgtttaattacttatgttgtgttctgcttcgttcaagtgcaggttgcgagttgtagcaccattaacttctctcggctcatagagtttcagttgtatccttcttcctcagagtattggatggagccacttatgcttttgcttcataatgctcctaaactaaaagctcttctaatttttctcttctactttttctcccttctctccttctcttctactttttctcccttctctcataccttttttttttaattttttttttctttttttgggtatcttattgagatacttccaatggagatgctattaggatcaactctgtaaatatctctcttgaaacgtgtttaattagaattcttccttctcagccttttattgatcatgttccactttcttggaaccaaccaagttctgtaccgcgatgcgtgttgtctcaccttgagatcttggagtggaaactctttgaaggaaggagagaagagaaacaacttctggcttacatcctcgaaaactctgaagtctttgaagacggtggaaatctcactgatacctttcacgaatgttgaagagaaaaagaagataagggaagagttagagtctatgtatagggtttcagcatcatcgcagcttctgctcaatatgcgatatatgtagaaattgaaaaatgagcactattcagccggaagaagatccactacgttccttgtaaagattcatcatattatcatgtctggtccaacctcaaaatccatttcttagatgataataatattcttcttggaaggacggctagctagctgcttgatggtaattaatattctccttctctatctcgctaatttgctagcttactaattgttttcatggtattttgccaattcttcattttacgattcttatgatatgcagacgattgatggtctgtcttttcataaatagatgcacatcttctaagcaagcaaatatgttttgacttttgagataaagaatatcaaatgactttgtttttggtatctttacaaggaatggatcaataatcagagagttaataactttttcattgttgttaaaccaaaagatgatgatattaatgactattctttttaatatgttttcagtttcatcaattttgaatattcatattatatcattgaatgttcttgtctttgcttgcaagcgaaaccaaaactgggccttcaaatttctctaaaaacataattatttattgacaatgacatgctaacagtatcacgcatttctatactatgttctaactacataaaatagactatagaagaaaactgaataaaagaaatatgttaagccaagtatacacgtttttattgccaaagattgttgatgttattatgtttccaaagtccaaaataacacaccgagtcatcataacttatacactgatcaacattagtaaatcattcttctctttatcttgatcagtgtcttaatcaaagattagtagtagattttagtttattagaatactttccattttggagtctcacatccaattaaaaaaaggcaatcaaaagaaaggatcaaaccaaaccagttgaagtggttcaggttcacttcatcgattctaaagtggacaacacgcgccaaaagttatcgtcggtcgagtcttgacatgattgaaatctcccaaaaaactatgtaataaaattgaaaaataataatcagaactctcaaataaaatgtagatttggtaaagtactctcatcataaattaaagattgaaaaagctgagagtacccaaaaaaaaaaaaaaaaaaaaagctaaagatccacctcgaacttctctccatctttctcaatcatcatctaattctcagattccgtttccttcttcctttttcctcttcctcttcaagccacaaagactcataaaaatccaacctttttctcatttcctctgttaaatttttcctgaaaagtttattcctttttctacagatcgaatttcgtagttctcacctcactgaatctgttactttctctataatctaaatcttcaaaaatgtttctggttttgtgaaatcaacacttaaaaactcgagcttttacctcctctgttttttcaaagataaaaatg

SEQ ID NO: 14736 - DNA, 3000 bp, Unknown; identical to SEQ ID NO: 14725
  misc_feature (1)..( 3000): cDNA_ID_2730695_gDNA_ID_2684220_Annot_ID_191817 3000 nt of promoter + ATG

SEQ ID NO: 14737 - DNA, 3000 bp, Unknown; identical to SEQ ID NO: 14732
  misc_feature (1)..( 3000): cDNA_ID_2730675_gDNA_ID_2684220_Annot_ID_137439 3000 nt of promoter + ATG

SEQ ID NO: 14738 - DNA, 1744 bp, Unknown; identical to SEQ ID NO: 14729
  misc_feature (1)..( 1744): cDNA_ID_2034898_gDNA_ID_2684220_Annot_ID_137442 3000 nt of promoter + ATG

SEQ ID NO: 14739 - DNA, 3000 bp, Unknown
  misc_feature (1)..( 3000): cDNA_ID_2730800_gDNA_ID_2684223_Annot_ID_137493 3000 nt of promoter + ATG
accgaatacggatcaaaccgataaggataagaaaaaaaaagatattataaaacctaatttaaaccgtttcattatagatttggattaaaatgttaatacctataattttaaaaactctaaagacaaactaaatccaatctgaaatcagattaaacgctaaatttggatcattaatactacaattataaaattagttttttagcaaaataaaataaaatagattggtttacttgctaatcagattagatgtgtttgacatttttagcacatgtaactcaattctcgttttttgtctttgaaaaggaacgggattcgaaattggaaaaattcgttccaggatggagtctacggaacgatgtgcccaatcccaccggggaagaactacacttacgctcttcaggttaaagatcagatcggaagtttctactacttcccctctctaggatttcacaaagctgccggcggattcggaggtatccgtatctccagccgtgcattgatccccgtccccttccccactccggccgatgattacactctcctagtaggcgactggtacaaaaccaaccacaaggtattaatattctcctacatctcacataacaagacaaaatgattattgactttggagaatgagacaaagtgttcgtattttgaacaaataggcaatcatgcatgaatcatgatgtatgtaagtatgtaacgttgactcttttatttgattaatctttgtaaactctccttgtaggacttgaaggcacaactcgataatggtggaaaacttcctttaccagatggaattctcataaatggtcgtagtagtggcgccactctcaacattgaaccaggtattacccttcccctttgcatgccacgtttggtccttggtgaaagaataaatttataagtttattacgtgattttttctgtaggtaagacttatagactgaggatatcaaatgttggattacagaactccctcaacttccgaatccaaaaccatacgatgaagttggttgaggtcgaagggagatacactattcagaatcttttctcttcgcttgatgttcacgttggtcaatcttactcggtccttataacagccgatcagcctgcaaaagattattacgttgtcgtctctagtaggtttacatcaaagatactcactactactggagttcttcattacagtaattctgttgcacctgtttctggacctattccagatggaccaattaagttaagctggtcttttaaccaagctcgagctatcaggtattgttttattcttcaatttagtgacaattaccacttttgtatatatatttgcatttcatcagtgctagtggttggagaaaactatttcaagatcttaaaagttatggggttcgaagcagttcatttactagtatagatgatatttttgaatttttgcgctctaggcttacatcaaaagcaaaagctttgtagtttcacttgttgttggtttgctcacttcatggtgcaaacatgtttgtttcatggatatgatcttgtaggaccaaccttacagcaagcggaccaaggccaaacccacaaggttcataccgctatggtgtgataaacatcacccgaacgatcagacttgctaacaatcttggacatattgaaggcaagcaacgatacgccgtgaacagtgcatcattttacccagcagacacccctttgaaactagtggattacttcaaaattgacggtgtatacaagcctggaagtatatctgaccagcccacaaatggagcaatattccctaccacatctgtaatgcaagctgatttcagagcctttgtggaagttattttcgagaattcggaagatattgtccagagctggcacctcgacggttactctttctacgttgttgggtaagttaagaaatattatccaaattttgtcttttcttctcttagcacttatattcttgaaccttaaacatttatgtttgcattgttaataacaatccacacggtaatcaatctaaccaataaagtgttcttaggaaaaccgaaagttatgtacattttttagatgttgattaaatgaccgttataccaaccgtgtgcaccttgtctaactatcagaatggaacttgggaagtggagtcctgccagtagaaaagtctacaatctaaacgacgcaatcttacggtgcactattcaggtgtgggttctttaaactttaattttgatcagtacttggccataaaagttcagtctagttttatgtaaaacgtacttcattggacgaattcgtgtaggtgtatccgagatcatggactgccatatacatagcactggacaatgtaggaatgtggaatatgagatcagagatatgggaaagacaatacttgggacaacagttctacatgcgtgtttacacaacctctacttctctcagagatgaatacttgatccctaagaacgctcttctgtgtggcagggccagcagcagccacagatgagcgatatgagtggaatggaatatattgatagacttgtaatgatttgctaagtttatattttttatatatttttattttgggattcatgtttaagaaagtcttgaaagagctgtacggtgtaggcttttatcctgcgtagtatcaaattgttaggaacaaaaggcttcgtctctgaatagttagtattttactatttttagtcaatattacgacttggtgaattctgaaacctagtgagagtattacttctaaaatccagtatcttttggattttcgtttgtctttgagagtattactttgggaactaacttcttatgatattgtatgttcaaagatttttcaagtcaacaaaatataggtgtgaagaaaacgaaaattgtttgactgcatctttgaacatgttattcaactttgcatttccattaatatttttttctcccaaacatgacacaacacatatataaacgttgtcacatcctcttcgtcaaacataaaaaatg

SEQ ID NO: 14740 - DNA, 3000 bp, Unknown
  misc_feature (1)..( 3000): cDNA_ID_2730796_gDNA_ID_2684223_Annot_ID_137494 3000 nt of promoter + ATG
actaattgctcatatttaaaatattagcctgtacaacacatatcttagtggcattttcttcttaaaattcgtgaccacgtttttgttacgaaaatcgtaatatgcacatgacatggtaaagaatacataccgttaacaaggaatgattacctttcactgtacataattttttaagatcattgaatttatcattggacactaaaaatctttccttttttaaaaatgaaaaataacaattccaccaaaagtatcctaaaaactcaatgcctaactaaatcacattgttatttttcatgtgatttaaatattttggcgatcatcggggtacattctttctttcaaacctatagtttttcttaaatatggtgaaagattcatcaggaacaaaaagaatacgtaatccttttgttttgtctataatttttgagttgaatacatatatatatatatataagtaggaaattatgtacatttgtttataagaaaacgtaaggaaaatatgtacttttgtttatgaataagtaagaggttctagatacatacaatacactaaggcggattagatcatttaatatgactcctcccaggtaaatatgtacatttgtaaacataattttctttcatattgtctttatcgtcattttcctccatgaaaacacaataaacttttttttcataaaatctataaattcaagactaatataatttgattgaaagtatttattttaaaaataaaatccatatttgtttaacatcttcagttttttccataaaattattaaattcaaatgcctacataattcttttttacaactctatattctcagctttctttctaaaacagttgcacttgttgtaaacatgatatatatatatatatatatatatatatatatttttgaatataatttaacattatgttcaaaaaaaattagctatacaaattatggaaacttaatgcctaactaaatcacattaacatcatatattttagttattttatttttaaactatattgtttcaactttattggcgtttataacttaaaatttgtttcataataagttttggttatgtttttcaatgtagatgtttggttaaaaatttagttttttttaatgtcttcacgaataaaaaatcatagcatattaataaaaagaaaaacagaaattaattgtaattattttaatttgtctgaaaaactttaaacaaatataatttgaaaatgagggagtattaggtataataaaattatggaagaaggatacataagtacttgaaatatggatcaatacaatgatacaaaaaaacataaatatataatatatgcataaagaaaggagacaatttttgtaatgtcgatcaattacgcgctacaaatccagctaaatgctctgcagaacctttttataggaccaccattacctcgagggacgatgtatcgctcgttgttgagaggatcacatataatcttgcaagggttgtcacatatagctggagtcgctttctttgatgctttcatgcactggttcacgacacaatttttgacacacacatctatcgagttggaatgagctgaaaacatcattgcaaataaaattacaatcatcaatacacgacaaattttctttgacacttgaactgccatgtcgtaagtattgtgagtctgcaaatcttaaattgtaatgtttttggtgaaacgagatgatttggtgagaatgttggttgatgtggatgatttatatagtaaatatagttttagctgattttagaagtaactaactattaggaggtcaactttttttcgtctctttttctttggcaaatatatcgattgatttctggacaacttataaatgtgttatactgttttggtcatctaaacaactatttgctatgcataaatatagtaacattaatagctcatattaaaaatattagccagtacaacaagtatcttagtggcattttcttctttaaattcgtaaccacgtttttgttacgaaaatggtaatgtgcacatggtaaagaatgcatacctttcaattgatggctcgatacaatacggtggtggaacttgaggtaaaagaaaaaaaaaaatggaaagagtgaatttctacgtggagagggtcaaatcgtatctagctatcatacaataaactgaagaatttaatgtccaaaatgataaatagaatgatattagtccaatctgaaagtctttatttaaaaattaaaattcatatttctttaacaactccagttttcttccataaaactattaaattcaaatacctaatcaaaattacctacacaaattatttaaaatataatgcctgactaaaccacattaacattatatatttaacgattattttcttaaacgatattgttacagttttattgggggtttataactttaaatttgtttcataataagttttgtttatgtttttcaatgtagatgtttggtaaaaattctagtctctgttttaatatcttgacgaataaaaattattgaatatattaataaaaagtaaaacagaaaatgtaactattttatattgtctgaaaattttataaacatataatttgaaaatgatgaactattaggtataatgaaatgtagctagtttcctagaaattagaagatttgtttttctttttcaaattgacttctgataattagtatctttgggattctcattatgatatgtgtccatttcgatagatctgaaattatcattttgggaaagttaacctattatattgtaatattcgtaatatttagatttgtttctttgaaaccaataaaaaaaatagttcaaaaatattatagtttcatattcgaaaaagaaaattgttttatatgcatataattagccaaatcttaacatattatttcggtttgcatgccgatttggaaaacaatccatcaatatttttctcccacagcacacacatatatgaacgtttcatgtcctcgttgtcaatcataaaatg

SEQ ID NO: 14741 - DNA, 3000 bp, Unknown
  misc_feature (1)..( 3000): cDNA_ID_2730780_gDNA_ID_2684223_Annot_ID_137499 3000 nt of promoter + ATG
atcatcaaagtctaaagaaaaatctggttttaaacctagctatatgacaacttgctattgaatttaacattttaacatcgtggctcatcgctttgtgaattgtgagtaacttacgcgttaacaaaatggagatgtcgtacaaaacagtaattagtataaatacgtttgatagtattataatcatttggtaatctttaattatacaccataacgtaacatgttacataatacatacaaatgctattcaagaagaacgatatcgccttttagcatcttgttttcttacatcattaaacaacatgaattttgttagtaatatggaatacttacgaagaaaatgtcaataggaaatagtaaatgaaaatagcgaagagtgaagtcagaagagtgtgggagaaggtgatgatgctaaattgatgagtgacttcaaattacagctgttctcactctgtctcttttgctacccaaatccaaaccgcgttttctctcgtcagactcactcgtgtatttatcttcctaaattttgtaatctttaaaaaaaattaaaaaaaaattcatactatatcgaaaatatgatccaaatttataattacatcgttttctccacatacaacttgtgttattaaaattatatatatacatatatacacaatttgtctttgagtcattctattttagaatatagaaaatcaaataaagctcaatttaactcgttttgtcgagttaggatttcgaattctaataaattttgtcttacgtaactttaatatataccaacataatttatacgaacatatgctaaagattgatataaagtataaacaattgaaaaagggggaaaatataaaaataaataaataaagcatataaaactttaggacacgcaacgagcacatgatcgtatgtaagaaaagatgggagatgacatgttctttgtggacagccttgactttctcacaaagcttaagattaatcatgggatatggtactttaatttgttgtcttcgtctttagatttcacactttggtcttaagcaaaactctccaagatgtcagttcgataaagagagcgagaaagaatatgggcggattttgtcagctttccagccaaaacatgcgtttgcatgacgagaagaagcatctcgatcgtggcttctttcaattttaacttttgagttttaacacgtagcttatttcatatttgacacttactcgaatgtaatctcctcttttgaattttgaaaatgatacactaaactagaaatgcatcaattttataggcttttatgactaattgatgtcgagtggattgaccatgttcattatattttacgataggttttaggattgtcaagatgtttcacttacacatgaatagacatattcagacatgcaagcctaaagtaaaggctaaggcaagtaaacaaacattgcagtacaaacatatttgctttaacaaacaaacaaacaaacaaaaattaaaacaaaatggatctttcttgataaatggaaaatccaataaactgtatgtattaattggtggtaccgtactctctccgtaccagttcccaacaaatgactcaacaatatcaccacgatacaatctcaacctcaatagtttcaacatttattattggtgtactatttatcgtaacaaatttggaggattacaatactacagcgcatggcaaggaaatttcgaggaagatgaaatagtatacgttgaatgttttttgtttttcatattttttttcattaaagatgtacgttgaaggttcaaccatgtataatggatccagtgaactaggttcaaccaccaaatccttttcttttgtatatctcacagatctatgatttagtcggttttgaaaatgttaaaaatgatgtggggacataaaatatgatagaccccatacatatttgttttggtttataaattcatatataatttattttccgtttacataattcacaatatttttatgaattagatttatatatgactatgagacgaaaaatgactaagctataaaccccgatcacatatttgttcactctagcagaaatatatatatacatcttctctttgcatgttctcgaagtatttaacaaaattctctgtaaatagttagttatacaaacaggagggagcagaagaaacaagtaaagatctatcaaaaggaaaacaaaaaagaaaagaagtaaaggtaacaattccttatgggaagatgacaaataacaagcccaaagattatatatcatcagccatataaatactcgttggcccatttgaaagtcattttgtaatgggggcccatttatttcaatacgaaatattttaattccttcttttgttttatgtttgcatttacaaaaatcagcaaatattaattcatctattaatatgccacaaaaatgttatataaagttgtagactaacttagtataacacaaaaatgtgttttatgaaatgatttatctaatagcagggtattgttatacacaatttgtgatttaaatgataacaaaacaaaataaacccaataatttgttttcaattcaataagcctcttggttcaataatttctcattcaatgtttatacttgtaagttgtaatctttggctcaaattcttcactctacaaactatagacgatggtaaaattaaatgcaaaatccactttgagaggaaaataacaaaaatggtaaacggaaccctctaaatcattaagcaggtaaaggtcaacataatgacgcgccacctccttaaaagacacgccacgtagacaattcctcagaatctgattggctcatcttacgttgaaacaagtcaccgaaacccatcaaaatgctcttaaaacctcccacactctcacacgcgcgcgtggagtctctcttgtcttcgtttgtgtttggtttttttggactttgaccttccttggcttggacttgagaccaaaaaaaaaaaaaggagaagaagaccatcgttgttctccgatg

SEQ ID NO: 14742 - DNA, 3000 bp, Unknown
  misc_feature (1)..( 3000): cDNA_ID_3018908_gDNA_ID_2684223_Annot_ID_137502 3000 nt of promoter + ATG
tacctcaaaacaaagaaacaagaaacaaattaacctcctcattgttataacttctaaaaatcaattaattaatttattatttaaattacgtcgatcagaaaatgatactcagtaacaaacaaaaaacaaacaaatattatttcgataagaaaaaaataccaaaaccgaaaaaatacaaagcttgatcaagcttggctcttgaatgttgaaattaaaaaatttgggagactaagaaacaaccttaatctaagtgactgggctttgattgaattgggccgaattagtctactaaattcagtctcaaaagcgttgttctgcttttcttgttggtcctatgttcgcgtggaggattcaggatataataactactgtatgttatttatacgtgagtgtaatggaagaagtacactacataacataatgagtgtgcttcatgtactcttccatgattaaacctctaataattttactgtacatgctgcgtaagatgtgatcaaatgacaacttacataataatagaaaaaaagtccacgaataaaatacgttatcaatcatatatatccacgtaatgtactcaacccgaataagatttttgttttaaatatcatacgaatcatttcattcacttataaatttcttaaagttagcaacatttatctaaattgtatcttcaacattaatccacatcgcttatacatatactacaattaaccacacttgtttttatctatttcacttacctataatcgtcgaaaagtgttgagtctcataggttctttctacttcaaattatcagttagtttgatttttaccttttctatcaatgttatgtactatagactatatagtaaaaagaaaaatcatttgttgtatatttaatagattacaatttgacaagttaattaaagaaatgacttttcggatgtgtgataatttcgaaggtaacgactaaaatgcccacgcatgactctgttaccattagccagccttatcaaaagccgaaagttaaatggatgtgaatgaaacagactttgactttagatctcattgaaagagatgtttgcttagatgataatacccttttaatccattttataatccaacgttgttagcaataaagtagtctctaattaaaaattatcaagtggaaattatatcacagaaactataccatttttgtatgatttgactagtaagacaaaaggctgttatatcaaaaccatacaacgatttatatgtaacagtgtaaagtagtttttggttaagtgatgttgtttgaaatatgactaatctcggaggctaataacatcggctgcaccaaacgtggatgtttggttaaatgggttgttcacgatttgatttagatccaacctctctctttttatttagtttcttggccataaatattttgtttgaaaaatgaaaacaaattccatgtatagtaattaatcggtttcaacaatattgctggcagatcacccaccagatttcttaccaaaaaagaaaatgaatttaacgttgttgttgaatgttgatacacacaagttattactatatccatgaatagtagaaagctggcatacgaatgatgtttacgtatgtcatactatgaatactttaaattttagatcaatgactttatataattttattttaaccggaagattcatgtataacttaatttttcaaatttttttactccaaattaaggctaatctttctaaagtacttggctaacaaaacatcttaaggttagtattactttttaatgatttatttaattaatttttatcacaacgtaaattggtcaatcactattaaaaataatggaattttcgaaaaacgacaaggaagcaattagtggtatttttgccatttcccaatatttttagtaagattttttgttagccaagtatttttagcaagattagccttaatttggagtaaaatagaattgaaaaattaagttatacataaatcttccggttaagttatactaatcttaagatgtttaggttaatgatattttgaaagagattaaacaaaaatggtatttgataaattttctcaaaaaaaaaaacaattctctcatggaaactaaattaaatttaaattaaacaaaataagaaaaattaagtttggaaaatataatttatttctaagttattctaatcaaaatctgaaatgtgatgctggcatagggtggcataatctttgtttataaataatgtttaatttagataaacctcatccgatttgaataagaaaaaaatcttatgtgaaaaaaacaaatttgtaaatttcttttgatgtccaaatcagtttaatattgagagacaaaaataaatagaaactctgccaaaatgcagagattttattgttttctgtaaatcaatttagtaataagaaaaaaaaaaaaaagacttatgtcattgtcccacaaaaaaggctaaaaacgtaaatgaatatttatctgtgactgtgtaatgtagtggcacgtgccagctttacaaacagtaaagctaaaaaaccgttcatgtttggatccgtcgaccaatatattcccgtcatcaccggtgacccctctcttcctctccatccaacggctctccttcttctcttcacttaatcaaccgtcagattttaatccaacggtctttattaaatctaattttatctctttctctctttaaattaaacccaaacccggtctaatttctcttctcctatttctctcttctctctctctttaagtgagcttcgccgttaaactttctccggtaccgggaaattaacgaagaaagcgaaaagtcactgttacactaatatcacaaatctctctctgtctctctctctctctttgtcgaagtcgtgcgtgatgctagttacggtggtgaagcagcggttagtgtactctcgccggagaaattggttatgaccggaatctcacctccgtgatcgaagaaactgttttcgtttttttatcgttacgaagaaatg

SEQ ID NO: 14743 - DNA, 3000 bp, Unknown
  misc_feature (1)..( 3000): cDNA_ID_2730766_gDNA_ID_2684223_Annot_ID_137503 3000 nt of promoter + ATG
tgcaaaacttgcttgtaccaggtggcacaggcacaaggtatctttcttgaccactttgttgttgttcagtgcaaagttttttgcaagcatcctcgcacattataggagtagcgtttttaacttctttcaagcattggtttgagacacaatgtttaatacacatatttacattattcgaatgtgagatttgtgccgaaaacatcattgcgaacaaagttgtaatgattagaagatcgcatgttttcttcaaactttgagctgccataatgtatataaatgtagtgatattgattagaacaaatgttattagaaaacaagatgaattggtgatggatattgggttttgtttagatgatttatatagtgaagataatatttcctatttttaaaaattggtttttctgtttcttgtttctttcacgacggttaagattgcatttctgtgatttagtgttatggtaatccaaacaactttattgttatgaataaacaataataatgttacaaatccttgtaatttaaccataatcagagaacgactaaaaccgtgaaattaaccgaacagaaattaacgattggctaaacgatttcggttcggttagtttccggttaacaaaattaatccgaagtcactcctaggcctttggtcaatcttcgtttctcgtttctctgttgagtaacgacaatcgacaaaggaactttgctcaatcttcgtttcttcgttaggtaatcttcgtttctaagaattggaatgttctttttcataggattcatgatagtttttggctgcaattttgaatctttattctgactatgtgaggaatttgattttgttatcgttgtcgttgtttcgtcttaggatttgtgagaatcattgaacaatttttcaactttgacaattaataacacgagaggagcttcagatttatgtgtttgagtattcaaagatatagcttttatatttgcctttctgggtttcatggagatgaatctgtatacttatagctcattaattagtcaactctgttgttgcttctggtttgacattgtattgagtagtcaaagatttgagctttctaactccacatgaagatatagcgtgtttacatttcatttgtgaaaagtacttcagtccatttgggtttctatctggtttagaagatatttctggtgaaaactttatttgggcattgcttcttttcagtgactgatcaaagatgggaagtcaggagaatgtgaaacacctcgaggaatgcactgtttccaagttagtttcttactgcatcaataatgtttgattgtttgctaatcattagaaagagtaaggaacacatattcagtctttgtttcttcactgtgatatcgaaatttatcagtaagtcattagttatgtagccacttttagttgttttcacttgttcacaccatcatgcttttcatttggaaaaaataagtaaccttggaatataaccacggttgttgtttgatacgtcttgcttgttaaaacacttgagtgttgaaaggttcagttcctctggtgtataaagtgttttcttcttgatatcgattttttgtgatctaggatcatagttttgtcattgagtcatgaggtatgtagcccactcttagtaaatttcacttgttcataccatcatgctagccactacattgcttggcataaagaagtagccgcagtatccaacatttgtatctagtatcttctaatataaaacacagtatgattgttgttctcgaaatcaaaacatcctaaagtgaaattttcgatcttttttgtgggtgcagtgcattagggacatgggtattctcagtcctaggcgcattggttgcaatcccggtaggcatcaaacgcaagtctcttgggccactcgtgttctttggcacaaccggaacaatgctcgacatcatcattggtgtaagtcaatgcgagagagaacacgcagaacaccaaatgaagttactccaagactctcaaaatgccacaacaacaaccaccaacacagagactgaagaaagctcttccatgtcctaatcttttttacatctttctcactaagactttgatgtaatttgatgccactcacaagttaaacttgttttaagatattgtgattatcccatgtatcttgagaaaacaaagaagaaagcttttcatgattacaactgattcattgacattgtcatctccaccaagaaattgcaacacacgaagcaatagaatttaatacgataatatatctgaaactgttacgagcaatgtatatgaatcgataaatcttggactccaatatcaaatggtattcaaaaactaaaaaggttcaaagtgaaaacttttatcaacaaactcttgttcaaactaatgaaacaaagaaagattattataacgataaacgatgaatctcactaaaacgacggcgttccaagtcgaaagcagagggaatgttgaaagttaaacttgattttgaataagtttaattattggatcaattatccaataattaattatggccaaatccaagttctagagttttctctagaaatatcatcatttccacctccttaaaagattctagaaattttctagaatcatcttccacctccttaaacataaaaatctagatactctaatagaataatctagataatttgaataatgtaatctaaatcttatgtaagaactctctagacttaggattaaaatattttagatattttgtagtttggaggctataaatacctcctccccctctcaaatgttgcaatgttgtgaagttatcttcaagtttaaagcaaagtaataaaagttatatttcctaaaaaactctctcaaaacacttaaacactttctccattacctctaaaagaattttactctaacagggaagattccggcgaacacaaactcatccgacgacgaagaaccgaagataagcggagaagcagagcgaaatcgctaggcagatagaacccaacgtaagtttc

SEQ ID NO: 14744 - DNA, 3000 bp, Unknown
  misc_feature (1)..( 3000): cDNA_ID_2730762_gDNA_ID_2684223_Annot_ID_137504 3000 nt of promoter + ATG
ttaaaagattctagaaattttctagaatcatcttccacctccttaaacataaaaatctagatactctaatagaataatctagataatttgaataatgtaatctaaatcttatgtaagaactctctagacttaggattaaaatattttagatattttgtagtttggaggctataaatacctcctccccctctcaaatgttgcaatgttgtgaagttatcttcaagtttaaagcaaagtaataaaagttatatttcctaaaaaactctctcaaaacacttaaacactttctccattacctctaaaagaattttactctaacagggaagattccggcgaacacaaactcatccgacgacgaagaaccgaagataagcggagaagcagagcgaaatcgctaggcagatagaacccaacgtaagtttcatgtccgtctcttctcgtagtctacgcatcaccaccggcgcaaacgtgagtccaagcatcgataaaccgattctgataatcaccaccataaagcacatatcggccatcttgttcagctctgatgcacagtataacgccacgtgtccgttcttcgtcgtctccgttagatatgaaccgtcgaaaccagaagctcgtttgcagattccggtgaaaatggcgagcgaaactgcaagaaagaaacgatcgtttacacgacgagtttcttctcttctctcacgacctccatcttcgtcatccattgcgatctcgtagtcttgcaggagaaaatggagattttgaaacgatgattgatgaaaaaatcagaatccgggaaaaagtgagaaaatttgtctctgagaggttttggagtttgttaaagagggaaagaagaagggtttataacctaaccatggttaaaattttaaccatggaccatagtttattttttaaccttgctttttctctaaccatggtttataatccgtacgtgttgaaaaagtttcaaggagagaggtgatgactgatgatattgagtggacgaaggacttacctcttttggtcactgttaaaaattggtttcttgaattactggttacaaaatttcgttcgttgctgaaccggaaattgacaattttggttacacagaattgggaccaaaaatatctgcatggtttagtatttgatcatataactacctataaaaagactagaaatattttatattgttagataattgtgaaattttgaacaaaaaaaaatgttaagggttaaatatggtcttttttactaagttttattcatcggtttttctaaaatgttactactttgggtaaacaaaagttaaagcagttgcctgattacgacacgttgaacaatggattgatcttatgtaaatttaattgataaaaaaacagttcatgactgcattttgcagctaattccttaaacattttgagctaaaatttgaaactatcatcaagaacatgaagtaattagtcttaatccgatatcataaacggttcacacacacatcgatttctttgtaaaactaattattgtattcagggatgcgatccgaaactttaacgcatttttatctatgcaaatacagtatgaagtgataaatattgcaagttgtaactacaatatcaattaatattcagaaaatcttgtttaaaccttttattcaagaaaccaaaatgttcacaacacaaatccaaagaaataaacgaaaagcagatacagagcatccgcgatggtctcactgaacgatcacaggtccaaatattcaaacctctaatcaaagaaaccataatgttcaaaacaacaaacccatcaaagaaagaaaaaaacgaaaactagattgtagatagaaagagagatgataaatgtaagcatcgtcgatggtctcactaaaagacacaggtccatagtaacggtggaagaaactcaagacacaccactcacccggtgacggagcagcgaaggtacgctaagaaagcaatcgtgaggacgacaaaaatcaaacccacgagcagctgcacgtcacactcttctcgtacttttctcatctgttccagttccaccaccatcggagcaacaatgatcttgagaatcacaagcataaaagcaagatgcgcccacaagttgaactccatcgcccaagaatacgccacgtgtccggtcatcgtcgggtttggatctgagccagcagctgctcttttgcagactcttgtggacagttcaagcaacactgcgacgacaaaacgaccgttcaatctacgaagctcttcacgtccctgtcacgattctcttcacgtggctcaacaactccttccatggcgagagattcttgcaggagaaaagaaaaacaagattttgagacgaagattgtgaaaatgaaaacagattcgggagagaaaatctatataataagggtttttggagtttataagcataaaatgtttcttttatttaaattaaccacggttaaagtttgaccgtggaccatggttaattggttatagtaatcgtacgttttctaacgggacgtgagtcttgatgactgtgttgaaagttaaacttgattttgaatcaagtttaattattggatcaattatccaataattaattatggccaaattcaagttttagaattttctctagaaatatcatcatttccacctccttaaaagattctagaaattttgtagaatcatcttccacctccttaaacataaaaatctagatactctaatagaataatctagataatttgaataatgtaatctagatcttatataagaactctctagacttacgattaaaatattttagatattttgtagtttggaggctataaatacctcctcctcctctcaaatgttgcaatgttgtgaagttgtcttcaagtttaaagcaaagtaattaaagttctatttccaaaaaaactctctcaaaacacttaaacactttctccattacctctaaaataattttactctaacaaagtggtagcagaacttgaagatcctaaag

SEQ ID NO: 14745 - DNA, 3000 bp, Unknown
  misc_feature (1)..( 3000): cDNA_ID_3442195_gDNA_ID_2684223_Annot_ID_191863 3000 nt of promoter + ATG
aggagtttgctcaaaatcaaccacgttgtaggacggctacctgattcaccggccatcatcgcttatcactcaccagtcttttctttgttctctcaattgaaaaaacaaaaatattcctgaggttaattttgtagatattctttatacatggctaacattaacaattttgatacgtcgcacgcgttcgttgcacgtgtgaactaggaggcgcaaacgacgaaaacgtaatgtttgacgccagctttgatagacacgtggacagttcagacgctaatgatgtggacacaatcttgatcgccgaaacacttttctacatgtggcaccgtctatgtcgtggatgcttcgtaaccaacgacattttgcggatgggccgtgacagcccaataagcatactttgtatgccagatcagctctagtggtccaactgtaaaaggagctgtttggcttcaccttacctgttcctactactctttgaggttgaaattagccaattaggtttattgataaggactcttattttatttatgatttattttctctttaacatcgtcatatagttatgggtctaatggccacgaattctaaaaacgataaataaaacaaattatgctgaatatatcaaatatatgtatatgtatttttttgcgttaacttagccaattaaacacgtaacattcgtgtttaatgtttttaatttgcctaaggcaatattttattttcgtcaaaaacaagtaaccgaagacacttgtttctttcgaaatcagtactcaataaaataaagttttgtgtaagactaattttagagattctcttagtagttgaccaaaaaaaaacaaagatgttttacatcagattcgaagtaccacagtttataagtatgccaatacgtgtgattgaatacatcaatataattagatcttatcttacatatttgtggacaattaagtcggtatttcgctaagaatgttttttttttttgcaaatcaaaatgtgtattctatgacaatataaaaatcatatacacaaataaatgatggctaggaatcgaaaaagatgtgtcctcgtgggtttttagaattgaaagcgtcaaaaaagaaacactagagctttcagatttcaagtatacagcgaagagtaatgagatgccttgaatatggaatgggaaagtatctcagtatggcgtagagtaccaacgcgttatggtgtatgaatgggaaaaaatacattcattcaaccatattttatactcctaatatttatatttattcgtatcgtgtgattttttcattaatgtggacaaaagttattgagtacttttaggttttaactggggatccacccccagcattaacgtcggcttcgagtaccgaaataaaataaacggtgtagtaatgacgaaataacataaataagtgtcgaatagctccaacacgtagaacaaacgcaagaaaacaaatgttaaatggtcagtttatgaagatataaaaacaaggagtatcaaacttgaattaaggttttaagaacattttgagtgattcaattgcttcttttatacaaaaagtttaaactcagattacgtacgcccacgttcccttgaagtatatttttaatttttcctaatgcggttgtaatatatttttataaagattttaattaaatggtgatcaaatgtgttagatactctaaccaccacagccgtggtaactaaccactgaccactcgtacgtataatacaattttagaaatatacatacttaatatgtggtgtattaggtatttttgtagcatttttttttgttaaaatgttacacgtttgaattatgaagtttacgtgcacggtcgcaactcgcaatatagtttttatgatgtttgtggttattcgaatgacaatcatgtcctactactagcacttcaaatcaaagtacacgaacctatagcctataggatgatgtatgtctatttatgcgaaaccaaactataaaaaatctcgattatttatcaaataaaatattagacctaatttacaaatggcggacaaaaactcaactttaaaatgtaaacctttggcactatcaatatcaacataaaaacgttaaaaaaataacgcaactttagaatttcatatactacttgcatcaaccatcttctgtatctatcactatccgtatgggaatataagtatcctttaaattaataaatcatcgcaagtaggaagagaatcaatactcgaaaagatataaaaaaaacccaccaagacaacgatcatctaatcacagaagagaacaaaattcttagaatcataaaagtaattaattaagtaagtcatcaaagacaatcacctggaaactcgcttcctaatcaagatttctcgataatcctctcaatcataatcatttctctactatcaataaaataagtaaacaaaggtagaccataaactaatcatttggtcttctactattaacgtatgaagtagcccatactatatcatatcgctttaaattatacaaagacaaattcgaaacaatctcgagtacgtatgtattattaattttatgtttacactacggtgtcgttttcaaatttttaataatattgtgggtttctttttcgggctggtgggctttttgtgtccgcttcccaatacttttattttataaattaaaaattaatcatcgtctctcttgtgtctctctgttcatcacttttcttcttttgatgttcttgtagcgtctgtacgaaatctcacaaggtttcttcttctcagatttagaaatacttgtgtgatatcttctgagtaaccaaattcttgataaagtttctagctttattcaaacccatttgaaaaatccggtggtgaatcgccggagaaatgtgtttttcgtttctccactgagttttttttgttaagaaatctgttaaaactctagatttcaaacgaatgacattttctgagattgaggaacattgtgaatcgaggactggagtgaagattctctg

SEQ ID NO: 14746 - DNA, 3000 bp, Unknown
  misc_feature (1)..( 3000): cDNA_ID_3018873_gDNA_ID_2684223_Annot_ID_191855 3000 nt of promoter + ATG
aatttgcttgtaccaggcggcacaggcaaaaggtatctttcttgaccactttgttgttgttcagtgcaaagttttttgcaagcatcctcgcacattataggagtagcgtttttaacttctttcaagcattggtttgagacacaatgtttaatacacatatttacattattcgaatgtgagatttgtgccgaaaacatcattgcgagcaaagttgtaatgatcagaagatcgcatgttttcttcaaactttgagctgccataatgtatataaatgtattgatattgattagaacaaatattattagtaaacaagatgatttggtgatgaatattgggttttgtttagatgatttatatagtgaaagtaatgtttcctatttttagaagttggttttttgttattgtttctttctctagaagttacatacatctctgtgatttagtgttacgctgatccaaacaactttattgttatgaataaaacaataactatcgtttaaatgttacaaattaaactcaaattggctacgtcatagtggaacttaattcgaggttcaagtcgttttgaacgaaaaccatgaaattaactaaacataacttaattatatgttcttacttgttccatacaaaatctatttttaacaaaaggatgcaatgtctctaaaagtatttgtcgtttgtatgtataacagtatctctcatgaaaagtaataactaagtgctaaaagactctattgcatggtttagtatctagttttggtcgcaaatgaggagaacacaatgtcaacatatacccttatttttaagctagtttctgatattttcaagtttcaacccaattggttttcgttgtttgaactgttttaatatgacatataccgcaagagggaaataaagagcacaactaagtcattgcaatttgatgaatgaaagagattaattaaaaagaaaaattgtaattttataattactttattttggtttgtttaatttttatttttgattaagaatgtgattagctcttgtgcaaatgctaaaataactctcaaaaaagattgttcttcatttttgttgctcttcgatgccaccaaagcgtctcatatcaatggatttcattgaatcgaacctgaatactgcagacaattcaatttgagaaaacacattttatcttcataaagtttttagttgtaattttggtgaaatttgatgaactcacaatttgatgtaaactaggaaatttttgatgtaaagaatcttaattgattagattgatgcacaacttcgtcgagtctagttgaacggaataagtctagactcttaaagacgttgattgcaagttgagagaatgaatatgcataaaattaatatgaagtcggtagtagattcaaaatgatataataataataatactatgtagtttaaaaatgatttgtttaatgtaattttttttaatcgtaaacaaaccaaacggtttttatttgcatttgtattttattctatgtatttgaatctattgaaatggattcaaatctaggagataatgagtttttccttttctttttttataataatgaatgtgaattaaatttatattatttaaattccttttgctggaagattaattgaaaatacgcgacaacatccatatattacttcaagacacttgacatgagaacaataaacaacatcatataagaagtggattaacatatatatggagaaacaaacaatgagagcttttgcgattataggttaaaaagaccacacgctttaggaaacatcctgcaaaacttgcttgtaccaggtggcacaggcacaaggtatctttcttgaccactttgttgttgttcagtgcaaagttttttgcaagcatcctcgcacattataggagtagcgtttttaacttctttcaagcattggtttgagacacaatgtttaatacacatatttacattattcgaatgtgagatttgtgccgaaaacatcattgcgaacaaagttgtaatgattagaagatcgcatgttttcttcaaactttgagctgccataatgtatataaatgtagtgatattgattagaacaaatgttattagaaaacaagatgaattggtgatggatattgggttttgtttagatgatttatatagtgaagataatatttcctatttttaaaaattggtttttctgtttcttgtttctttcacgacggttaagattgcatttctgtgatttagtgttatggtaatccaaacaactttattgttatgaataaacaataataatgttacaaatccttgtaatttaaccataatcagagaacgactaaaaccgtgaaattaaccgaacagaaattaacgattggctaaacgatttcggttcggttagtttccggttaacaaaattaatccgaagtcactcctaggcctttggtcaatcttcgtttctcgtttctctgttgagtaacgacaatcgacaaaggaactttgctcaatcttcgtttcttcgttaggtaatcttcgtttctaagaattggaatgttctttttcataggattcatgatagtttttggctgcaattttgaatctttattctgactatgtgaggaatttgattttgttatcgttgtcgttgtttcgtcttaggatttgtgagaatcattgaacaatttttcaactttgacaattaataacacgagaggagcttcagatttatgtgtttgagtattcaaagatatagcttttatatttgcctttctgggtttcatggagatgaatctgtatacttatagctcattaattagtcaactctgttgttgcttctggtttgacattgtattgagtagtcaaagatttgagctttctaactccacatgaagatatagcgtgtttacatttcatttgtgaaaagtacttcagtccatttgggtttctatctggtttagaagatatttctggtgaaaactttatttgggcattgcttcttttcagtgactgatcaaag

SEQ ID NO: 14747 - DNA, 3000 bp, Unknown
  misc_feature (1)..( 3000): cDNA_ID_3018908_gDNA_ID_2684223_Annot_ID_191853 3000 nt of promoter + ATG
gggagactaagaaacaaccttaatctaagtgactgggctttgattgaattgggccgaattagtctactaaattcagtctcaaaagcgttgttctgcttttcttgttggtcctatgttcgcgtggaggattcaggatataataactactgtatgttatttatacgtgagtgtaatggaagaagtacactacataacataatgagtgtgcttcatgtactcttccatgattaaacctctaataattttactgtacatgctgcgtaagatgtgatcaaatgacaacttacataataatagaaaaaaagtccacgaataaaatacgttatcaatcatatatatccacgtaatgtactcaacccgaataagatttttgttttaaatatcatacgaatcatttcattcacttataaatttcttaaagttagcaacatttatctaaattgtatcttcaacattaatccacatcgcttatacatatactacaattaaccacacttgtttttatctatttcacttacctataatcgtcgaaaagtgttgagtctcataggttctttctacttcaaattatcagttagtttgatttttaccttttctatcaatgttatgtactatagactatatagtaaaaagaaaaatcatttgttgtatatttaatagattacaatttgacaagttaattaaagaaatgacttttcggatgtgtgataatttcgaaggtaacgactaaaatgcccacgcatgactctgttaccattagccagccttatcaaaagccgaaagttaaatggatgtgaatgaaacagactttgactttagatctcattgaaagagatgtttgcttagatgataatacccttttaatccattttataatccaacgttgttagcaataaagtagtctctaattaaaaattatcaagtggaaattatatcacagaaactataccatttttgtatgatttgactagtaagacaaaaggctgttatatcaaaaccatacaacgatttatatgtaacagtgtaaagtagtttttggttaagtgatgttgtttgaaatatgactaatctcggaggctaataacatcggctgcaccaaacgtggatgtttggttaaatgggttgttcacgatttgatttagatccaacctctctctttttatttagtttcttggccataaatattttgtttgaaaaatgaaaacaaattccatgtatagtaattaatcggtttcaacaatattgctggcagatcacccaccagatttcttaccaaaaaagaaaatgaatttaacgttgttgttgaatgttgatacacacaagttattactatatccatgaatagtagaaagctggcatacgaatgatgtttacgtatgtcatactatgaatactttaaattttagatcaatgactttatataattttattttaaccggaagattcatgtataacttaatttttcaaatttttttactccaaattaaggctaatctttctaaagtacttggctaacaaaacatcttaaggttagtattactttttaatgatttatttaattaatttttatcacaacgtaaattggtcaatcactattaaaaataatggaattttcgaaaaacgacaaggaagcaattagtggtatttttgccatttcccaatatttttagtaagattttttgttagccaagtatttttagcaagattagccttaatttggagtaaaatagaattgaaaaattaagttatacataaatcttccggttaagttatactaatcttaagatgtttaggttaatgatattttgaaagagattaaacaaaaatggtatttgataaattttctcaaaaaaaaaaacaattctctcatggaaactaaattaaatttaaattaaacaaaataagaaaaattaagtttggaaaatataatttatttctaagttattctaatcaaaatctgaaatgtgatgctggcatagggtggcataatctttgtttataaataatgtttaatttagataaacctcatccgatttgaataagaaaaaaatcttatgtgaaaaaaacaaatttgtaaatttcttttgatgtccaaatcagtttaatattgagagacaaaaataaatagaaactctgccaaaatgcagagattttattgttttctgtaaatcaatttagtaataagaaaaaaaaaaaaaagacttatgtcattgtcccacaaaaaaggctaaaaacgtaaatgaatatttatctgtgactgtgtaatgtagtggcacgtgccagctttacaaacagtaaagctaaaaaaccgttcatgtttggatccgtcgaccaatatattcccgtcatcaccggtgacccctctcttcctctccatccaacggctctccttcttctcttcacttaatcaaccgtcagattttaatccaacggtctttattaaatctaattttatctctttctctctttaaattaaacccaaacccggtctaatttctcttctcctatttctctcttctctctctctttaagtgagcttcgccgttaaactttctccggtaccgggaaattaacgaagaaagcgaaaagtcactgttacactaatatcacaaatctctctctgtctctctctctctctttgtcgaagtcgtgcgtgatgctagttacggtggtgaagcagcggttagtgtactctcgccggagaaattggttatgaccggaatctcacctccgtgatcgaagaaactgttttcgtttttttatcgttacgaagaaatggaaaaacaggcgaagctaacgaggacacagtcgtcgttactccggtcatcgtcgaatctccgttcgtcatatcaaagcttatcttcaatcgtcgaaggcgagcaagatctagaagccggagagaaagaagagaaacagagaagaaaaccacctaaaccattcggttcaccaaatcctaaaaccggtttaaccagaatcaatcccggtttagctttcacaatg

SEQ ID NO: 14748 - DNA, 3000 bp, Unknown; identical to SEQ ID NO: 14741
  misc_feature (1)..( 3000): cDNA_ID_3018919_gDNA_ID_2684223_Annot_ID_191849 3000 nt of promoter + ATG

SEQ ID NO: 14749 - DNA, 3000 bp, Unknown
  misc_feature (1)..( 3000): cDNA_ID_3018921_gDNA_ID_2684223_Annot_ID_191847 3000 nt of promoter + ATG
tgcccgtatatatatatatttaggtgtaatcataagtcgcatccaacgataggtaagatatgttcgaataaaatttcgtcgattgagagggaacataataagaagcagcatccagtaacgtggaagattgatgccatgcttaattaggctaaacaagagaacatataatgtagtacctttatacgttgtgtttctttcttcattttttcttcttctatatatatatatatatatatatatactaatttgtcatatatatgtatatgtgaactaatctcaaacttaaccaagcactcatacgcattttggttgataagtgagcagaattgataactgacttaaagattttagataattactgatgacttgttggataaaattgctcaaaaattatcagattgacggttataagttgagttttttttttctatctcccatgtaggaaaaaactgatgtctgaattatatagattactaacgtttttttttttgtttgcataagtatatgtttgtttataatatttctaggaacatagaagaaaccaatcttaaaaacgatctacaaatctttaatttaatatgaatataaaaacggaacaacaaaagtaggcagccttactgatgacgaaacgaagcactagtagccgcgtcgcattagaaggacctaaccacgcttgtcgtttcatgggacgaatcacaacaaaaatgtattacaaaaatcacatttaatttgctttttgtttcataaatttagggtttttttctttctttttcttatgataattgtttaaagtagtcttgactaccgtacaaaacgtggttcagtttactcctaccagttaatatgaattatgcaaacatcatttttttttggtttaatgttaaaatttcgcaaacatcattttgtcatgagatagtctaattaggaatgtttactacttgatataagtttgtgtgccttacttcgtcgcttgaaatcaatacaatatagtttcgttgtacatagtaactagtaattaacattaaaatcagacaaagaattattggaaaacaatgagaatttttgacggtggtttgttataatgtattattaaataacatgataatggaaattactttgttttagttaaaggaaaattaatttgttgtttaataaactagtggtaggtaggaatagttaaaatgtaagtatcaaagttttttgaatttaagattaagattctcgaaattcagttattagcatacaaatgacataaattatgaaaaaataaattaaaataatgtcatacagatccagatgaaaatgtataatgtatatacatttgataaaaatgaaaatgtattttcgggttctcagtttgttttgtgaaatatcaatacacaatgttaaaaaagaatcggcttctttcagcttatgatattcattaattttccacacaccatttttcaaagggaaatagcaaaaaaaattaaaattaaaacagccagctaaattaatcagtgaaatcatccaaactgttttacaaagacattttttcggccaaatcaaataaaaaaatcgattgttattgacagtctttgtgatcttattggttacgttatactcacctgtgcactccacttttaagtactacttcgtctctaaatatggtacgaactaacttgaaattagcctattgatttgtttagaaattgataaatctttggacgagatggtgtccactctttaaatcaccacaatgtcccctatctattttccgcgacaagatgaataagaatatgcactaaacttaaccatcattcgcttatacactatatttattaaatcagctttctcatcgcctaaaattcaatatttttgggtccattatctacacgacacaatggatcattcacatacggccgcgcatcaaatgatttcgtaagtcccggcaaatgttaataaactatttgaaaaagaaagagtcatgtgtcccgtcaattcaagtacttatttattgtgattttttgcacatatatagattaacatatattcatggttaaaacttgttgatgctgcaaaaaggataattatcacccacgtacattactcatatgaatataaaaggtgcataattttttttttttttttttgtaatgttttatgtatatacacatatagtataccaattttttaacaaaacaaattacatatagataacaaagaggtgaatagtttcgatcgtgaatattcaggttgatactaattagttctccttttgtagattcgacaagtgtgatgagtggataaaaaaatggatgacgtcttgagtggattgtacatatacaaatagataatgtaagtgcatgctttttgattcttcgaaactatttggttataactttcggatatacttatgacaaaaaaaaaaaacctttcggatatacatggttcggcttggacgtacaggtctatataataatttgatatatattggtacatttcatttatatactctttattggtacgatacattttgattcgttatcaatatattaataccacattgacgagaacattctcattagtgatcgtagattaataatctagccatcttaataagcaaaatatataatccaaaaaatgcgacattattttacatacgcaagtgttcacaaccaatagtccaatatataaattaattaagtaggtatgtaatataaccaaggaaattacgatctaatccagttttgattacctagaacaagaccatagttagccacacataatggatacgtgcttgacaacaattaaaaacctatatttttaaaagtgatgcttaaatagccaatggattgaaatgtgcactcgcatatattgctttttgtgtcagcacaatttggctatataagcaagtactctcttgtagtaatcattcacagtcataactaattaagtacatttgaatacatcaaataccaagaaagagaaatttagagagaaagagaaagagataaaatg

SEQ ID NO: 14750 - DNA, 3000 bp, Unknown
  misc_feature (1)..( 3000): cDNA_ID_3594277_gDNA_ID_2684223_Annot_ID_191846 3000 nt of promoter + ATG
ctctcaacaacgagcgatacatcgtccctcgaggtaatggtggtcctataaaaaggttctgcagagcatttagctggatttgtaccgcttaattgatccacattacaaaaaatttgtctcctttctctatgcataagttatatatttatgattttttgtatcaatgtatcgatcaatatttcaagtatttatgtatccttcttccataattttttatctttaacaatatttacttgtatacggaaaatttgttaaaaatctaattatttatatttatatatgtaacaactgaaaattggtaacttgtataagcataatttatgctgcataaacatatttgcatttaactacacggaaacttactaaagagaaaaagagaattctcgcatataaaacagaaccgttactctgtttctcttggcgctttaattagggtttcttatttagcttttgcattgccacattcctaaaggtttcatcttttggatccttctctgactcacttcttaaaacccatcaatggaggaaggaagtctgtggcgtcaatggactatgttcagatctctgttatcgattcttcaatggtggggttttaacgttactgttatcatcatgaacaaatggatctttcaggtttaaaaagtctcttacttttatcattaaagacttagcctttcgtttgttttatctgatctgcgtttgaaatttggtacctttccttgtttgcagaaactggatttcaagtttccattatcagtttcatgtgttcatttcatatgttcgtcgattggagcatacattgtgattaaagtcttaaagcttaaacctttgattgtggttgatccagaagataggtggaggaggatttttccaatgtcatttgtgttctgtatcaacattgtgttggggaatattagtcttagatacattcctgtctcttttatgcagactatcaaatctttaactcctgcaacaacaggtttagggtttttttaagattgagaatttttcaaaataaagtgatttttttttattgttctgattggtttttgtgtaatggttttttgagtgcagttgtgttacagtggttggtatggaggaaatattttgattggcgtatttgggcgtcattggtgcctattgttggagggattcttcttacttctattacagaacttagctttaatgtgtttggattctgtgctgctttgtttggatgtttagctacctctacaaagaccattcttgcagaatctcttcttcatggatacaaatttgacaggtcaatgttctgtttcctgaggttttgatcttcagtttcacatgataggtgttgaatgtgtgaaacttacatttggtttcaatgacatgccatgctctcatagtccaatacttgatttgctttttcatatttcatggaactgagtgtttgtgtcctcctcattttcatgtctctctatgtagcataaacacggtatactatatggcgcctttcgcgaccatgattctcgggttacctgcatttttactagaaaggaatggaattttggattggtttgaagcacatccatctccatggtcggctctcataattcttttcaactcaggtgttctagctttctgtcttaacttctccatcttctatgtcattcaatccacaacagcagtcacattcaatgtagctggaaaccttaaggtaaatgaacaaatcccaaaccacataacattaatctttatattctagtttcaataactcagatgtttgatggatggtatgtgatttgcaggttgcagtagctgtgtttgtttcatggatgatatttcgaaacccgatatcaccgatgaatgctgttggctgcggaatcacacttgtgggctgcaccttttacggatatgtaagacacatgctttctcagcaacaacccggaactcctaggactcctcgtaccccaaggaacaagatggaactgatccctcttgttaatgataaactcgagagtaaaatttgaatatcatcggtaagtcactagactattgaacgcacacaaagaagttagatttgatcttgaacatccacaagagagttatagtttaactatatgtttatttttactcaaactagagaagttagagaagtgccattttatttgtttccattgtattaaattatctatcctcatcaaaccaactcagagatgaccacaaagatacttaaagcaggcccatttttgtattcaattatggtagtgctttcacttacctcagctttttaatttttccttccaattttgtttgtgccatagtgccatgttctaacatcagagacttaatacatgacaaaatggtgcaagtttgggaatctttgaaagaagatgaaaatagaaagttaatttgacaatatataagaaatgattattcattttcccgccttgatacatgaaagagcttaagacggtgtttaagggaaacgaatattttagctctcaaaacagctcatcaaattcgttgctttagcttctcaaaagtaaaaaatgggctttttcaagtgggcctcaacttatgttgctgaatttaccgccatatccttcccttacaaaaaatcaattttcaaaaaatcttcatgctacagtagtctgaaaccaggtcaaaggagttaaagagaaaagggcaaaacagtcaaacagcataaaaagatgtctgtgtcttggagatcgcaaagctaccgttttctgttcactctgtacaacacacttgtctccttcttcctctcttctcttctctctctccatttcaaaaagggtgaaacttttcttctctttctagaagaagaaaaccagagatacagagagattctctctctaccaaacccctggaaaaatctccagattcatcttccatagaccaaactaaactctgttcactgtactctctgtcattgtcctgtaagagaaattgaaaaccctaggagattttgaatttcgtaaaaccctaaacacaaaa

SEQ ID NO: 14751 - DNA, 3000 bp, Unknown
  misc_feature (1)..( 3000): cDNA_ID_2730796_gDNA_ID_2684223_Annot_ID_191843 3000 nt of promoter + ATG
ttaaaatattagcctgtacaacacatatcttagtggcattttcttcttaaaattcgtgaccacgtttttgttacgaaaatcgtaatatgcacatgacatggtaaagaatacataccgttaacaaggaatgattacctttcactgtacataattttttaagatcattgaatttatcattggacactaaaaatctttccttttttaaaaatgaaaaataacaattccaccaaaagtatcctaaaaactcaatgcctaactaaatcacattgttatttttcatgtgatttaaatattttggcgatcatcggggtacattctttctttcaaacctatagtttttcttaaatatggtgaaagattcatcaggaacaaaaagaatacgtaatccttttgttttgtctataatttttgagttgaatacatatatatatatatataagtaggaaattatgtacatttgtttataagaaaacgtaaggaaaatatgtacttttgtttatgaataagtaagaggttctagatacatacaatacactaaggcggattagatcatttaatatgactcctcccaggtaaatatgtacatttgtaaacataattttctttcatattgtctttatcgtcattttcctccatgaaaacacaataaacttttttttcataaaatctataaattcaagactaatataatttgattgaaagtatttattttaaaaataaaatccatatttgtttaacatcttcagttttttccataaaattattaaattcaaatgcctacataattcttttttacaactctatattctcagctttctttctaaaacagttgcacttgttgtaaacatgatatatatatatatatatatatatatatatatttttgaatataatttaacattatgttcaaaaaaaattagctatacaaattatggaaacttaatgcctaactaaatcacattaacatcatatattttagttattttatttttaaactatattgtttcaactttattggcgtttataacttaaaatttgtttcataataagttttggttatgtttttcaatgtagatgtttggttaaaaatttagttttttttaatgtcttcacgaataaaaaatcatagcatattaataaaaagaaaaacagaaattaattgtaattattttaatttgtctgaaaaactttaaacaaatataatttgaaaatgagggagtattaggtataataaaattatggaagaaggatacataagtacttgaaatatggatcaatacaatgatacaaaaaaacataaatatataatatatgcataaagaaaggagacaatttttgtaatgtcgatcaattacgcgctacaaatccagctaaatgctctgcagaacctttttataggaccaccattacctcgagggacgatgtatcgctcgttgttgagaggatcacatataatcttgcaagggttgtcacatatagctggagtcgctttctttgatgctttcatgcactggttcacgacacaatttttgacacacacatctatcgagttggaatgagctgaaaacatcattgcaaataaaattacaatcatcaatacacgacaaattttctttgacacttgaactgccatgtcgtaagtattgtgagtctgcaaatcttaaattgtaatgtttttggtgaaacgagatgatttggtgagaatgttggttgatgtggatgatttatatagtaaatatagttttagctgattttagaagtaactaactattaggaggtcaactttttttcgtctctttttctttggcaaatatatcgattgatttctggacaacttataaatgtgttatactgttttggtcatctaaacaactatttgctatgcataaatatagtaacattaatagctcatattaaaaatattagccagtacaacaagtatcttagtggcattttcttctttaaattcgtaaccacgtttttgttacgaaaatggtaatgtgcacatggtaaagaatgcatacctttcaattgatggctcgatacaatacggtggtggaacttgaggtaaaagaaaaaaaaaaatggaaagagtgaatttctacgtggagagggtcaaatcgtatctagctatcatacaataaactgaagaatttaatgtccaaaatgataaatagaatgatattagtccaatctgaaagtctttatttaaaaattaaaattcatatttctttaacaactccagttttcttccataaaactattaaattcaaatacctaatcaaaattacctacacaaattatttaaaatataatgcctgactaaaccacattaacattatatatttaacgattattttcttaaacgatattgttacagttttattgggggtttataactttaaatttgtttcataataagttttgtttatgtttttcaatgtagatgtttggtaaaaattctagtctctgttttaatatcttgacgaataaaaattattgaatatattaataaaaagtaaaacagaaaatgtaactattttatattgtctgaaaattttataaacatataatttgaaaatgatgaactattaggtataatgaaatgtagctagtttcctagaaattagaagatttgtttttctttttcaaattgacttctgataattagtatctttgggattctcattatgatatgtgtccatttcgatagatctgaaattatcattttgggaaagttaacctattatattgtaatattcgtaatatttagatttgtttctttgaaaccaataaaaaaaatagttcaaaaatattatagtttcatattcgaaaaagaaaattgttttatatgcatataattagccaaatcttaacatattatttcggtttgcatgccgatttggaaaacaatccatcaatatttttctcccacagcacacacatatatgaacgtttcatgtcctcgttgtcaatcataaaatgaaggtcaaaagcatg

SEQ ID NO: 14752 - DNA, 3000 bp, Unknown; identical to SEQ ID NO: 14739
  misc_feature (1)..( 3000): cDNA_ID_2730800_gDNA_ID_2684223_Annot_ID_191842 3000 nt of promoter + ATG

SEQ ID NO: 14753 - DNA, 3000 bp, Unknown
  misc_feature (1)..( 3000): cDNA_ID_3018933_gDNA_ID_2684223_Annot_ID_191841 3000 nt of promoter + ATG
ccttttatttttattttgtcaacaagacaagccttttagttatgattaattatggcgacttaagggatatgacatgattttaattaatatctaatccacaatcctttaaaagctcattttaattaatagattttgtttacatcattgttttcagataatgacataatctagaaaattagtgtatatagtataatagtatataccctagatttagagtttaagttttatgtgtgaagtctaagtatagaacagatctcgaacttactactgttatcatggcctacgagtattcgagatatcataaataaaagtatttataaaaaaaaaattaaaatagtttataaattgttgatcgtcagacaaatacttacatagtttacattgttaattaaccaattcaacgtagcatgttctggtcgtcttactagatatagactcgaacagatagttagagaaggatgattgatcgcttgtggatccgtggcatgtgtaatagatattatttaaaactagtaatcagattttaaaaaaaatactgtgaacagagaatctatatttgtttgttaagaaaaaatcaaattagtttttggacgtgttggccgagaaacatccacttgtagcattcgtaattaaaaagagaatgtatccgaatataagggacccattaatacaagtcatcttcctttggtatgtatgtgtgagtgagtgattttggaggtctctctccatattcgacaatatattcaattctatctcctcactttcacttcaagtttatttctttctaacaacttgatcgaaatttcggcgtatagttgtttacatttagaaacaattgtcaaaatatttaaatcaaatcctcaaactttttgtttttagaaactcaattttcatttgaacttagaattcatcatgtcgacgttcagttcaaaccaacattttttgataattaatgaatagactcatgcatgtgttagtacaaatgattttagttttcattatatttccgtgtgagaattattatgtttcttcataactttaaatggctctcacatccatcacatgggcaattctccattatcaagactatatcgcttcataagcaattctttcttctttgggcgaaacaaaagatcagatttagcttcgggtttgatgaaacttctccctatttgctaatcatctcgaaaattgctcaaattaagtcttctatttgtcttcacaaatttcaaatcacgtgcttataatccaaatgggaattgaataagtaagtaaataaatcatgattaaagcttaggagctagattgacctagtttataaaagttggggtctggatgtgaacataaaaggggtccattttatttgttggtcaaaaactttgagcgttcacgtgatcttaaaaaataaaaagaagaagacaggcttcaatatcaagagctaaagacccaaacacttagagagacattgacaggtgatttgttatgtgtagtgatgagtttcaatgtatcatcactttttcaattagaccaccatcccacatacttcctctacactatatactactactcacaatgatcaaagcttttagtgtatgacttgattaaataacaaatgcttttcaaaccaatttggaccggttccgtcggacgggtccgaacatgacaaattgaagaaaatcacattttaaacaaacttttgtcgctgttcatatatgctgattttattcaaaataagagataagagataattaactttttatattcaaggaaattacctgtctattgatttgtggtccgaatggtttgatcaattgatcagaaagaaaatgttgtaatgttgattaaaaatagttgttttgggtcttggacttatttgacgttttgagaacattttttgctaatatgtacgattatctacaattttgtccaatatacctttttctaaacataacgttatgcctgaatatagatttcaacatattgttgcatagttaattcgataaaaaaaactcttgctcagtccacttcttgatagatcttcacatggccattattcagatccgtgtaattaattatacgatcttatcaattttgaaggaataaaaggagtcctagaaggttatctataaaagaacacacaaagaaaaaggacctttttatataagaaaaagtgaagttaagaacaaaatactaaaaagaatgatcacatgggaggaatggagaatctttgggtaggattcaagtaatgttcccattatgggattttatggtatgggtatcatatttgtgggccacttctctgttttcaatttgagtcttttaccaaaaaaaatctgtaaggtttttttgtaaagtgttttcaatttaagtatttatcatcacatggggaaagacaaggaaacaataggataagagacgacagtagcgatcaagatcctacgattatgtctcttttgagcttagagatcctgtgaccaaatttaattaactgatctggatttggtatcgttacagtattcatatccacataaccatttaatagattttaatccaatagatctatgttgctttacaaagaaatatctgtaataacatgtggttacaaaaaaaccaaaattggaatatggtatatctgtaagctatgatttgttttttcacagtaatattttgtttggacaactaaaaaagtaaagtacaactaaactctacagaatttgttggctatatacagagagaaacaaaaaacatatttaaaacaattgctaaaattgacaacattagtttcactatataaatcacctagactaacccaatattacccaccaaatcatcttcttcacaattataaacaggaaatacaaaacaagttgtaatactcatttgtattaaatcatcactagtatttacgttatgacgactcaaacatgcaatgttttcatgttcgtagctatattgacgatgatgttttctgcacacattgctcaatcaaacagtctaaca

SEQ ID NO: 14754 - DNA, 3000 bp, Unknown; identical to SEQ ID NO: 14745
  misc_feature (1)..( 3000): cDNA_ID_2730747_gDNA_ID_2684223_Annot_ID_137508 3000 nt of promoter + ATG

SEQ ID NO: 14755 - DNA, 3000 bp, Unknown; identical to SEQ ID NO: 9126
  misc_feature (1)..( 3000): cDNA_ID_2730863_gDNA_ID_2684224_Annot_ID_137509 3000 nt of promoter + ATG

SEQ ID NO: 14756 - DNA, 3000 bp, Unknown; identical to SEQ ID NO: 9127
  misc_feature (1)..( 3000): cDNA_ID_2180622_gDNA_ID_2684224_Annot_ID_137511 3000 nt of promoter + ATG

SEQ ID NO: 14757 - DNA, 3000 bp, Unknown
  misc_feature (1)..( 3000): cDNA_ID_2730855_gDNA_ID_2684224_Annot_ID_137516 3000 nt of promoter + ATG
ggcgtaggtttgcgtctatctttccaaatatgtttttttatgctgaaaacatttttgaagaaaagataaatagtagtgaaaaatgggtgatggtaaaaaatggcccaccaatagtatcagtgacagtaactttatgaatttggaagaagatacaatgatgacttcaatgacaccaccagcttgtaatagtaaatacgttatttgatatgacagagcattaaatcaatcgtgagtgtccatatatacatacaccacatgcatgtacacacacatattacaaatactccaagaaatgtgtggttacagtgtcttaaaacgatatgatcgaaaatgctagtaaactgataatttccaaaatataaacaagaaataacttaaaagtaggtaaagcataggtgctacattaggtcataacattttgcaataaacatttctcttgtgatatgaattagatgtcttcgccttggattatggggttctatagtcattgtgaaactcttaatcctctaaataaccatatttgtaaagtgcgtgtatttctccttaggcatgccaattggtctctgaacaagcctttgtgcattgtatgctgcaacacaaaagcaaggttttcaattgaacctacagaaggaattaaactatccaatgttcttgacatcacttgaattctgaaagactacattgatggccttagaaataggcttgagagatagctatttttaaaaccgagttgaaggaaaagagacaaaactttactttatttaacacttcgatgcttatccaatgcgaaattgattgaagaaaccaaattaattttattaaatacataagacataggaacgaaaacaaaaacaaaatctgagctaaaactactaaagatatttgtgcaatcagctgtatcaaaagagtcattttgcactatatattaaataaattccggccaggggattatattgaattaaatatcacgactccaaacatccaagttaaatatgactttttacaatcttttagtgaataaaaattacataaacatataaatgtataaaactggtcttttacaaagatagttggaattggacccatgcaagaaattgatgtctcgatgttataggggaaactaaaaagtattgtctctttctactgataaaatacctacaactttgaccatcttttcataggccattacaataaattcctccatttgtattataagttgtaatagatttcttttccaagtttatgatactcaatttctatcatatcttgtgaagaaataatcagatcttgaattatttcacattacggtgctttttgacttgacaagtatgatttattgtatatagttgaccagatctaattatatatgtaaaaaaatgtatatataaaattcataattcttttttatatatattatttttctttttagttagtcgttttataatatttacaatatgaattaataggtttatttgaaaacactgaagaaaaatgacaaaacaaaacgtgccgaaagttctttttttcttttttgtttatacagttctctgggtatttaagttttttaataaagggtttgcaattatgtgtattcaagttttcttgtgggatcgatatgaaagttttgacctaacttctcgtataaattaaacaagcgcatttaagtatgcacctttattgacgactacataacccattaatgtaatttatgaatgctatagatagatgtaaatatcgatttttacgtacacgcgaagttactggaaaagaagccattaatgcgtcaccatgtacactgcttcgccacgaatcaatgatatgctcttttggatttatacagttttctgaatgaaatatatctagtcattttaagttacatgatacaaatattcaataaaagctatatcaatatcagtacaacaacttagagcatcatgtcttattattttgtattcatttatacaaaaatcgtaatttagtaaagtaaatgagtatatcgtatagtttgtttttgcttatttcgcgttaagtaaagcctctttttgggaaaatctgacaactgctttagaagattctatttccgtgcttagcaattttttacttcagattcgcttaaagaatctccaaacgttgtaaaaaaaaaaatgattaaagtaaattatggtattaaaagaagcacaggagtagtagttggcaaatgagatagatattaaagttacataataatgactcttttcgtatcttttattgaaatacagatcattgtttttaataaaaaaaagatgaaacgataaaaacagaggtaaggagtgaggtcgaatagtgttaaggtcatatcaagaaactttgcttaggcatatttttgtccaacagattcatcagactttgtgtgtcagtcttctcttccttgttccatttctctttctgtgacgtttttaaggacacgaagcggtgaatctctgcttccctcacgtgccgtttacagtcgcttatgtcaccgtccaatcatacgtcgcttttccttccatgcacccactctctctctgtcatcttctctcagccgcaatacttgatcgacacctctattgggccgggcccaatttaaaccatctattggacttctaaacagagcttcttctctttttgtcattctaaacagagtttactagtactaaattataggaagaaaaaaagaagagaaaacagtgtcattttctttatcatgttccatgtacagtgtttgttttacttatttgggaaaaaatcttataaaaatcaatcctatttttactaaaaagacatcaaaacattttctttttaaaatccaaacggtcactaatctcactaagaaacaactgtacacagacttaagataatgtaaaaaatccgaccgttgtgaccccaatttccactaacggtaatgttcttagccaatcacatacatataaatcaaacttacacccaaatccgtcacactcaatttcatctctttctctaatg

SEQ ID NO: 14758 - DNA, 3000 bp, Unknown
  misc_feature (1)..( 3000): cDNA_ID_2724601_gDNA_ID_2684224_Annot_ID_137519 3000 nt of promoter + ATG
tttcctgagaggccatgtaacttaaccacatacagactaggactagtgcttatgagaaatagccagtaattttcctttcttttctaacaaaatttcctttgcatctccctttgtgcagtttgcagcaaagatatgcttgctgacatcctttagagacacttgtttcattgaaattatacctcaataccaagcacctaagggtggtgagactacaaaaaaaaagtttcctttcactttcgcatatcgctttttgatatgaagtgacatctgacaaatacagttttacaagttgtgactctttatgtttgctattgtgcagtgttatggttaagtttctggtcagaggtgcattataactctttatacgatattcaaggtttgttttgtcctttggaaatgtaacgaaatggtggctttgtgcttgatgacactgattatgatcttcctttttgagtgtagctgctccagttcagcataagccaaagagaaaacattggttgttctagaaggcacgccaccatacatgtattatattaagacccttcaactatttttcagtcagtttgtgataagtctaccgtctcatacgcgaaaactcttcctttacacctctgtatactacttacgaactcgcttgagctgtaacattttaaagccgaatatgatatagtcggaccgagacaaagaaaatatgacagtttccataaccttagtggagaatctcttgaatttgatgggccctttttaaagcttatcagaagcaataagggaagtttttggttggtatgaaacctggatttccatgaattatccagtccaaaatcatattatccatataagattcagttttgtccttttgtccttcgaaatttcttcttgtgcatttgaaagatgaactgtttatctcccgcagaccatgtcgttatacgaactacaacactgtctactttcatgttagtatcatgattcatgagagttttggatggactacttcaaagtccaatgtacgttgggactggctacatcttccgccgagagcaacagagagcatcattgctagtttggaataagaaaggtcgaggctatctctaaggaaaccaaaagctagctatgatattgaagaaagatgacatctctttgcctatgaatggagagaatacaacaaagaatataatgtgatgaagatatctaatctttgcttctcttctctcaaagaaatttcggttaaaagtgaagcataaaagtgagattagtggcactaaagaaggatgaaattagcaatttagggatgaagaaaccatatcctattatccttaaatcggacgaacacaaaaatacggttgaagacataagtttcaatgtccaaagccatcgccaaaaagataaatttttgaacattatgagcgcaagtcttgagaatgaaatggtaacaattcttaaaagtaaagataaacactaaaagcacaatggcctcaaaagtagaagaagaacaaaaaagaacattaagatcttcaaggttcaactgcaatacggccagcaacctggtccaaatccctttggccactggaagtgatccttcttcctctgaaagaagaacaaaagtgatactagtattagcataaaaacatttttaaagagaaacacctctaacgtagtagtagtagtagtagtagtagtagtaatgttaccctttggtgtcgagctcaacaatgttcattgtctccagctgttggaggatgtgacgggcaataccaccactgcttttgcaaaagtgaggtgggcgactaccgttcctcttgcttccaccatagattctacggaaagcaccaacaccaagtcctcccctcaggtaaaccttccttgccatagatgctgcacaagaagtcattttgctaattgaaaactttataaacgcatagagataataagagacaaactaggatgaaagagaactaaccagctctgatgtagtaccaatcaggatcatatggtgcaagctccttcaactttccggtcttcacaatgtctgtccatgtgggaagctcgatctgaaacaaacaattatggtctcgtgaaaaccaaaacaattgtaaaaagtggagcttgacattcaagctattgtaattgctagtgtaaattaattcaacagacgtaacaaagcaaatcacaatattaatcccaagcatttgaatcttaagctgtctattaacaaatactaagagtaacacttgtgattcaataaatattagcaacatatacaaaatttcaatacattcaacagacattacacaattcaaagtattatagagaaatgccaacaatcaacagaaatatctatgaactaatggaaatcattgcaatttgagcttaatccatctttattcgagtacatacaaataaagcttggaacatttctactcaaacaaaaaagaagagactttatccactaaccttgccagatcgcttgagatgagaagcataagccttgacgaagtcatgaggcgagacgtctttcacagttttaccagttgccatggctcaagttatcaaaagactaatcactgatcttcgtctgggattttgcccaacgcagctgaatctctctccgcaaagactagggtttttattctccaataacaaaacttatatatacggccacgatatttcgattagggttttctccccatatccgggtcaaaaaatccaacccgttctcagcccacactaatgggcctaattcttcatacggccttactatctaaccagtatgaataatgttctttgatacgataatgcgcctactacggccttattatatcagttgactagtattatgtcctaaacgacaccgttcttaattagtaacattaaatgacgtcgttttataatcgcttaaccactggctattagttcgcatctcaagtcgtctctgccatttttggctttttaatcaaaccctagagagattgagagagcgaagagaagccatcatcagccatg

SEQ ID NO: 14759 - DNA, 3000 bp, Unknown
  misc_feature (1)..( 3000): cDNA_ID_1012003_gDNA_ID_2684224_Annot_ID_137520 3000 nt of promoter + ATG
actataaggaaagtcaaggtttgttatctttgaccaatgcatttataaacttataagttctaaattaagatgcttaaatgattcatcgcatacctgacgaccaatatcttcagcaattgggctggttccatccatgtgaagtaacaatgatgatttcagctgcagagaaatttaaaatcagttggcatttaaaatctatctacaaataagtaaggagttcgaagaaacaggaggaaaagaaaaaaaaaactttaaacagatcacatttgtaactagcttaaagctgaatcttgggaaagagagaaagaacagttgggcgtttacctgatttcgtgcacgtgtcacatcagcgtctgaaactcggtaggccagcttggttacctcatacataatggcatatgataaatcatccaagcaatcggcctgaaaaaagtaccttacaagatgttaaaagagatataatacgaggcattcatgagatgaaactgctaatattgacaaatacaagaaagagatgaaactaagatagctatggagttctgggttgaccttggcaactgcataaacgccgaacagtccagtatccttgtagttagtgttgaatgccattatgctttctgctatttcattaatggcaaccctctgggtcaggtcagaactgcacatagaaccataatgttcatcaacacattgcgaaatagcttttcattaaatccatcattagaaatattagccagagagtaaactcaccccacgtgttttccaccaccaacatttttgttccacgaacccaacatagtttgcataaccataagagcaacggaatctggatcagtccaagatgctccctcaaaggcaacagcaaattgtgcaaggggtaggtcgtcatcaatcattcggacctgagaagaatttcacggactaaagaatttagaaagatggaacattgcatataacaaaatcatatggttgtgtccttacctcagaaccagtaaaactagcaggttcattggcaaccagttgagaagtagttgttggatcagacgacaacttggtaaatagcttcttcacttgctcaacaacttcctcatgcttaacagctcctgcagcagcaatcacctgaaaatgttttggatgaaccaagataagaatcctaaaaaattcaataagtgattgtaggaaatgataagaagtaaccaaaatctataccatcctggaagcagtgtagtgagtcttaatgtagttctgtagatcctctctggtgatcgatttgacgttctgagcaggtcccaaaatagttcttccaaggggtgtgtattggaatgcagtggcatgtaaatggtcaagaaccacttcatcggtttgtccctccacctacgaccaaaccaattatcaaaaaactaaagcttaatgtgtattctatctttaactgattaaagaaacaaataactctaaccaacacgtagagcagagtaccaagcgctctagtatctcccttcatgcacatttcccaacaacaatacgaccaacatatgactaagccaataaaaccaaaacatgcgagagataatccaaaaacagaacaaagttttcatttttagagcaatggtttatataaacacaataacatctctctatagaacatgtgcttatgccaatacaaccttaaaaaaagggaagataacttaagaacatactaaagttttcatttttaggcaggcacacgggaaactgaaactaagggtattgatctaaaaaaacacaaactacggtccatagtaccacctcactaaaaaaaaacgaaagataaatcgaggacagaacaaaaagtttagttttttaagtacagagataacaaatacatacctcttgcatttccctgaggatgacatctcgttcgcggttaattctctgttcctcgaacttagaattctgtaggatatcagccaagacatccaaagcctggttcacattggaatccaaaaccttagcataataagtggtctgttccctcgatgtatacgcgttcaggtgaccaccaatatcttcgatctcttcctccaacgctctcactgtacgcctatccgtgcctttgaatatcatatgctccaaaaaatgagccgttccgttggtctcatcggactcaaaccgagatccagcgtcgatccagactccaacggtggcggtcttagccgagagatttgactcagtagcgactcgtagaccattgggcaaggtagtgacacgagtctccggagctgacaagatgtgattgtgggaagcgaggatcggatgtggagatgcgtatttaaggaacctcttatcaggattctcgagcttcttgatcttattttttataatctcagccgcgtggtcgtatggcataagatgcggcggcggtggagatagagccgtcggagatgcggaagccggcaccgaatcgatagctgaaaacgaagaggaagatcgtgtggcttgagtgaggaataaacgcctctgagatcggcgagctagggacagtagattcttcatcgccatggctgatgatggcttctcttcgctctctcaatctctctagggtttgattaaaaagccaaaaatggcagagacgacttgagatgcgaactaatagccagtggttaagcgattataaaacgacgtcatttaatgttactaattaagaacggtgtcgtttaggacataatactagtcaactgatataataaggccgtagtaggcgcattatcgtatcaaagaacattattcatactggttagatagtaaggccgtatgaagaattaggcccattagtgtgggctgagaacgggttggattttttgacccggatatggggagaaaaccctaatcgaaatatcgtggccgtatatataagttttgttattggagaataaaaaccctagtctttgcggagagagattcagctgcgttgggcaaaatcccagacgaagatcagtgattagtcttttgataacttgagcc

SEQ ID NO: 14760 - DNA, 3000 bp, Unknown
  misc_feature (1)..( 3000): cDNA_ID_2730847_gDNA_ID_2684224_Annot_ID_137521 3000 nt of promoter + ATG
caattgtgttgctgtgaagctttcttcacagaatagaagagaagagaggagaataatatttgcataaatatctacaagggcagcattttaatgaggtacagtacatacgtctcattctgattgcatcaacttaagtttcaacagcggtggcattttcctaatacttcctctcttcttcttttcgcagcagctacccacacttgtctacatgcttcttcttatctctgatgatgaaaaatgaaaacggaattccaaagatgcaacaggtggcataagcataacgctgggccatatttgacgttgagatcatcaaccaactacgagttgggaaagttttggaaatctatatgtgtatattgtgggaattcaatagtgtaagaaggaaatctatgaacataattgtttatggctcagtaaaaagcccatttagatgtcctatgggaatttaatagtgtaagaaggaaatctatgaacataattgtttatggcccagtaaaaagcccatttagatgtcctatatccttccgggcccaattgtcttgttcatcatcttcgtctcgccgcccacttgcgattaaccaatccacctttcgatcggaaaatccttctgtttgcgaatctattgggtatatatctctccttgatgatttgatttgattctattgcattgagattgatatcttgttgcaggggaactctggttccatgtgttaggtattttcctttcgtcgacctgattcatcttgtgcatgtcgattctgaataatgaacgaagaaggctgcgtcccgcacaactctggttagtctgtgtacctaatagtaattcgtaaccctccacagagcttactcatccgccgcttttgtattctctttgttgtagatgttgttaaacaaaagtctatagatcaaagagcccctctttccggggaacctaaatgtgttatctgcagtcgttatggtgagtacatatgtgacgagaccaatgatgacgtctgcagcctcgagtgtaagcaagcactcctgagaagggttgacagcgctagagtttttcctgccacagatgagtgcttctatgttagagacccaggatcttcttcccacgatgctcaactacttagaagaaagcttgatattcatgtccaaggacaaggatcagcagtccctccacctgtcttgactttcacttcatgtggacttcctcctaagcttcttctcaacttagaaacggctggctatgactttcctactcctatccagatgcaagcaattccagctgctttaaccggcaaaagtctgctcgcctcagccgacaccggctctgggaaaacagcttcttttcttgttcctattatttctcgttgcacaacgtatcactctgagcatccctcagaccagaggaggaaccccttggctatggttttggctccaacgagagagctctgtgtccaagttgaagatcaggcaaaaatgctcggaaagggactgccatttaagactgcactcgttgtaggtggtgatcccatgtctggacaactctaccgcattcagcaaggtgttgaattgatcattggtaccccaggccgggtggtggaccttctatcaaagcacaccattgaactagataacatcatgacgtttgtgctggatgaagttgactgcatgcttcagagaggcttcagagatcaggtgatgcagatatttcaggccttgtcacaaccacaggtcttgctgttctctgcgacgatctcaagagaggtggagaaggtgggagggtctctagccaaggaaatcattttggtatccataggtaatcccaacaagcctaacaaggctgtcaaccaattggccatctgggtagatgcaaagcaaaagaaacagaagctgtttgatatactcagaagtcaaaaccatttcaagccccccgctgttgtttatgtgagttcgagagttggagcagatctcctggctaatgccataactgttgtcacgggggtaaaagctctatcgatccatggggagaagccaatgaaggagaggagagacgtaatgggatcgtttttgggtggagaggtgccagttcttgtatcaacgggagttctaggccgaggagttgacctattggtggtaaggcaggtgatagtgtttgacatgcctagtaccatcaaggagtacatacatgtaattggcagggcctctaggatgggagagaagggcactgccattgtgtttgtgaatgaggacgacaggaacctattccctgatttagttgccgctttaaaaagtagtggagcagccatacctaaggaacttatcaatttgacatccagggaaatgcacaacaagaagagaagggttgggtactgagatgtatgacctggatccgaatgttgttgtaaattaagaaagaaaggaagacttgagagcattgacgaatagaaaaaattaagggtttaactctgcaaagaaagcataatgacttgtgatttgtcgaacgtttttggataaacataaagttacttctcttccgattaaaaagtggaatgtgccaataaaaaagaagggagttttgacttacgggtgggacaaaagaacgcggttccaactgccattgtctttaattaagtggcgaaaaaagccgaacattggaccaacctttgaagccgtcaaagaaaagatcgtatctcttcctgtctccttggccccgaaaggtttcaacttttctgctctttagaatccttaattctttccatctgttttagatccgatcgtccgatgattggcgcattcccagatccaatcgattcatttatttcgtccccttgttatgtacatatacactttgctttccgtgatattgtctggatatattaatcaatttttcctcatgaagaactcaaatattgtgttatgttcataactcaaatcattgaacaattcaattcatttgtgtcccatttgcacctcttgaagcaattagtaaggaacgagcttttaaacatg

SEQ ID NO: 14761 - DNA, 3000 bp, Unknown
  misc_feature (1)..( 3000): cDNA_ID_2730839_gDNA_ID_2684224_Annot_ID_137523 3000 nt of promoter + ATG
tgtaactctgtctaacgaatgcaggtggtcgtagactacaatgaccagataaaggttccgttggtgaaagaggtgctaaaaagagtgacagcggaaggcccggaggtgaggtaatgtgaatagaatttagtagagaatataaattgtagaactggatgagggtgggtgatgacattttgacatggttggtgatctaaaggggaagcctggaaggagaagaggggaaccaagacttccacatgccaggagtgataccaaagtgtccagggagatactattattactttgggaaggagataaagacgggagcagaagagttgagagacagagacaaggcaaaggaggtgtacgcagacgtgaagaaggaggtcgagagatgcataaagtttgtgaagcagagaagggaggaggatccttacagacctctcttgccccgtctcaaatatcacctgcagcacggcctcctctcccaagtccccactttccacttttgaatacatttacataatttgctgatggtgctttgatacctcataagtcataacccgtctgcaaacagatatattccataacatttgggctttcacctcatgaatcatgatagcagcacccacattgtcaaattttcccgatacaaaacactatcacattttgggaaactagagatcctaactaaaagagatagttttagtgttgtatcaactcgggaatgagcttgagaagaaaggagagctctctgtcagagaagttaggctttggcttagtaccatcagcatctctgttggatggcttcatcatctccctcaccgcctctgttatctcctccacatgatcaactatcactccctctatccccatcaaatgctgcatgtaaaccgcctcggctacattgtttagctttccgtatgtcatcagagagagcttggattcttttatcttgttgacaagagcggggttgcggaatactcccttcacctccgagacaatcccttggaggcctccttctaaacatactttgattgcttcctcaagcgaattccttctcgtgtcgtggtacatctcagttcctccgttggtcaagaagaatacctgtaattgaatttggatcataaattaagttgatggattaaagtggaaagagtgtacgtagcttttgggattccatcaacttacggggtaggtggtctgcaacttcctgacaagaagggctgcatcaggatggaagctggagaagatgatagttctgtcgtttccgatatcagacacgacctgcaagattgggaggagaagacgggagaggtgatcggaggaatagaagacgttgtcgtcaagcttgagttcgatgttgaaaccgaggtttggattctctactttctcaaaagcctcttggagagtacagaaagagtcgtcggttgcgacgctccacttatggatcttcccttcctttgactttctcagcaaaggctttcctgtcttgcctgtatccctctgtggcccgtaggacatgaactccgacaagcaaacctccgtgaccctcttctcgtacaccactccctgttcctcggagtagatgaagtcgtcgtggaatatgattgggcagccatctctggtgacctgcgcgatcaattaaaaaaataaagagatcagatcagatcttttttttttacatttcattaacagtttttttttttttgcgcaaaataagaaaatgtcaacgaattaggcaccccacgtggtattgccggcggtcacgtggctgaaccaaattgaaaaaaaaaaaagaagccgatcgaaactcgaatgcggcgaaccgagagcgaagagaggattgaaagaaataagtaaatacctgaacatcgaattcgataaagtcgagagggaattttgaagcggcattaaaggagaggatggagttctccttgagagcagagaaccttagatccggcgactgcgacatgttcatgccgtgtcctctatggccaaccaccacaaacttgttattcgctttgcgagaggagcaaatgagcgacgggttctcagggaagtggtcgaggcttggcacttccgagacatgaatggcttttagagacatatttctatttttagaaagaaaaaagggctcgtctttctttctttctttccttcctgtgagattgatgttgtgaggagagggatatgggtttgggggctttgcttaaaaaagaagaagaagaagaagaataaagaaggagaagatgatgggatcttggaatattctttggatcgccacgtcatcattcctaataacagtcaaaatcgaaattatcccttttggatattccctcccctctctttttcctggttgtctccctctctcttgggctcctggtgggccttagctctctctagatggaaatcgaatagagttagccatcaatgttgattgattcacaccttcgttctaatctttgttacttgtggattggttatctattataaatgcttccattaaatttccgaatattccaaagcatatacaatcttactaaactcctcctattcgacagacacatcttctctaccttgataagctttacagctcctactacatattatcacgccctttgattaaatgggccttgtactttttaagataagatatagtgtctgtatattagtgacaagatctatgatgggcttttaggagagcccataatgggcctgacgacgagccaacataggtggggccaacccgaggacgggaaaacgtgactggtgagtattattattagaagactgtcagtttcacttcacttctcgaggaaaattgctaatcggagaaacaagtgagtggaggagagagacagatataaaggttcccgcgttgagagagtatttgctaattaattaaggtggatatttgatgctaggagaggagagtgagagataagatgggtttcgtctgaagagctccaacttgattcgctcaattgatctcttttgtatcgacaacctgcgatg

SEQ ID NO: 14762 - DNA, 3000 bp, Unknown
  misc_feature (1)..( 3000): cDNA_ID_2730835_gDNA_ID_2684224_Annot_ID_137524 3000 nt of promoter + ATG
gcaagagtaaggatcatcaggatccagttgatctccgggatatagatctgtccatatatatgtttcgaagtatggactactttgatgcgtgggaagcaccctagggcatggcattgtttgattattgagaacgtagtggttatcacagcctgactgccaacaatggctgcaagtgtggcaatgacaaagacaggccagaaaacaggatctgcataaaggaccaagatcatataagattgtcattatcacaaggaaaaaagtgaatattaaaccctggtgtcaaagtaaatgaacctgggactgaatcgtaaaaactgttaggaatagacccgaggttctttgacaggaaagctgcctggcccatgtattgtaccaccagacaggggtacacgacaacggcgaaagcaacctgcacaaaaaaaaaaaaaaaagtagagtgtaagaaacaaagctgcgcaaccagcatggacttatgttgaaggataactaccaaggctgtagagaagtcacagataaaataactgatgtacaccactactagacaggaaacctctgcttactctgattgagaccgaggtgaaatggccaagatttgcaaacatggcttcagtacctgatgagacagcgataatcactttagcaacataagaccattcactaaaggattcaaaacaagcagaaaataaataatattatggttatgccttgatccagaaccagaactacctgttacagaaagaagaacccctccaagagatatccatccatcttgaccagtcactctgaagaatttgatgatatacagtggggaaactgcatgtattatctttggattccaacggatgatgttgtataaaccgatgaagaatattgaaataagccagatgatcacaattggtgcaaacatgaaagccaccctgtgagtaccacaatgttgcaaagcaaacagtccgaccaatatgacacaggcaagcaccagtagttcgcctgcagtggattaagagacaaaacatcaaaacaaaagaaagtcacaagatgtaatcaaacaacaaacaaaacttgatacaggcacatagtggaagcaacacgtattagataccatcagtcacattcttctctgtagcttgcaagcctgacaaggacgacagaactgaaaggaagcaggagttagtcagtcagatattgaccacaaacaaacaaaaaagatgctgatgaatagaaagtaaggatggtcacgaagaaggtgggtggttacaactacaagtaagagacgatgaaattaactccaactctgaatataatatgtaggaggcaggcatgctttacctgataaagctggggtcagaaccccgtctccaatgaccatagcagctccaaaaagtacaacaagcagcaaagcggtcctcagccttttgtgcttttcaagaaatgttctgaagggggatgaagttacagtatccgtggaaggaccaaacttgtaagctgagagctcctcatcagcagcttgctggttaggaagtaagctaagcttagcatgcctacaaagcagggaatagagagcaaatgttccgcctagagaggcaaaaacagaaaaagattcaatcatccggggagatataagttgaagagaggaggatctcgtttgctactgcaccttctccattgtcatcggcactcagtaatacaagaaggtatttgagaaggggaatgagcgtgagggtccagaaaatcaaagagaaagcaccaaatacggcatcctcgttgtgatgcttgtgcaactttccaataaatgtgctagggaagacataaagaggagaagtactgagatcaccgtagactacaccaaagctctggtaggccaaaatcaagttactagagagattcatccacgagagctgaaggaaacggatatcaacaattcagtaagtctgaaaacagagcaatagaagaatcccagcacaagaaagcaagggtctttatttagatagaaatgaaagcaaaagccaaacatgctatgaacagttcaagtgggcataaaggagctaacttgagaaggattccgacggggagagactccagattccgccggcgccatcgcaggttgtcgatacaaaagagatcaattgagcgaatcaagttggagctcttcagacgaaacccatcttatctctcactctcctctcctagcatcaaatatccaccttaattaattagcaaatactctctcaacgcgggaacctttatatctgtctctctcctccactcacttgtttctccgattagcaattttcctcgagaagtgaagtgaaactgacagtcttctaataataatactcaccagtcacgttttcccgtcctcgggttggccccacctatgttggctcgtcgtcaggcccattatgggctctcctaaaagcccatcatagatcttgtcactaatatacagacactatatcttatcttaaaaagtacaaggcccatttaatcaaagggcgtgataatatgtagtaggagctgtaaagcttatcaaggtagagaagatgtgtctgtcgaataggaggagtttagtaagattgtatatgctttggaatattcggaaatttaatggaagcatttataatagataaccaatccacaagtaacaaagattagaacgaaggtgtgaatcaatcaacattgatggctaactctattcgatttccatctagagagagctaaggcccaccaggagcccaagagagagggagacaaccaggaaaaagagaggggagggaatatccaaaagggataatttcgattttgactgttattaggaatgatgacgtggcgatccaaagaatattccaagatcccatcatcttctccttctttattcttcttcttcttcttcttttttaagcaaagcccccaaacccatatccctctcctcacaacatcaatctcacaggaaggaaagaaagaaagaaagacgagcccttttttctttctaaaaatagaaat

SEQ ID NO: 14763 - DNA, 3000 bp, Unknown
  misc_feature (1)..( 3000): cDNA_ID_2730831_gDNA_ID_2684224_Annot_ID_137525 3000 nt of promoter + ATG
atctttccaaacctgcatgcaccacatgacagtagagtatatatgttttgcaaaatcacatcttcattgatagacaataacccccggatataatggtacctggatctcccgcaaacctaaagccttcccgatcgttgttgcagtcaaatcgctacctcctctaccaagcgtagttacagcacaagatctccatccctgcacaaactcaaagtgaggccttttgttttcgaaattctaaaaatgtcacaacaaggcgtgcacgagactcgtaatcaatcgttattttatatacctttccaaggaagcctgtgacaacggggagtgcattttccttgctccagtcaccaagtaactttttcgaaaccgccgggtatgttgcctcaagaatatcagcattagtgaagtcatctgtggtgataatcccgatctcaaatgcatcatactgcaaaaacaaaactcatcgtcaagtcacgaaacaatctataaggtgatcaatctaggtaacatatatatacatacctgtcgtgctttgtgcccaattttgttcaggtacgcagcaaatagcctagtggacatgcattctccaaatgaaaccaagtagtctcttgagcgtaaagttaattccttcatcattgcgacgcctttaagaagctgttccagtccttctagatgttctgcaataactgctgtttccactccaagctcatgagcagtcctggacatggtagaatttgattttcttgaatcatgagaatatagcaaatttgagttggaaaactttacgtatgaaagattcaataaatctgtctgttttttcttaaaaaagaaaccttatatggagttcctttatatagctcaactcttcgatagtgtcgacgttggtgacaccgcagcaaacagccttctccccagcctaatgaaagccaccggctcaaagttttataacggaagaaacaaggtaaaaggtgcaacagacttcacttttgcttaccatcaaaagcttattggtggtctttgccattgctgatagcacaacaacaggcttctcatctgggaagctgagtatgagtttggcaacttgtatcatcctttctgctgatgccactgatgagccaccgaatttcattacacaggtcaattttttctcagttttgtttaacttgaaagtctctgaggcttttctctctagcagctccactcttcccgcttcacaagtaactctcagagcgatgttcttacaagaacgatctacgtttctagagaatacacgagcagaggacacgagtgctgagaagttgagcccctttgagctaaactcaatcctttttgagtttaaggcaagttctggtgttttaactccgtagaactgcattgaagccgccattactcaataagctctgaagaagaagattgtgatagaactcagagagactggctggctcttgtgatttcgacaaataatagagtatgcttgcttagtgcgcacacctgaaacgaagatccgtagaagcaaaacagagtcaaggctaaatgcatgaataaataaaaaaatggatcttgcagagaggagattgagaattggcttatataccagttgacagggctcacgattgcttgatacaaagccggacaagctccgagctatgtatcaagacgagtatcgtagacggtcaagatcccaagctaaaaagattagacggctgcggagtgaactcggtctcggatgttaaatgtttataggcaaaggaaagaatcgaacgatcattcgacttcagtgttcttttccaaaatatgaatctgcttaataataattcaaactcctggtttagcacatatatactagtcgttttaactaaagttttgtttttttttggttggaaaacgtgacatctacaaattccattagtgaacccttaggaggttgagggggtgttagcaaatggtaaatcgaaaaaacgtggccacctactcatagatatacatattttgtttgattaaattagcaataatatacaaactgcataatacgtggcatcaggtgtattgtcaacaatttccacatttagtgtttccttatgcaattacattcactagaggaataaacaatcgatatcagaaatactcaaatagataatggacgtccaatgtcaatgatgagatctaacaaactttgacggtaaagtcgagagacgaaaaaaaggaaagtagcaaaattttattttatatagtgattattgcatgaattaaatagtgaaggtaataatgattcatggcgatatgtatatagttagtatttaaacagcgcgggaacaacaagaggcagttggtttgtatgaattgagagacaagggctttaatgggtcattagaaaaacgcccatgggccttaatgtcatatgtgggcattatggagaatagtcaagagaattccgaataaggccgaagaagaaagaaagatctctcactcactcagctctttggatccgccatagcaactctctcctcatttctcccggccatggagtctccaaagagctatgtaaatccgttctagcttttattctctcgctaattgccaaacagagatgtactatttctttcctctctaactcctcctgaaatggtgatatttgtttctccgtctacaacaagtttcatttgtttgaagacaaatggagtcactcatgggccaaactaaaagcccattaaaggccgaaatcaattattcttgagcctctactctcttgcctaagtgtatgtatgtggtttagctatataagatagcaactgcttgctgtttgagaaagcttgaaacatcacacattcgcctcgttgaaaatgaaaacagcacgacaaggggggagaggagagaccgttaagtcatgagatcttcgtttcggctggaaaaaggaaaagaaaaagaaagcacaaaaatctttggtttaaattctttctccatggacgaaccaccacaactactactagcttctctttgcctatg

SEQ ID NO: 14764 - DNA, 3000 bp, Unknown
  misc_feature (1)..( 3000): cDNA_ID_1010265_gDNA_ID_2684224_Annot_ID_137526 3000 nt of promoter + ATG
atatttgacaacactggaaagctaacgacctacctacgataaatgagtttgtcacctacagaggttaatgtggatgttatcaccaaatcttgaaaaatgtttgcagctgtttccgtctccggaagtcctctgacccagtgagcaaccatcctttttaaagggccaccttaaaattccaatagagcttttatgcagctaggaaattaaaaaccatgtcttatatcaccaaaactcacatgttaatgcatagtagtagtaaacacttgagcttgaccagagttttgaaagatgcttttaccattgtgtggcgtgattttaaataaaggggaggggccattggcttgtcagagttccaaaatcagcgaaaagataaatcaaagctaacctggaatcaagcttagcacggaaggaaatgcaagattaagttggtctggcaaggctttaaccaggggagcaagatgttgcagcgaagaatgcccaaatgatgtagctgcaaatgcaacaatactctttagatcaaatctagacgacgtgataagactaatgttcaaacacatacaaatgagaaagtcctaggaaataagaaaggatcaacgtcacctgggttagaaagaatcaagacaagatcaatatcagggttacaggctgcaacagcgagtgcaatgcaggcgccgagagattctccaacaagatatatgggtttcccaggtgatcgttgattttcatatttgacagttgtttcaaccatggcgactagatctaaaagcatccaaagtgttagagaatcagataaaaagatctaaaagagttgaaatagaggaaatacctgtgaaagaagagcgattgctcgctggtatgtgcaagcaccagatatcaaacatccttgtaaaaacaaacatcgctcagccgaatcaacaaccaccgctataagaaaaactaaaggatagaaacgtcctttgatcactcactgtccaagtttctggtgctgccttattagcccgagtccatttccgtcgatacctaacgacagtcatttccgaattagagaaagcaattgcacatttctaactaactcaattaatcgggactaaccaggtaggaagagaaggagcggggcaccgtcacatggatccttgcttctttcgaggggagagaaccagcgagatgggccgttgtcttccggtctgatgaaatccttagccgcctcgaggtagttccagaagctcttaacgaatggctgctcgtagtccacaagcctcgagctaaaaacggtgacagaagcggagaatcggcgtgccgggggtagggttactccaagggggtgcttgtgcttctctccgttgaataatccgacggcagagagcgtgtgaaatccggtggccgccataggcaaagagaagctagtagtagttgtggtggttcgtccatggagaaagaatttaaaccaaagatttttgtgctttctttttcttttcctttttccagccgaaacgaagatctcatgacttaacggtctctcctctccccccttgtcgtgctgttttcattttcaacgaggcgaatgtgtgatgtttcaagctttctcaaacagcaagcagttgctatcttatatagctaaaccacatacatacacttaggcaagagagtagaggctcaagaataattgatttcggcctttaatgggcttttagtttggcccatgagtgactccatttgtcttcaaacaaatgaaacttgttgtagacggagaaacaaatatcaccatttcaggaggagttagagaggaaagaaatagtacatctctgtttggcaattagcgagagaataaaagctagaacggatttacatagctctttggagactccatggccgggagaaatgaggagagagttgctatggcggatccaaagagctgagtgagtgagagatctttctttcttcttcggccttattcggaattctcttgactattctccataatgcccacatatgacattaaggcccatgggcgtttttctaatgacccattaaagcccttgtctctcaattcatacaaaccaactgcctcttgttgttcccgcgctgtttaaatactaactatatacatatcgccatgaatcattattaccttcactatttaattcatgcaataatcactatataaaataaaattttgctactttcctttttttcgtctctcgactttaccgtcaaagtttgttagatctcatcattgacattggacgtccattatctatttgagtatttctgatatcgattgtttattcctctagtgaatgtaattgcataaggaaacactaaatgtggaaattgttgacaatacacctgatgccacgtattatgcagtttgtatattattgctaatttaatcaaacaaaatatgtatatctatgagtaggtggccacgttttttcgatttaccatttgctaacaccccctcaacctcctaagggttcactaatggaatttgtagatgtcacgttttccaaccaaaaaaaaacaaaactttagttaaaacgactagtatatatgtgctaaaccaggagtttgaattattattaagcagattcatattttggaaaagaacactgaagtcgaatgatcgttcgattctttcctttgcctataaacatttaacatccgagaccgagttcactccgcagccgtctaatctttttagcttgggatcttgaccgtctacgatactcgtcttgatacatagctcggagcttgtccggctttgtatcaagcaatcgtgagccctgtcaactggtatataagccaattctcaatctcctctctgcaagatccatttttttatttattcatgcatttagccttgactctgttttgcttctacggatcttcgtttcaggtgtgcgcactaagcaagcatactctattatttgtcgaaatcacaagagccagccagtctctctgagttctatcacaatcttcttcttcagagcttattgagta

SEQ ID NO: 14765 - DNA, 3000 bp, Unknown
  misc_feature (1)..( 3000): cDNA_ID_2123597_gDNA_ID_2684224_Annot_ID_137529 3000 nt of promoter + ATG
gtgatatatattgaaaatatggctacattagcggatccatcacagaaaaagagttttgtggaaacaaaaaggtgtggcggctacatcattctgatttatattattatatatgcaactccttcaaattttggttcaatggattcaaatttcaaacatatttcttggtcaagaatcaatatgcatctagatctctgaggtaatcattcttttcttatttgatttacaatttggattagcaaggtttccaagataatatccaatatcacgtgtatttgaggttcacctaccaaacttgattgaattcaataaacaatgagctcgaatgatgttgagattgttgactattttggctctttgctttcttctatacttgtcaaaagtatataatcattgattccatggattattcatccctccatagttattcaaacttgattcatattcactttttacacacaacatagaattataataatactaggcattgatcacatgtaggatttgagacggggtcgcgtaagggactgcgctccatccaccaagacagtggtgcctgtcatgaagcgtgagccatcgctgatcaagtagataacagtggagtagaggtctgtgtccgggttgagccactggccgaggggtgcagcgtccttgaccagcttctgcgctcggtctcttcccacagaagctgtatactcatcatccagatgcagccctctagagatcatgttgacccgtatcttgtgcttcccgagactcatggctgatgcctgaaacccaatcatcaacaaacatattcaagttacgaacgcgatgtgtctaattaggagctaggatgcatacccggacgagctggtgaatagcggcagaagttgaagcgtaggcatcagcgccagggtaaagcgccctctctccgctggcgatagtggccatgaagacaatggagcctcctgatccatggtccttcatccttgtggctacagccttcaagagaaaccatggagcggtgagattgatctttgtgattctgtggaactcatcttgagagacttgaagaatgtcctgcacctttcctgcaagaaagaaagattgttgaataaaggaatgatcaacacacaagagcatcaaaggcagggtagtgaaaaacaagaagcaaattaaaccttggtaggtataagagttgagaaaagcatcgaaatggccggaaagttcccatgccttttggacagcggcatgaaaagcaacttcagagtcagattccatgtcgagtgctataacatcggcagggaaggctccctcaatggaatctctaatcttgtctacaatgctccttagggaaccctcatttcccatcattaccaacctagcaacagtacattgcattttttgaaggttaactatagacaccaaagtcaaccacaacacaaatcggggctagaagaagaaacacaggataggaggaaagaagacaaaatgagagactcacttgcaaccgtgtttggctagatggaaagcgatgtttcgggacacctcgtcgccgttggatgtcatcaacactctcttcgccggattttccattttgccaaagtaactctttataaaacaattcagcagattcaacaagacttaagggagggagggagtgagattgattcgatcgccaattctaaataactataaagagtggctgcaaaagctcttaccggaactgtgtctgtgtgttaccaaaacggcgaaacaaagcaaataattaatgcctaaccacatgatccaccacgttctgttgttaccttctttaatttgtagatagaagaagatggtgattgataacggagatgtatttttttctttaataaaaagcccacttcaaggcccagatccatttctgtactttgtaggttttccaactttcccggcgccggaagcaagcgtaagttatcactgttccccaaccaaattccatcatatcctattatcctactactaatggatccatctccaagattcctaatttcactttgctacaaacttatttcgtgtttttggtttataattaatagccgttgttggttatgaatatgtaagcataaaaggcatttgggagctccagacagacaatgaatcatcaacatcaggtactctgtctttcgtttatgtttctgttccattcttttgaaatatatagaggaggaacttgttattagctagtccattgatcaacacacaaagagtgagaatgaaagcaattcctccaaccaaaaggatgctttcccttattgatttagttggaccaatatataaagagaacaaaggagggtgttggtaggtaacaaaagattctaggtggtgggagggtagtggatttttgaaaaccgtgtgttgacttaatgaaagaggtgtagagtaatgggattgtgagagtgttaaataataaaagactaggatacgaaatcattgtgacatgtcaatttttcaagtgggtggtggaatccgcaacaaaatataaaataagaaaaatgctttgcttgcttgcttgctctactttgccttctttttgcaaccaacatgacgttatgctggaaaggaatcaaattgttacttggtcatgcacctgtgaacgttacggagaggtctacctcaagataacgaatgatctattatactagtaaataccacatcttgcttgagaaggagaatataatcccctttatgatcatcaaattgaccccaaatcttcacccgacttttggtagtattcgaacaattataacagaatctaaaagttgctgtgcccgtgccacgtcatctctaagaatctttagtggcacgtgctcgatcaactaatgaaaacaaggttcggttccggtggcctaccatttttatcctccttcaacttccctctccctctctcttttaggaattttcctcagaaattggaggactcacactcttctgggtttctgctgcagccaaatcaccaaggagatacatactacaaccatg

SEQ ID NO: 14766 - DNA, 3000 bp, Unknown; identical to SEQ ID NO: 6877
  misc_feature (1)..( 3000): cDNA_ID_3040948_gDNA_ID_2684224_Annot_ID_137530 3000 nt of promoter + ATG

SEQ ID NO: 14767 - DNA, 3000 bp, Unknown; identical to SEQ ID NO: 6885
  misc_feature (1)..( 3000): cDNA_ID_2027099_gDNA_ID_2684224_Annot_ID_137531 3000 nt of promoter + ATG

SEQ ID NO: 14768 - DNA, 3000 bp, Unknown
  misc_feature (1)..( 3000): cDNA_ID_2730827_gDNA_ID_2684224_Annot_ID_137536 3000 nt of promoter + ATG
gatgcaataactcggattaaaataaaatgtaaaacgtttttccgtcaaatatgatttaaaaaaaaaaaaaaattgttactaacggctagtttacccccaaaaaaaaatgattttactaacggaggagaagtgtttcgaaaattcgacaatgattaagaagaaagttagatcaaacgaacaggatcacaggaagaaggtacaacgtgaagcaatcaatgaggctaaaataaaatattgagaaatttgctcaaccatatgatttcattaatatataataatgaataacagttctatcatataaataaataatttataatccaccacatgacaacagatgggttttcccattttatttaactataaacagtattttgctctcacagatccacaaggacaagcatattcaaggatgttttagttcttaaagaaaagataaagagagaccagacgcatagtggtaacttggtctacaagttagagtggccaagccggagaaggacacggtgccacgaagtgttgagaacccctcttaggttccacaccgactccacattttccggttgaacattcgccgccgaatcaacctgcacatttccacagttttctattaactcttgtcagaagccatttatattagctgagcaagatgttgaggctttaccgctttggcgatgacctctgtagtctgtgaaacatcaatggtggcttcaaacaacacccatgcccatttgtcactggagctgtgttctgagatgtactgctttcctggttcctgcgttctagaagcttccacccagtttttgcctccatccagggatatgtccactctttctatcccgcgtccacctcctgaaaccgcatatcctttgatacttacctgcaattttttttttttaattgaattagctcttgctttcctacattggtcagatcagattaggtagtgaattccgcgttctaacctttccaggcttcaccatttgcacatcctccacagagcagattgcactctgttaacaatgataaacgagtatggggtcaagactcaagacaaactaatgttcatttacaaattctactatctgatcaaattcataaggcaactggtccaaacaagtaaaattttcagtataccagtagaaaatatgatcagtcgattcatcaccatcatcaactgttttcatggaagaatacagaattacgaacttcgcaagaaaattggaaaatcttaattttgtagcgcatataaacgaaaaacgtcattacaaagtcaagtattctgtaagaaagaagggaaagttgtatttacctgaacagggaaatccatttgcggtctcctagaggaccagttgatattatcccaattgacagagggtggaaacattttgtaatctttttgcatgaagaatccctacatcacattttgatccaagtcccttacaatgttagaacagtttctgattgctaaaaagagggtaaaagccggacactttagttgagacctggctttcttcagcgatgacattgatggaatcaagccatttgaccgaacgagcaccaatcacaccagggacaaccacccttaacggaaatccgtgatccctgttcagggtcttcacagaagaaacacgttttccaacaaataagcacatttccgagtactcactcatactcacatgtcaaacaagtgatgatttaaacacaagtgagactaatttaggagagcgatatcaaacctctccattcatctcataagcgagtagaacatccgcttcaggatttgtggcttgacttagagtgattgacgccttataagggcccccattttcctcctagagatatagaaagagcatagacttttcatgggaattcataacaaagcataaaaaggtggaatttattaatatatatctaccttacagcgatcaacactaacgaactcaacatgtctggctcctaaattggtagaagcagtcagctttggtatccccacaagctcaagaacatcggccagtttcgccccaccccagacagctgaaaggcaaattctttcaagacaagtatgtattgaaagcatgggaatgggagaaagagagacgaaccgttgccaatagcagaaacatcccatccaacacctctaacattcctaactttgctcatggcagtccttctgttaccggcacactgcattgaaacaaaagtgatgttaaattaaatgtggagaaaaactaaaggtagaagatttactcaaaggaagaatgaacctgaagagtagcagtaacattgtactttgggagggacctgcaattttgaggaggaaacaagagtggtgcttgatggagagatacaagatcaaagttggagaatgtaaagagaggcaaataaataaaggtacctgatgtctttgataaagagctttctcgggttctggatcaatccagtaagggtgacggagtagctggtttggcaaaagaaatagcagaaatgagcggaggaggcaaaattgaagatgaatgagagtgagagagagacctttgaaggtgatcaacaatggggatgggaccatgatttcgcttgtagaaaaggtcgacgggagtgacataagatgagactaaggccgagcggggaggctcggcgttgaaaggttcctgcggatcacccaaatttagatgccatgaagaaaaaggctatatcagactagtgactgattcgattggaaagagagaagaagaagaagaagaagcttaccttggcgttgaccttgagagaagggtgacgaggtggttcctgcgagtattccgaaggacctctaattccaggcattcttctttcgaggaggagataccgaggaaatgacgattgagtgctttcctttgtgacgtctctctcttcttcaaaggaaaactatggaacggcgtcgttttaggtttgcgtctcttaatttgtggataacagacagagcccaaattgagcccaaacaaaaacaaattgtgagagatg

SEQ ID NO: 14769 - DNA, 3000 bp, Unknown
  misc_feature (1)..( 3000): cDNA_ID_3040952_gDNA_ID_2684224_Annot_ID_191901 3000 nt of promoter + ATG
ttccgtcaaatatgatttaaaaaaaaaaaaaaattgttactaacggctagtttacccccaaaaaaaaatgattttactaacggaggagaagtgtttcgaaaattcgacaatgattaagaagaaagttagatcaaacgaacaggatcacaggaagaaggtacaacgtgaagcaatcaatgaggctaaaataaaatattgagaaatttgctcaaccatatgatttcattaatatataataatgaataacagttctatcatataaataaataatttataatccaccacatgacaacagatgggttttcccattttatttaactataaacagtattttgctctcacagatccacaaggacaagcatattcaaggatgttttagttcttaaagaaaagataaagagagaccagacgcatagtggtaacttggtctacaagttagagtggccaagccggagaaggacacggtgccacgaagtgttgagaacccctcttaggttccacaccgactccacattttccggttgaacattcgccgccgaatcaacctgcacatttccacagttttctattaactcttgtcagaagccatttatattagctgagcaagatgttgaggctttaccgctttggcgatgacctctgtagtctgtgaaacatcaatggtggcttcaaacaacacccatgcccatttgtcactggagctgtgttctgagatgtactgctttcctggttcctgcgttctagaagcttccacccagtttttgcctccatccagggatatgtccactctttctatcccgcgtccacctcctgaaaccgcatatcctttgatacttacctgcaattttttttttttaattgaattagctcttgctttcctacattggtcagatcagattaggtagtgaattccgcgttctaacctttccaggcttcaccatttgcacatcctccacagagcagattgcactctgttaacaatgataaacgagtatggggtcaagactcaagacaaactaatgttcatttacaaattctactatctgatcaaattcataaggcaactggtccaaacaagtaaaattttcagtataccagtagaaaatatgatcagtcgattcatcaccatcatcaactgttttcatggaagaatacagaattacgaacttcgcaagaaaattggaaaatcttaattttgtagcgcatataaacgaaaaacgtcattacaaagtcaagtattctgtaagaaagaagggaaagttgtatttacctgaacagggaaatccatttgcggtctcctagaggaccagttgatattatcccaattgacagagggtggaaacattttgtaatctttttgcatgaagaatccctacatcacattttgatccaagtcccttacaatgttagaacagtttctgattgctaaaaagagggtaaaagccggacactttagttgagacctggctttcttcagcgatgacattgatggaatcaagccatttgaccgaacgagcaccaatcacaccagggacaaccacccttaacggaaatccgtgatccctgttcagggtcttcacagaagaaacacgttttccaacaaataagcacatttccgagtactcactcatactcacatgtcaaacaagtgatgatttaaacacaagtgagactaatttaggagagcgatatcaaacctctccattcatctcataagcgagtagaacatccgcttcaggatttgtggcttgacttagagtgattgacgccttataagggcccccattttcctcctagagatatagaaagagcatagacttttcatgggaattcataacaaagcataaaaaggtggaatttattaatatatatctaccttacagcgatcaacactaacgaactcaacatgtctggctcctaaattggtagaagcagtcagctttggtatccccacaagctcaagaacatcggccagtttcgccccaccccagacagctgaaaggcaaattctttcaagacaagtatgtattgaaagcatgggaatgggagaaagagagacgaaccgttgccaatagcagaaacatcccatccaacacctctaacattcctaactttgctcatggcagtccttctgttaccggcacactgcattgaaacaaaagtgatgttaaattaaatgtggagaaaaactaaaggtagaagatttactcaaaggaagaatgaacctgaagagtagcagtaacattgtactttgggagggacctgcaattttgaggaggaaacaagagtggtgcttgatggagagatacaagatcaaagttggagaatgtaaagagaggcaaataaataaaggtacctgatgtctttgataaagagctttctcgggttctggatcaatccagtaagggtgacggagtagctggtttggcaaaagaaatagcagaaatgagcggaggaggcaaaattgaagatgaatgagagtgagagagagacctttgaaggtgatcaacaatggggatgggaccatgatttcgcttgtagaaaaggtcgacgggagtgacataagatgagactaaggccgagcggggaggctcggcgttgaaaggttcctgcggatcacccaaatttagatgccatgaagaaaaaggctatatcagactagtgactgattcgattggaaagagagaagaagaagaagaagaagcttaccttggcgttgaccttgagagaagggtgacgaggtggttcctgcgagtattccgaaggacctctaattccaggcattcttctttcgaggaggagataccgaggaaatgacgattgagtgctttcctttgtgacgtctctctcttcttcaaaggaaaactatggaacggcgtcgttttaggtttgcgtctcttaatttgtggataacagacagagcccaaattgagcccaaacaaaaacaaattgtgagagatggcggtggccaaacttcacggcggaggtatggcggcgatg

SEQ ID NO: 14770 - DNA, 3000 bp, Unknown; identical to SEQ ID NO: 6885
  misc_feature (1)..( 3000): cDNA_ID_2027099_gDNA_ID_2684224_Annot_ID_191896 3000 nt of promoter + ATG

SEQ ID NO: 14771 - DNA, 3000 bp, Unknown; identical to SEQ ID NO: 6877
  misc_feature (1)..( 3000): cDNA_ID_3040948_gDNA_ID_2684224_Annot_ID_191895 3000 nt of promoter + ATG

SEQ ID NO: 14772 - DNA, 3000 bp, Unknown; identical to SEQ ID NO: 6887
  misc_feature (1)..( 3000): cDNA_ID_2123597_gDNA_ID_2684224_Annot_ID_191894 3000 nt of promoter + ATG

SEQ ID NO: 14773 - DNA, 3000 bp, Unknown; identical to SEQ ID NO: 14764
  misc_feature (1)..( 3000): cDNA_ID_1010265_gDNA_ID_2684224_Annot_ID_191890 3000 nt of promoter + ATG

SEQ ID NO: 14774 - DNA, 3000 bp, Unknown; identical to SEQ ID NO: 14762
  misc_feature (1)..( 3000): cDNA_ID_2730835_gDNA_ID_2684224_Annot_ID_191888 3000 nt of promoter + ATG

SEQ ID NO: 14775 - DNA, 3000 bp, Unknown; identical to SEQ ID NO: 14761
  misc_feature (1)..( 3000): cDNA_ID_3018975_gDNA_ID_2684224_Annot_ID_191887 3000 nt of promoter + ATG

SEQ ID NO: 14776 - DNA, 3000 bp, Unknown
  misc_feature (1)..( 3000): cDNA_ID_2995189_gDNA_ID_2684224_Annot_ID_191886 3000 nt of promoter + ATG
gaggagctctcagcttacaagtttggtccttccacggatactgtaacttcatcccccttcagaacatttcttgaaaagcacaaaaggctgaggaccgctttgctgcttgttgtactttttggagctgctatggtcattggagacggggttctgaccccagctttatcaggtaaagcatgcctgcctcctacatattatattcagagttggagttaatttcatcgtctcttacttgtagttgtaaccacccaccttcttcgtgaccatccttactttctattcatcagcatcttttttgtttgtttgtggtcaatatctgactgactaactcctgcttcctttcagttctgtcgtccttgtcaggcttgcaagctacagagaagaatgtgactgatggtatctaatacgtgttgcttccactatgtgcctgtatcaagttttgtttgttgtttgattacatcttgtgactttcttttgttttgatgttttgtctcttaatccactgcaggcgaactactggtgcttgcctgtgtcatattggtcggactgtttgctttgcaacattgtggtactcacagggtggctttcatgtttgcaccaattgtgatcatctggcttatttcaatattcttcatcggtttatacaacatcatccgttggaatccaaagataatacatgcagtttccccactgtatatcatcaaattcttcagagtgactggtcaagatggatggatatctcttggaggggttcttctttctgtaacaggtagttctggttctggatcaaggcataaccataatattatttattttctgcttgttttgaatcctttagtgaatggtcttatgttgctaaagtgattatcgctgtctcatcaggtactgaagccatgtttgcaaatcttggccatttcacctcggtctcaatcagagtaagcagaggtttcctgtctagtagtggtgtacatcagttattttatctgtgacttctctacagccttggtagttatccttcaacataagtccatgctggttgcgcagctttgtttcttacactctacttttttttttttttttgtgcaggttgctttcgccgttgtcgtgtacccctgtctggtggtacaatacatgggccaggcagctttcctgtcaaagaacctcgggtctattcctaacagtttttacgattcagtcccaggttcatttactttgacaccagggtttaatattcacttttttccttgtgataatgacaatcttatatgatcttggtcctttatgcagatcctgttttctggcctgtctttgtcattgccacacttgcagccattgttggcagtcaggctgtgataaccactacgttctcaataatcaaacaatgccatgccctagggtgcttcccacgcatcaaagtagtccatacttcgaaacatatatatggacagatctatatcccggagatcaactggatcctgatgatccttactcttgcaatggctataggctttcgagacacaactttgattggaaatgcctacggtaaactttatatcattgcaaactatatttccctctccaggatctgattgtttgatggtggttctctcattactcacaggaatcgcatgcatggtagtaatgttcatcacaacgtttttcatggctcttgtcatagtcgtggtttggcaaaagagttgttttctggcggctttgtttcttggaactctatggataattgaaggtgtctacctctcagcagcgctaatgaaagttaccgagggaggttgggtgccttttgtgctcacgttcatatttatgatcgccatgtatgtgtggcactatggcacccgtaggaaatacagctttgatcttcataacaaagtttcattgaagtggttgctgggattaggacctagtctaggtattgtccgcgttcctggaataggactcgtttactcagaacttgcaactggagttcctgcaattttctctcactttgtgaccaacctgcctgcattccataaagtcgtggtgtttgtttgtgtgaaatcagttccagtgcctcatgtttcccctgaggaacgcttcctcattggtcgagtttgcccgaagccttatcgtatgtacaggtgcatagtgaggtacggttacaaggacattcaacgggaagacggggactttgagaatcagcttgtacagagcatagcggagttcatccagatggaagcaagcgacctccaatcctcggcttctgagtctcaatctaatgatgggagaatggccgttctaagcagccagaagagtctctctaactcaatcctgacggtttcagaggtagaggagattgattatgctgaccccacgatacaaagcagtaaatccatgactctgcagagtttgcgttcagtgtacgaggatgagtatccgcaagggcaagtgaggaggaggcatgtgaggttccagttaacggcgtcaagtggtgggatggggtcctcagtgagggaagagctaatggatctgatacgggcgaaagaggcgggtgttgcatatataatgggccactcgtatgtgaaatcgaggaaatcctcgtcttggttgaagaagatggcgatagacatcggttattctttcttgaggaagaactgcagagggccagccgtagcactcaacattcctcacatcagcctcattgaagttggcatgatttactatgtttaagccactaatatgagtagcattcataattcatggggggaataatgggaacaatctattcaagtttcaagtgtccccaaggcaaaaattgtatacttaaatattcttctggttgggaatgtagtctgcgaaacattatatcttaatcctgaaatgtgtgcttggaagtgtaaaatgtaaaccactcttaataagctaaagacttcactctctctctctctctcttcattatcccctacacttctctttctaaaacctctggggttcttgttaaagatgatg

SEQ ID NO: 14777 - DNA, 3000 bp, Unknown; identical to SEQ ID NO: 14760
  misc_feature (1)..( 3000): cDNA_ID_2730847_gDNA_ID_2684224_Annot_ID_191885 3000 nt of promoter + ATG

SEQ ID NO: 14778 - DNA, 3000 bp, Unknown; identical to SEQ ID NO: 14759
  misc_feature (1)..( 3000): cDNA_ID_1012003_gDNA_ID_2684224_Annot_ID_191884 3000 nt of promoter + ATG

SEQ ID NO: 14779 - DNA, 3000 bp, Unknown; identical to SEQ ID NO: 14758
  misc_feature (1)..( 3000): cDNA_ID_2724601_gDNA_ID_2684224_Annot_ID_191883 3000 nt of promoter + ATG

SEQ ID NO: 14780 - DNA, 3000 bp, Unknown; identical to SEQ ID NO: 14757
  misc_feature (1)..( 3000): cDNA_ID_1397255_gDNA_ID_2684224_Annot_ID_191880 3000 nt of promoter + ATG

SEQ ID NO: 14781 - DNA, 3000 bp, Unknown; identical to SEQ ID NO: 9127
  misc_feature (1)..( 3000): cDNA_ID_2180622_gDNA_ID_2684224_Annot_ID_191875 3000 nt of promoter + ATG

SEQ ID NO: 14782 - DNA, 2997 bp, Unknown
  misc_feature (1)..( 2997): cDNA_ID_1398573_gDNA_ID_2684224_Annot_ID_191873 3000 nt of promoter + ATG
gaattcttctgctgcagtttttcgaactgatataacccatcaagagagagttggtagcttagttttttgtgttctctcttgtctgtcctcttcctgtacaacgctttaatattagatggttaactagatccccttgaaaatggctaccacttctttgttctctatctccatgttgggaagtaaaagatattcagtataaacttttgaaatagtgtgtagcatcaagttaagaaacattactagcaaaaaataatgtataggaaaagtctccgcatatgtttcagggacaaaaaaaagattcaaagatcaaaaaaaccctgcagccaaatacacagagaaaaagctttaaggaagacaaaagattcgttatagaattgagcttctctggggatgaaacggtttttcttgatagctttttcaacgaacactcaagccttgaatagctgcagcagatgatgatgatgcctgagaaccttcctccgttaccttattcgattcgatggtagttatgatacttgaaatgttgtcctacacaaccacacataagaatcagattcaggagatgttttgtaataaaattctgtaataagtgaaagcttttgtagttaccttccaagtcgcaagctttgttcggagagattgccattgctttgtcccaaattcacgttcggaagagcggctgtaagatatgaatcaaaccatcaaataatgaatgttgcgtttagataagtgcagagtttcaatagatgtgtgacttgcctgacaattaaaacttggttcatctgatccatcttacactcaatcagttttgcagttattgccttcacgatccataactcgacatcctgttcatttacctgaaaacgaaaagaaaaatgagaaactaaaagggtctcaatatttcatgttaagtgcaagcagaggagagtttttacctgaagagtgtctttaatcgaggtgtaaggtattttgccagattcatctgaggccaaatccactagtgacaacaacctcatcttcgtaacacaatcttcattggaaagtcctagaaacaccacaggattcatcaggagatcatatttcagcaaaaacagttagtgagttaacaatgtagtaccatagctttgcagaaatcccgaatttgcattttggaattccgtgtaggcatttaacctctgagtaagaaaaatcttcagaagttggtaaacaggtgcatatttagcatccttttccaattgtgctacggctggcaagtccaataaatcacactgcaagatttaagattgccatcgttgaaattccaatcaaatataaaagagcagtgtcaggacaagaaagacaaatccaattcacattatgatacctggaaaatactggaagctttgacaaattcgataactgcacgcacagcctcctccttggcttcatccaggacctgagcatcctcattggagaaagttgctaggtacttcgtcaagaacttaagggattcattcaccaagctggagtattaatagaaaaaaccatgaggctattgttatacccaaacggaaacaaaaaaagaaagagacagagaatgactgatgagcatagttataaagtataaattatgtttcaataccttttgttttctttcagcacattagcaatggcaagaaagagttccctctgatctttaatgtcaatattccactctttcagaaagttatcgatcttcttaaaagaagaaactatgtactcagtaaccttcccatcaacagctagtgtaagagctttcatgtatacttgaaatcgagcatacgggtggtcaaccaggttatagagattgaagaggctacacaaagattaagacaaaaaaaaaatgagaagtgtgataaatgagcaaagcattcagaaataagcagaaacgattcatacatcttcaaacgaagtgaagctttgtcactgggttgttgagcaaccttggaagctatagctttcaccatttcaaggacttgctcagggcttttcgcattcttgacaatgctgcaaatgatggtgtaggtacactcaagatctgaattaaaaaaagatgcaaatcactgagaattgaatactcgaaagacatacaaaataaacaggtataagtaagaataggaacacaaacctttctcagatatcttagaagataccaattcagctgaagtgaccattaacgaagacaattcaagccacttctctgctaccattgactcctcagcctccctacagagcctggtaatttctggctctgctgcctaaaatttgaaacgataactagttaagtacaggcaagccttgaaaacttaagaagtcgcttaatgaaactaatcttagatggttgaactaatcggatgcatcagaatcctcaaagattacaaactattctagtccagaaactatcaacaaacccttccataaccaatcagattcttcgaacgaaacaacatataccagatcaaatttcccatctcacttaagatagacattcttaaattcccactataaattcacaaccaaggtgtggaggttacctcgggaccagcatcggcccaggcgagctgggaagtgaatcggacaacagcgagaaagggattttcttcggaggtgggaacaatcgtcgtcatagcttagctccggtttcgaatcttctcggctgcgctgaagaacaaatgcaccacaattacaacttgtttcagcagccgaccagcagagacaagagagagagaagaaaatgaaaccctaaatctctatatttttttcttttccggttaaaggtaaccggaaccgaatacgattcctaaattaacggtttacctatctgacggctaataaattatgagaaaactccaacggtcaggattgagctctagtccacaacccttataaaaatcgatttcttcctcagttaacatttgagaagattagggtttaaacgctgccgtgttccgccggatcgccaccgttgaagtcaagatg

SEQ ID NO: 14783 - DNA, 3000 bp, Unknown; identical to SEQ ID NO: 9126
  misc_feature (1)..( 3000): cDNA_ID_2730863_gDNA_ID_2684224_Annot_ID_191872 3000 nt of promoter + ATG

SEQ ID NO: 14784 - DNA, 3000 bp, Unknown
  misc_feature (1)..( 3000): cDNA_ID_2730950_gDNA_ID_2684225_Annot_ID_137543 3000 nt of promoter + ATG
tcatcactatgctcttcccttaattaaacctaattaattaatacacttgtttttgtttgttttcttgtactcctctcctttattcgtacttgtctttttttaaacgaatctcgcatctaatctcaccccctaaatcttgcttttacattatcacgtccatatcactcaaatctcgtggaatacctctatttcgatcttactaaattatcttatgtagatgatagctttcttttgcataataatagttcaagttttgcagaagtataaaaaagtttggtataattgatgacaaaaaattgttggacatataaacatctacttagcatcattttgttggttagacttaaatctcaaaaatttattgcagttttaccttaaaacagccaacaaaattggaaatataaattaaaacattttgaaaagctaatgatgttaaatcgtatatataagacaaaacataatcgtcgtattatctcatttaaagactttattttttattcgctaaaaaaaagcatttaaaatcacctccaaattttattttagcgattttgttcttgatattgaattgtgtatatatatcaacaaaacgaattgaagtgttgttttggacgagtgtatatatatctactttattaaagaaaattgtttgtagaagacaacatcacctgcaatgctttataattctagtgttcttgtttttcttttacagggattaatttccaaaacttttctttcgttcgccagtttagtttcttttatttggaattttgtattttactttggttcctataggctacgcgtaacattggcacatactactttttcatgtatgtaagtaatttctgtaaaaggctacattaaagtcaatactctccgttttgggtttcagtgaaatctaaaaaatgtcaattttacttttgaagttgcaactttcagatagcaacaagagcgaacgagacaaatgcctcaggtttcagtgtacagctccactaaatggttttcgggtgctattatttgtttcatataaatacataaatactactccattttttctaatttaatgagtagtattaacaaaaaaaagagttatagataatgctaagtctaaagaccggggtaaattcaaggtaatacaagtcaacaactaaaaaaaactaattaaggtagtgaattgagttcacgcaattaaataaactagttaaacgagtaatttggacgagggtgaagttgctacatgatcatagtggagtttaatttacaaaagaataggataacaaaactatatatatatatatatatataacgtagtgtcaaataaattaattagtgtgttattttcaaatatacccataaaatccttttattttctaaagaaaacacaaaataaataatcgaatttaagtatgatttttatccattatttttgccaaatagagggttctttactgcatatattccttaaataaaggaaagaggtgactattatcctaatttcttaagtaagaatgcgattgtgaaagttttgatatatccaactttacaaaaaaagaaaaaaaagcattgcatgtgatgagaatccatctcccccatcctcccacccattctttccaactcaaccatctcctttctcttcctattaataaagtatcatcttctttttgtttctctttttattttttaatgaaaaataaaacttttaaaaaaatttgtatttacttcaattttcttacagttccacttggatagacaaatgccctttaatgagatggtggtggactttaagtatatgttatacgcacaacacacacacacacacacacttttatagacatgttttttaataaagaaaattctttcgaacatattccagatctctaatttttcttttgtttgagatgttatatagaattggtctcagctgacactcaaaaaccagatctgactctagggttttgtgtttgttttttgtttttcttgtaagaaaaactatatattggaaattttctgattcgtctcacttgtgggcacagtattcatatttgattaaaacctatttcttatataaaaaggcatgagatgatggcaccacattgtatatttgtatatatacggaaacataaattgggtatatgcatgtgtcttatattcaaaacaaatattctcaagtcccttccctttttaatttacaccagccctatagctaaaggctacacatatatacatttgtcaccattaaaaaacatgtactgttaaacatcaaatttccaagattccgtttatatttttcacctatccttttttttatttatctttgaaaaacaaaacttactcactctgatcgaatattttatgatatgaaataataatgacttgtaattgttgtgtagtggaaggggatgtttttttgtttcttgtcctgatgctaatgtgggctccaagctccttgtcccactctctttatatgtataaacatctctctccatagatatgttttgtgtttgtaaacaaacagtgtacagatagagaagagagaggttcataactactctgaagaagattgaagcaccaaagaccatacaatgcatttctccatctaaggtgagaggtcaatgaaacaattaacaaaaagttgaaagtttcatttatttttttcttttccaagaaaattataaaaagttggatagtaaaagggaacagaaaagctattatccctttatgtgagaaaaaaaataaagatgatttcagaaaaacaaagccctttgtttctctctcttaactcatcttatactttcttcttctattagtaaagatgagtactctctctaccaaataaataaggaaacataaaaaacaatctctccttctttctctacatgaaaaacaaaagattcctcaattttgttcttatttttcatttagtcacagtacctctctcactataaaccacactgtcttgagataaaatacaaaaagagaagagattaaaaacctcatccgatg

SEQ ID NO: 14785 - DNA, 3000 bp, Unknown
  misc_feature (1)..( 3000): cDNA_ID_2730934_gDNA_ID_2684225_Annot_ID_137547 3000 nt of promoter + ATG
tcaacgatgattgtcctggttcatttccccagaccaaaacctgtggcagatagaaaacatcaccgttcagttttcaatattttagagaactgctaggctttaatatagaaaagacttaccaatgcagttccggcaagtgcgacgagtgcagagaggaagttgaagaagagtgcttttgttactgtgaagcctgatcttactagaatcccaaaatcacctatctgcatgtaagtttccgtggagttgtttaaggggtgatacttgttgctatgcacatttttaggtttgtttaggaaatagagtagagacctcttggggaagctcgtgggcaagtaaaaacatagttcttgaccaaccaccaactgatccatagatgagaaacgcacttcctaatgccattccatcagtgaaattgtgctgcacaacaaaaagagcaaaaaaaaatcttcattttctcagacgaatcatctcttggcaatctttcatcatcccgatcgaagctatctctttaatatttcaaaagggaacacgtacttacaacaccatcagagaacaagttgaggtaaccaaagactaggctcgaagaacgcgtctccacctgttctggtttgtccgattttccatcggaagtaatttctgttcctgaatctgatttatcagtagcgtcactagcagaagtctttctctgcaaatagataagtttactcagaaaccataacaagatgaatcctactcgggcttcaagtagaagctcaaagaatagatgtttgcatataacagaagaaatagaagctcgtagctgaaaaggtaccacatttaagtatgctaaacctctcattcacgcaagagactgataaacagaaattctaccaaaactaatgtgttccttgtttttgtactctgcttgcttcttgagttcaactcaaaactcatctgctgcaggtagaaatatttacatagaagtgtgttctcaccttacggagagatttatctgtagagccgccagagactttctctgatgaatttacaattgcatcagaagaagattgttggtccaagttgttatgatcgccttcatccttcagtttcttactgcctgcatggtggtggtggtgatgatgaccccaagtattggacccagatgagttttcttcgacataccgcaccaacttctccacaagaaggaagaccacaatcccagctggataattaagaatgatgattgaaagtgtcaattctgtcaaaatattttgttcaataaacacaagaggaagtgttatgatacttaccaagaacagacaatccaacagacaaatcttgtatagaatgtgagtgtgaaggcgaatccgaatgagaatgatcatgatggtcatggttctcatggtgatcattagagtgagagtggccaccacctgccaaaccataaatatattttgcacttcaggaagatataaaagcaaacaaaatgagaaggcataaaagccaaattatgaaacaatgcagatactaaaaaagagatcagaaacttgtgtccattactgtaccaaaagcatggggcagttggtgaagaaaagcatctcccaacatagctcctgcctggtaaacaaattaactgaatcaacagatcatatattattaacatttccaactcatccaagtgataaagttgcgacgaaacacagtgtatagatattgctaaaatatttttcttgcattcagaaccaccaccgccaaagaaaaagctactgtagtcagtctaatgacttaccccaaagagagccaaagaatcaacgaaccattttgatggcttcccttgaactgttagttgcaacataagacttgaaacagttactctcatgaacacattatagcacatgaataaacgaaagagagcattttctccaggacaattaaaagcaatgctttttggttttcataggtatacaaaaaattgcttaccaaacataatgggaagcaaaacaaggcagatgagtgaggccaagctaactaaaagagagcatcccaatgcattaagccacagagctacaaaaaccaacaagaagaagagattctaatcatcaagtaatgatttgtaaaacccaatgaagaatgtagctaaaggaaccaaatttaccaaaccccgtaagagtggaacttgattcgtgatcgtgatcatgaagacaaggcccaaacccacataatctcatatcctcctcttcagcaagctcctccggcaacttcatctccaccttcgccgtcgtcttcttcacatgatgatcatgatcgtggtcgtggtcgtggtcatgagaatgactacacccaccaccgtgatgatgcacgtgatcgtcacgcgccggcgttgactgagagaatccggattcaacgcacagatccagaaacagtaccaaaaccagaatcggaaccagtagctttctcagcgagaacgacatctctgagtgagctaagaagagcgacggttgaagcgagtgccttcaatagtgatgaagcagacgatgcagaagaagagaatgataattccgattatgattccgaaagtgacaacatccatttggggaaagtaataaaccttaggagatctttttataatttgtagttttggcccattgtttcgaaattaagtcgaaaacccccttttactaggctacagactctacacaactcttataaaagtctttatgttgatgataatcatgaaacatagagatatctatcggatcctaaaaaatgttatccgttaaattttatgcatcaaagcatccatcgttacacgaatgaaacagaggattcaactcctaaaatcaaggtctaatgtccatttcctttgcatatttcaacccaaaacccaatcgccacaaatcacaccacaccaacaaaacaaaagaaaaaacaaaatcaagagaatacaacaaaaaaaagaaagaagaaaggtatagagttttacaatatcttcttcggaatctttagaggaagaaagaaaaa

SEQ ID NO: 14786 - DNA, 3000 bp, Unknown
  misc_feature (1)..( 3000): cDNA_ID_2730931_gDNA_ID_2684225_Annot_ID_137548 3000 nt of promoter + ATG
agtgatgtgattagcgtagaaaagatgtgattagtcaaagagatgctttgcgcgtgagaggagggaacgtgtaatatgtctttttttttttttttttttgttgttgttaactaaatacgtgtacactaatctaatcactgtaatctgttgagatctctttgtttttctttttgagggacaatcaattatgtatgttttctcttttaacaaatttgattgattctctactaataaaagtccttttaaattgttatgagaaacaaaaaaaatctatttaaattgaatgtaaatcaatataatgtttcgttttttgaatatcactgccatttgcgaccgaagttttatagattaacttgttgtattacctttagctcttggtcttgatttgttttagatatatcttttgggtttatgttggtcttgatttgttttagatatatctttggggtttatgtttgtttacatgaacaacaaacataatgtcacaaatgaggattatttttgtcttacgcgattagctacatgatgaatatatctattattatttgataaaaaaaaaagagaattgacaacaaatttcaacaaagaaacaaactgtcttatgacttacaaacaacacaatcattttcttttttctctactctatatacaacaaaaagaaacacaacataaaaagaagaaaagtttcctctacattacttcattcttgttcattacctttgaggatattgaacttgcatagtggacatgtcgcattcattttcagccatttcacaatgcacgtagaatgaaagtggtggttgcaaggaagtgagaccagctctgctccatcttcatatgaactcaaacatatacaacagtcctacacataccaacccaattcaaaagaaagctctaagcttcatataaaacatccacaagataactttcaaaacaaaaacttacagcatcctcgggaagaagcacacgctcgtttcctaaattctcactcgctgcatccacaggtatcattttcccaccaccgtcactttgcttttcatcattgttcatcgtgtgaaacctgtacttgggaaggatgctgagatctgcttctgatgcaccctcctaaacacacacacacacatatcaaaaggcagtttattgctttcatttcttccaaaagggttactgttatagtccatacctgccccgcgacggcgtaaagaagagcaataatacaaggtaggcaacaacagagggcgattccaataagacatgccagcacaacgcaaaagatggcaaagaacacatcaaatgcaaggaaaacaaaggttaacctgcaaacattaataaacataatgatgtcattaccattcaactagaagaaataaacattgagcaaaccaacacataccaatacaaatgcgtcgcgttttgcagaaggatatcaccaccagaaacaagccagtagaatccaacaatccaccagacaaatgatattatagtgttcattgattcacaagtcttagtgctgaaaataattgattctcataaatcattagtaaatcatttggctaaagaacaaaacagcacagataattgaatcgagagctaacctcagaaacctctcatcgttgtcttcatcttcactatcctgattcgtagcttgagcagcttctaaatctccaggtctgcttctagcattcctctttctaaactcaagccaaacaaggacaacatgaacaagacactgaatcgcataaccacagatccaaatcctaataggaacatttggcttctcttctttaaaaaccaaaagcataacaatcgcaacaagaacaaaagcagtgttccaaagcatatccaaagcaacaacaggtttcgagtaaccccaatcagctcgtcgctcttcaagctcttgtgcagctgtttctctaaccaccatcgaagctcctcgtcgtcctgaagctcgatttaatagaaccgcgattacaggttgacgacgtggtgatgattgccgtgaacggagaagtggtgtggatgagtcggaaccggaaggtgattcaggtgaagacatcgttgaatccgtctttgcttgatacagaattgagagagatgaagataaatctagggtttgttgtgtttcttgtacctatcagtaccactcaaaagtcaaaatagagacaagagaaagtactttaataagtgtatcggtgattcataattgtcttaattcttaatttgctctttaaacaatatgtgttaagagttagagattagaggattacagacgttttagtagtcaacaattagactggtggttaggaaattgagatttttaacacttgtcttctcggttatgtttaagagcaaatgtggtggtgataatgttgaactagaaatatgtaaataatgaacaaaaatcgatggttggtagaggatttcatgatagcaaaagttgaacaacattagaagtttagtaagaacttaaattcgattgtagtggtaagcacttagtataatctcattttacctcagtttgatactttgattagttattttcaaaagtttttgtaacatttgtcttctaaaattccggtttaagttaattggaacttaccgacttaacatttcttacataataatttttttttaacatcatataattaattattctaatgaacaaaagaaaaaaaagattaacaaactaatttcagtttaattccaaaagcggtggtacaccgaaatagacaagacaagtaagaacaggattaactgaaaccctaaacaaccacaatcgatctgggttcattggattcattacacaaaccggagagacatgtcggagaaagagcaccctcggctaattctacacaatttcctgtcgccggcagaatgcaaggttgtcccttttttgcttaattttgtgtctaatcatgtgggtttggttaattttgaggtaaaaacaggaacttgagcttatacacaagagtagcagtacaattgggtacagaccaaatg

SEQ ID NO: 14787 - DNA, 3000 bp, Unknown
  misc_feature (1)..( 3000): cDNA_ID_2730923_gDNA_ID_2684225_Annot_ID_137550 3000 nt of promoter + ATG
gaggtaaaatgagattatactaagtgcttaccactacaatcgaatttaagttcttactaaacttctaatgttgttcaacttttgctatcatgaaatcctctaccaaccatcgatttttgttcattatttacatatttctagttcaacattatcaccaccacatttgctcttaaacataaccgagaagacaagtgttaaaaatctcaatttcctaaccaccagtctaattgttgactactaaaacgtctgtaatcctctaatctctaactcttaacacatattgtttaaagagcaaattaagaattaagacaattatgaatcaccgatacacttattaaagtactttctcttgtctctattttgacttttgagtggtactgataggtacaagaaacacaacaaaccctagatttatcttcatctctctcaattctgtatcaagcaaagacggattcaacgatgtcttcacctgaatcaccttccggttccgactcatccacaccacttctccgttcacggcaatcatcaccacgtcgtcaacctgtaatcgcggttctattaaatcgagcttcaggacgacgaggagcttcgatggtggttagagaaacagctgcacaagagcttgaagagcgacgagctgattggggttactcgaaacctgttgttgctttggatatgctttggaacactgcttttgttcttgttgcgattgttatgcttttggtttttaaagaagagaagccaaatgttcctattaggatttggatctgtggttatgcgattcagtgtcttgttcatgttgtccttgtttggcttgagtttagaaagaggaatgctagaagcagacctggagatttagaagctgctcaagctacgaatcaggatagtgaagatgaagacaacgatgagaggtttctgaggttagctctcgattcaattatctgtgctgttttgttctttagccaaatgatttactaatgatttatgagaatcaattattttcagcactaagacttgtgaatcaatgaacactataatatcatttgtctggtggattgttggattctactggcttgtttctggtggtgatatccttctgcaaaacgcgacgcatttgtattggtatgtgttggtttgctcaatgtttatttcttctagttgaatggtaatgacatcattatgtttattaatgtttgcaggttaacctttgttttccttgcatttgatgtgttctttgccatcttttgcgttgtgctggcatgtcttattggaatcgccctctgttgttgcctaccttgtattattgctcttctttacgccgtcgcggggcaggtatggactataacagtaacccttttggaagaaatgaaagcaataaactgccttttgatatgtgtgtgtgtgtgtttaggagggtgcatcagaagcagatctcagcatccttcccaagtacaggtttcacacgatgaacaatgatgaaaagcaaagtgacggtggtgggaaaatgatacctgtggatgcagcgagtgagaatttaggaaacgagcgtgtgcttcttcccgaggatgctgtaagtttttgttttgaaagttatcttgtggatgttttatatgaagcttagagctttcttttgaattgggttggtatgtgtaggactgttgtatatgtttgagttcatatgaagatggagcagagctggtctcacttccttgcaaccaccactttcattctacgtgcattgtgaaatggctgaaaatgaatgcgacatgtccactatgcaagttcaatatcctcaaaggtaatgaacaagaatgaagtaatgtagaggaaacttttcttctttttatgttgtgtttctttttgttgtatatagagtagagaaaaaagaaaatgattgtgttgtttgtaagtcataagacagtttgtttctttgttgaaatttgttgtcaattctcttttttttttatcaaataataatagatatattcatcatgtagctaatcgcgtaagacaaaaataatcctcatttgtgacattatgtttgttgttcatgtaaacaaacataaaccccaaagatatatctaaaacaaatcaagaccaacataaacccaaaagatatatctaaaacaaatcaagaccaagagctaaaggtaatacaacaagttaatctataaaacttcggtcgcaaatggcagtgatattcaaaaaacgaaacattatattgatttacattcaatttaaatagattttttttgtttctcataacaatttaaaaggacttttattagtagagaatcaatcaaatttgttaaaagagaaaacatacataattgattgtccctcaaaaagaaaaacaaagagatctcaacagattacagtgattagattagtgtacacgtatttagttaacaacaacaaaaaaaaaaaaaaaaaaagacatattacacgttccctcctctcacgcgcaaagcatctctttgactaatcacatcttttctacgctaatcacatcactaaccaaaataattaaccatccacctaaattatatacatacaatattgccatttactatattataattactaacctctatatttcatacttaagtgcttgatcaagtgaacgttgattaattaacaacctaatctaatctttgttttttttccctcttcttgtcttgtcacacttgctattagagaagacgactagagaaagaaagataaacaacaacactgtgacagcatttaaatctcactctctctcttgtttccatcactacaaaaaaaaaaaaaaaaacgaacgatctctctgaaactatctctttctctctagatatgttgttgagactctgatttgaaatcccagagaaaagcatttggatcctctctagaaatctgcattttgaagctacttttttgtttgcatctgagtgtgtatagatcctgaggaattttgatgtgttgttgaatcggaaggaatttagatcggagtagtcggag

SEQ ID NO: 14788 - DNA, 3000 bp, Unknown
  misc_feature (1)..( 3000): cDNA_ID_2730915_gDNA_ID_2684225_Annot_ID_137553 3000 nt of promoter + ATG
gtgaaccttgcctttattccacgccttggagcttttgtccaacacctcttttggtacactcgatagccagtgtgtggcccccatcgtcactacaatatgaacggaggattgaggaaggacacggccgtagaacgaacccgggactccgaccgccaagtaactccggtcttgagggagagatgtgaagagagtgttgaagtcgttttgtgggaggtcgttgaagaagacaagaaactctggttttgacgagtttgattttcttaagctggtttcaatggatttgatgatgttgtcaacgagaaagaatgtatttggtccagttgcacaaccaagatcggctatccggaatgtgttggagtcagatgagattagggtttttgcattgagtttctctaataccagtttgtctattttctctttcaacaaacttgttgtttttctctgttcacaccaaaagaagtcaaaagcttaatataattttatgctactccaattgaaaacgattaaaagacagaactaaatcacaaagtttttttttcttttgataagaaaaatcaaaaacttttttaaaattaattttatacttttatgactgaacaaaccatatgaaatttacgtataaagtaactttgatgcactatgtctatataggagatgagatgagatccaaaccatattaaccaacatattaaaaaaatagaaaccatcatttaaaaaaaaatgtaagtactttaagaacgtagattgagtaaaactgaaatagtctcttgactcccttcaatccctgctagatttagcttattcagcttttcgtaagacaatgaagccgtttagtgatcctcggtgtttttttgtgtggctcgatgagttctcgacattttaatatcgttattgaagtttcctttcttttttgaagtacataacaaggaaccaaattttgattaaaaaaagtcatatatatatatataagagatgataaaatgaattcatgagcttccaattgatccgaaaagccagcaaagtaacatgtgtgtattcgaaaatcaactgatcataatcttaatttgtctctatgaaaattacgaaccaaggtttattagtttttgacaaatattatattattttacaaaatcatcataatatcctaaattcaactcatcattttaatgaaattaaaaaaaaaaagaaatcttcaaaactatgttattaatatccaaataaccgaactcaattataatatgatgaacctgaaaagttataactctacaattttcgtttctttcaattctactatttattcatattgaaaaacatgattccatttatctttctttagtatttagaacatttatcagatattttgtaattattccgtaatctcataccgcttctttactatctcttatctctttaaaattattcagtaatcatacacttttttttctacctgcaagttttttttttttttttgcatcactaattgggaaccatgaaaaaaagaacaaacaatagtggaagaaaaaaaaaaataaagataagaaaaaaaatatagaaaaatggaataaaagctctgaaaatagacctgcaaatgagaattcttagagtagctgttcggaccatctcccccactcataggaagtgagttacgaacaatctccacttttcccattatactttttttgatttgcgtctatactttggctatgtctcgcctatcatttatataggccatgcacttaccacgtagtgcttgatattatatttactttaacaataattgaaaccctcttgaattgaactatacaacacatacacacacgcgattatatgcgtataaaaacaagaaattaatacaagaatttgctatcacacatacacaaatcaaagtacaatgtagaaaaatattttttgaaaagaataagttcgaatatatagtacaatttttttaattgtaatcaataaatttgttcttcaaatcacttaagatggccaattatctaataagtaagaatcttattactataagttatagactagctactactctactagctagggagaatcatcattggagtggaattcattgttttcttttttggtgcaactataatagatgggttttaagccaataaaattcttacaaaccaatatagtacactagtcattggtttcattcactgagcttagacgatcccatatccatatccaatgaactactactacatatgtttttaattaaatagagaagctaatactgaattatcatcagtggttattatgactgtggtcctaatacattacgtacaagacgaccacaatacatatattattttcttttaaaaaattgagtattatttctgaactaaactataggtcttgcgtgggaaaactacgtaatcgtaggggcatcaaactaataattaaatcataggttaaactacgataatatacccattcatcttcaaaggagatgctctgtactaatatatccaagaatgaatcaaaagatgccaaaatatatgtttataaacataaatctctgtttatatctctatcaatgcgtttcttgattctttcataattaataagagatatgttattgttatataaacaaaaataatagaacaagcagataactgaaccaaataaaattttggtaaaataaaacgctattctgcctaacttaagaacatatcagaaaacgctatgggcctattattgggcttgggcctaggatctttctgggaaagaaaacgctcatctttctcaacacaagtgaaatttctccagtgcttgcttgaattctgcaaatttggcggtctccagcgagagagagctattcagtcttcaaattctctccgttgagaaaaaagaggtacacttgtgtttcatttttctcggaaagtacgattttatttctattttttttggttctcttcacgaatctgaagactgatttttccgtctctgtcaacagctgctattttattcgtgtcgatg

SEQ ID NO: 14789 - DNA, 3000 bp, Unknown
  misc_feature (1)..( 3000): cDNA_ID_2730911_gDNA_ID_2684225_Annot_ID_137554 3000 nt of promoter + ATG
gtatgtaacaggttctacactatgtagtctttctctttcatcttcatgttcaagtttatgtatttgagataatggtgattggcagcttatggacagttcttgaaagcaaatggagaacaacctgtgacatggaaacgagcttcgtccatggaggaggtgctgcgtgaggctgatctggtatatggaattcacgcagacacaaactattcttcgtttgttaaacatttctagtgtatctcttatgaactggttgtgatctgaaacagataagtcttcacccggtgctggacaaaaccacttaccatcttgtcaacaaggagaggcttgccatgatgaaaaaggtggtttcacttttcatttggtctcctcttattattattgatcttgttctgattggatttgattgcttcaggaagcaatccttgtgaactgcagcagaggtcctgtgatcgatgaggcagctttggtcgaacatctcaaagagaacccgatgttccgagttggtctcgatgtgttcgaggtactgtcatatacgctatgatgaacccaaaacatactagtttatctctgggagcttagtaagtgttgttaaatcacattgtttcaggaagagccattcatgaaaccagggcttgctgatacgaaaaacgctattgttgttcctcacattgcttctgcttccaaggttacaaactgaagaaacgtttctttgtgtctaaatagataattaacagaactgaccttaacttaacttcttctgatgatgacagtggactcgtgaaggaatggctacgcttgcagctctcaacgtcctcgtatgtattttcattccaagaaaactcattcttataagattcaaaatgactaaattctgatcagcctctgaaaatgtttaacagggaagagtcaaagggtacccgatttggcatgacccgaaccgagtcgatccattcttgaacgaaaacgcttcaccgcccaatgccagtccaagcatcgtcaactcaaaggccttaggtactacacaacacttacactcatgcctcagattgtttcaaacgctaatttatgcttgcatttcctgttaacaaaatatttaaacataaacagaaacaaaagaacattgactaatccacttaaacaaatttgttcccattctctctattaaaattactctcatatatatattctttgggttttttcaggattgcctgtttcgaagctatgagttaagtatgaagaaggggagatttggaagaatccttttagtgaatatatgatggtgtcaagttgtgtttatgtattgtatatgaaacaaccatgttggatcatataaatcactcctttaaagtgttacattgttgatgagtctattagacgattacccactctctttatttcataaatttgctaagaatacaatttctaagtcatcaagaatttcatctctagttgtaggatttgtactcatgaatctaccatccattcccgtttgtaaacttcacagaacagttttgaaactttaaaaaatctgatttatgacacaaaacggtaatagaatttttacggaaaaaatataaactactggaacagttaaaagcaaaaatagtggtagagcatagtaatatacacagagataagcagaaaaaatcggataaaaccgccgattaatttttatttgacgatttaatatctgttatattaaatttggaataaaaaaattatttaattttgattgttttttaaagtcctcgttttttaaattttagtagattagtatctcaacaatggtaataaaatcgcgataaaattaatatagaataattcatttcataatttaaaagttatattctctctcttttttaaattaattcaatttctgagtttttactaatattagataagattataatccataattttttgaaattgacaattctttcaaactttaaacctatagttttcaatttaattttaaatttacaatttatcgtcaataactaataaaaaaatagaaacattttagcaaaacaaatatttttattttgtataatgttttgttttctaaaattgtgtttaataagtaaccgaaggaatatattatattgaatttttttaaaataaagtaatgctaaatataaaataaatgacactctatctttagttgacaaaagcactgagatctcgccacgtagcatgctgagcaacggacaccacgtggtgttttgctgagaccaaaaccccatgtgacagctgcttagaggtcccacttcggtctacgacactaacggataagatcaaaccacacatttctctttggtgtgaccaaacttgacgtgctcttctctttttccacccttcgatatatcttcatcggacgattcaaattctcaaatatatactcatgctctcgttggatacattaattgttataagttgggttttaacttttaaaatgaacagtttttcatatttgggtgtgtatttttcagatatataaattccaactcctgttataaatttatgtaaacatcgttattaacactaagagacgcacaagctctgtctgagaaaaaaaacaaaaagctaaactattttcattataattccaatctcacacgcaaaaaccttagaaacagaaaatatatctgtctgaagaaaaagtgccggtaataagaaagaaagaatcacctttctctactttgtttttaatttcaaaagcattttctcatgaagacagtcaaaaaatctctttttgtcttctcaaatttaaacctcacctttaatatttctccttacttttgaagctgtaataatattcttgaatctattcctttctttctctttctcatgtttaatcggtgaaggctttactctgtttctttcatcatgtttcaatcaaaagccttaactttttctttagctctttccattacaagagacctctagcttcatactttttataaaaattctctctttttctcagtttaatctcaagaaatg

SEQ ID NO: 14790 - DNA, 3000 bp, Unknown
  misc_feature (1)..( 3000): cDNA_ID_2730907_gDNA_ID_2684225_Annot_ID_137555 3000 nt of promoter + ATG
aactgactactaacctaatcaataaattttggataatggtcaaggagaaacaagagtatgattttgcatttgtggatgctgacaagacgaactacgtttacttccttgagaagctccttaagttagtgaaggttggaggaatcattgccttcgacaacactttatggtttggtactctaattcagaaggaaaacgaagttccaggccatatgagagcttatagagaggcacttttagagttcaataagatattggctcgggatcctcgagtcgaaatcgctcaaatatccatcggagatggtctcacgctatgtagacgtcttatatgataaacctatagtaaataatgttatatgcttcaataataactttggcctttgtttgtaatgttatatgctactataatgactcttcatcttcctaataaaactcctctttcaatttcaatttgcaaagagggttcaaatttggatgcgaatataacagtttattactttgcggcaaaatgtttataatttttaaactttgagggttaattgataaattaaagataaacatcgacatttctaaatcagaaatctcgattttattttgaatgttcaaaagctgccagattgagaatatttcgtccgtcgttgaaacttgagaatagaggcgaatctggttcgagttagggttccaattgaaaagtttgaagctccttttgactctctctctcttctagatctcgacaactctaacctcttcgatttggtaaattttcgctctttctactgaaatcggatgaatttgtgattttccggggatgggttcgtgtctctatgcattttccgatgatgggttatgagaaaaagtttttttttttttttaatctttgctttgtgtaggtggatcttgagaaattgattttagttcaaagcttctgatggctaaaaaggagagacctagacctgagaagttgtctgtgtatctttatatacctaatattgttggtgggtctttatttctctttagcttttttttcttagcattaaagattgttgttgtgatgatgattttattgattgctttcagggtatatgagagttctcttgaactgtgttgcttttgctgtgtgtttctccaacaagccacttttctctgtcctttatttcttcaggtattgcaactttcttctttgatggtcattaagattttttcatgttttgggtgatggtattaacagtcttctttttgatcaatgtggctgtctctagcttttgttgtgatgctgtggatggctgggtggctcgtagattcaaccaaggttcaacaactctctcttgttttataaaacctcatttttattccgtatggttggtcaaaagatcctactactgatcaagattagtacaatatgttgctagtgtttagtttcatgtgatagacatgcatcacatgccatgactagaatatgtaggaagctagaaacttgactcacttctctttctttcttcttcagtttcaacatttggagctgttcttgacatggtcacagataggtgaatcctcttctacatatatgcaaggatcaacctacttatctgtttagtaaattctgacattttgttggtggtcattttgggttatagagttagcacggcttgtcttctcgtgattctctctcaaatctacaggtgagaatacctctctatatctttttccgtagcatctctggagttctacattattacagtatatgtaattttatttcatctttaaaataggcctagtttggtcttcctctcattgctggctttagatattgctagtcattggctgcagatgtacaggtacgctaattaactctttcttgtttcaccttgaattcttctctatactattcaaatcttcagtttctaactagggacttcatattctactcgcagtacgtttctagcagggaagagcagccataaggatgtgaaagacagcacaagctggctttttagactctactatggaaaccggatatttatgtgttactgctgtgtttcttgcgaggtgactcaaattgtcacttcatttccatgttaatcctttgagacgatgtcttcttagacacaaatcttttcaaacttgcaggttctgtatatcatccttcttctcattgcaaagaaccaatctgaaaatctcctgaatgtcagtttctcatttctttcaattagtctagctcttagtcttactatgctcaactactaaagcatggttatcattgcaggtcgtagttgctacattaacacagatttcaccactctcttttctcctggctttgacattgttcggttggtcgatgaagcagaccattaatgtcattcaggtaaagctaaacattttaccaaatctgcaactaatccctctattcgaagctgtttttggtttctaattatataattcgttgtggcgtacagatgaaaactgctgcagacgtttgtgtactgtatgatatagagaagcagcagaagccttgatcatcttcctttgtctcaacctgaaactcttttttttctttcattgtttgttctcttttcactgtggatgtagataattgtttttaatgaaatgaagaaatattgatttgccttttgacataattttgttaataatcttgattacaaattttagtcagtgtttgatgcatagttgcatactgcagagttgagtttggatatggccacgtcagcattatctcgttaccaaaacgtaaggtccaaactcagataatacaaacgaagcagttctttgtcactctatcatcaacatatgaaccacaccaaaaaagaacaaaatcgtagataatgatcatgcaaaaccgaccgttggatcttactttcgatttcaaaccacataaatcttagtgactgagctaaaaaactgaaattttttaaaaggcaagacctcctctgtttccatattctcaccacagaagaactcttgaggctttctcttttctctaccatg

SEQ ID NO: 14791 - DNA, 3000 bp, Unknown
  misc_feature (1)..( 3000): cDNA_ID_2730899_gDNA_ID_2684225_Annot_ID_137557 3000 nt of promoter + ATG
aggaagaagaagtcacggttttagatatttttaagtctttggcccaacagatatttttatttaaaaaaataacattttacgacgttaataaaacatatttacaactttaatggaaatagaaaagtaaaacattttacgacaataaaaaaatattttacaatttttaatgaaaatagagaagttaatataaaaatttaaattaaatcaaatgaatgttgtgtattttcgaatgttaggacttaataagggtttaaggatgtgaaatcttaggaattattattttaaaatcatttcgtcatttagggatcttgatgatgaggatgcccaatctcctatgccacatcatgttgcctaagattagttacatggacatcacattgagcttggggtgagagttcaccataaactaaaagattccagattagacaatccaaaaggtcaacttatcatatctctggaacacttattcaacaaactttgcttaacttacaatgacagattacaaaaacccaaaagatcttttcttaggaggtttgaggaatcctctcctcaagacattctgtaacttttgtttttgctttttatcgacaaccttcttacttagttgtgaatttttgcgctttgatgattcactaaactttaaatacatatcttggaattttttaagtgatttcttcatgcatacttgaaaaattgttagaacatgttgaatattattattgtttcatccgttgaagcggattgagggattgaaactgcaaaatttgaatcatctttggagatttatgctggtattcgttatgttagcattcgaattcaaatccgtttttttagtaccttcaatttgatatattctttaaataattctatactatatactttttttgcattttaaatctcacataccaaatttatattagtcaataaaactacattgcaaactgttcgcctgcttgcatatttcaacatttgtatgcaaccttaagagagaaaaaaaatccttaagaaacataaacgttaatatattcgcatcaagtactgtctagataattgattttctagtcccatggttgaaaagtcatggataagatcaattggtgtgttagtccttaatttgggtcttattagtagctcaattagtttgaccagaagccaatatatatattgacatacatctctcgtttataacaacgaacaatttgcacacaaccacgagactcaagagacatggccaatgaaattcctaccaaagggattctcaagagcgaagctctaaaacaggtaaaattttctctgttataaagtttgctgatctttaaaactttggttttgtctagttttaaaaaggaactttgatgtataaatctgtgttttgttttggtcgtgttcgtcacagtacatcatggaaacgtcagcgtatccaagagagcatgaattgctcaaggaacttcgaaaagctactgtccaaaaatacggaaatttgtaagtcttaatatatgactttcttttttaggtgcaacaaaatctataggactatataacaacttttttaaattaagaaattttatctttatatagtttaagaagtggaataaacaaaattttgccaatagtttgtgattattttagagatagctatatagttgcttaattttgtagaatttaaaaataaaaacgcagaagcgagatggaggttccggttgatgagggtcatttcctatcgatgcttgtaaagatcatgaatgcgaaaaacactatcgagatcggtgttttcaccggttactcgcttctcactacagctcttgctttacctgaagatggccgtgtaatgcttcttgttatatataatcatattgttggggttacaaaattatttgtttgttttaactaagaaacatagttatcaaaatggatgctctttggatgtagattaccgcgatagacattgataaagaagcttacgaagttggactagagtttattaagaaggctggtgttgatcacaagattaattttatccattccgatggtcttaaggccttagaccaattggtgaacgacgtacgtgaaaatatgtgttcttatattattattaactttaagcttaattaactatatttttttagctaatggtcatacattaaaaaacattgcagaaatgtgagtttgattttgcatttgcggatgctgacaaatcaagctacgtcaacttccatgagaggcttctaaaattggtgaaggttgggggaatcattgcgttcgacaacaccttgtggtttggttttgtggcggaggatgaagatggagttccggagcatatgagagaatatagagcagctcttatagaattcaataagaaattggctttggatccccgagtcgaggtctctcagatttccattggagatggtatcacgctctgtagacgtcttgtttgatcaaaagactacttgaagagtacgtagcagaaccaaagtcggagagtttggaataaaagtgttagatggttcaataacgacttcgtcttttgtcacaactttgcttgtaatggtgtgtttgattgatgctcactctttatcttctttctatgttgtggtttcgtcgatgttgttctgtctggcaacaaaactattagtacactaaattacttttaataataattgttgtaacattataatttttttttttctggtcgacacattattattactgttttttttctttttaagtgtttgtaaactattaaaaagagttgtgtaaagattaaataaacacctttcagctttttggggacatctaatatgtgtgtttcaattttacatgcatatgcacactagtgttttccaattccattttttctgccaaaattacatatccacccaaatgatatgaccaaagttttattttatttctcagttaggtattactatttaaagccaacatagacacacatttgctaacactcaaaagagattctcacgatcgagcaagagagagatg

SEQ ID NO: 14792 - DNA, 3000 bp, Unknown
  misc_feature (1)..( 3000): cDNA_ID_2730895_gDNA_ID_2684225_Annot_ID_137558 3000 nt of promoter + ATG
gctataacacatcattgagaattgcaccggtgaaagtaatatatccggtgcatacttcgttgtttgttatagagttacataacaaaagttttgaggctgatatgttcaaaaaatcaactattcatttgaagccagcaattccatctgctctgtcaaaatctcaaggttcctagacctctcaggagtaagctgtccaaattcaaagtcatctggtttctccatctcttctgatatcagcttaagcatatagctcttgtctaattccattgttccatcctcctcctcctcctccaatgtcaaatcatcctttcctttcttcacaatgttctcctgcttcttcgtcttcttccttgaagggctcaacaacaaaagcttttcccatgctccatcatcgtatagatcaggtatgatcaatggcacatggttttcatctaagcagaacttcaacatatcggcgtttctcaagaaatcatttacgtcgttcgagtttgactttgcagttccattgttgtccgatggtggctggtatgttactaaaggaagaccatatgagtttgattctccttcatcagtcacttcttccacaatcttcgctccttcccccgcttttcgccaagtgtttttctcctttggctgaagtaactgaactaaaagacttggattcttcataaccataaccaaaaacgaaagcatctcctgctgactctcttccattccttgaactctgtcttctaaatgtaacatcttagtatccgtcacctcctgatactgcctaactttgatcaactcctgcgccaatacctgcttatcacctttcaaaatatcaacttccttccacaatccactcttttcctgagcatatgttgtacttgtactctcatgtttgctctgctcactactttgaacattcttcctcctgataacattcttcagcaaatccttttgacctctcacaaacccgtcattcgcaaactcccatcgatctgcatcaacttttctaaaaccctgtaaacaaacacatccacgaatcaggcacaagtctactcaaagatccaatgagccagatttaccctagatcaaccaacttatactatcatagagtcttcaagattgtgactagtactagttctaaacactgttccagataatagaagttgaacaaaacatctttcttcatgcttcataaaccaaattcataatcaatcttctctaaaacctatccacacgttgtaaaagcagagaaaaaatgaaactttgctaaatacaatcacaccatgtaagagtaagagacataacaaagaagatccaattgtacaaaattgaaaagagagaggagaagagaggactaacgtagatattgagctgacgaatgaagctagagaaattgctgtgtttaaagtatttaggcaagagttgaacagagaagacggtggtgtccaagataacgaagctattatctgcacttggactccatgagattatagagtcagtagtagaatcatcaaccatatcgtaacattttctcaagaacggcgccactgaagaagaagaagaagacccaccaccaccgtccgtcgatttcaccataatcgagaaatctctaaactttagatgaaattttgaattctgaaatttgggattgaatcgattagtcgcaagaataaggaaaaatgaagagaatttgggattggggtttatgtgggaaggagatgaaacttgtgcgttgggcaagggatcgtcgttcacatcaaaggaaatttcaaggaagagaggaagaagaagtcacggttttagatatttttaagtctttggcccaacagatatttttatttaaaaaaataacattttacgacgttaataaaacatatttacaactttaatggaaatagaaaagtaaaacattttacgacaataaaaaaatattttacaatttttaatgaaaatagagaagttaatataaaaatttaaattaaatcaaatgaatgttgtgtattttcgaatgttaggacttaataagggtttaaggatgtgaaatcttaggaattattattttaaaatcatttcgtcatttagggatcttgatgatgaggatgcccaatctcctatgccacatcatgttgcctaagattagttacatggacatcacattgagcttggggtgagagttcaccataaactaaaagattccagattagacaatccaaaaggtcaacttatcatatctctggaacacttattcaacaaactttgcttaacttacaatgacagattacaaaaacccaaaagatcttttcttaggaggtttgaggaatcctctcctcaagacattctgtaacttttgtttttgctttttatcgacaaccttcttacttagttgtgaatttttgcgctttgatgattcactaaactttaaatacatatcttggaattttttaagtgatttcttcatgcatacttgaaaaattgttagaacatgttgaatattattattgtttcatccgttgaagcggattgagggattgaaactgcaaaatttgaatcatctttggagatttatgctggtattcgttatgttagcattcgaattcaaatccgtttttttagtaccttcaatttgatatattctttaaataattctatactatatactttttttgcattttaaatctcacataccaaatttatattagtcaataaaactacattgcaaactgttcgcctgcttgcatatttcaacatttgtatgcaaccttaagagagaaaaaaaatccttaagaaacataaacgttaatatattcgcatcaagtactgtctagataattgattttctagtcccatggttgaaaagtcatggataagatcaattggtgtgttagtccttaatttgggtcttattagtagctcaattagtttgaccagaagccaatatatatattgacatacatctctcgtttataacaacgaacaatttgcacacaaccacgagactcaagagacatg

SEQ ID NO: 14793 - DNA, 3000 bp, Unknown
  misc_feature (1)..( 3000): cDNA_ID_2685667_gDNA_ID_2684225_Annot_ID_137559 3000 nt of promoter + ATG
aaattgaaacacacatattagatgtccccaaaaagctgaaaggtgtttatttaatctttacacaactctttttaatagtttacaaacacttaaaaagaaaaaaaacagtaataataatgtgtcgaccagaaaaaaaaaaattataatgttacaacaattattattaaaagtaatttagtgtactaatagttttgttgccagacagaacaacatcgacgaaaccacaacatagaaagaagataaagagtgagcatcaatcaaacacaccattacaagcaaagttgtgacaaaagacgaagtcgttattgaaccatctaacacttttattccaaactctccgactttggttctgctacgtactcttcaagtagtcttttgatcaaacaagacgtctacagagcgtgataccatctccaatggaaatctgagagacctcgactcggggatccaaagccaatttcttattgaattctataagagctgctctatattctctcatatgctccggaactccatcttcatcctccgccacaaaaccaaaccacaaggtgttgtcgaacgcaatgattcccccaaccttcaccaattttagaagcctctcatggaagttgacgtagcttgatttgtcagcatccgcaaatgcaaaatcaaactcacatttctgcaatgttttttaatgtatgaccattagctaaaaaaatatagttaattaagcttaaagttaataataatataagaacacatattttcacgtacgtcgttcaccaattggtctaaggccttaagaccatcggaatggataaaattaatcttgtgatcaacaccagccttcttaataaactctagtccaacttcgtaagcttctttatcaatgtctatcgcggtaatctacatccaaagagcatccattttgataactatgtttcttagttaaaacaaacaaataattttgtaaccccaacaatatgattatatataacaagaagcattacacggccatcttcaggtaaagcaagagctgtagtgagaagcgagtaaccggtgaaaacaccgatctcgatagtgtttttcgcattcatgatctttacaagcatcgataggaaatgaccctcatcaaccggaacctccatctcgcttctgcgtttttatttttaaattctacaaaattaagcaactatatagctatctctaaaataatcacaaactattggcaaaattttgtttattccacttcttaaactatataaagataaaatttcttaatttaaaaaagttgttatatagtcctatagattttgttgcacctaaaaaagaaagtcatatattaagacttacaaatttccgtatttttggacagtagcttttcgaagttccttgagcaattcatgctctcttggatacgctgacgtttccatgatgtactgtgacgaacacgaccaaaacaaaacacagatttatacatcaaagttcctttttaaaactagacaaaaccaaagttttaaagatcagcaaactttataacagagaaaattttacctgttttagagcttcgctcttgagaatccctttggtaggaatttcattggccatgtctcttgagtctcgtggttgtgtgcaaattgttcgttgttataaacgagagatgtatgtcaatatatatattggcttctggtcaaactaattgagctactaataagacccaaattaaggactaacacaccaattgatcttatccatgacttttcaaccatgggactagaaaatcaattatctagacagtacttgatgcgaatatattaacgtttatgtttcttaaggattttttttctctcttaaggttgcatacaaatgttgaaatatgcaagcaggcgaacagtttgcaatgtagttttattgactaatataaatttggtatgtgagatttaaaatgcaaaaaaagtatatagtatagaattatttaaagaatatatcaaattgaaggtactaaaaaaacggatttgaattcgaatgctaacataacgaataccagcataaatctccaaagatgattcaaattttgcagtttcaatccctcaatccgcttcaacggatgaaacaataataatattcaacatgttctaacaatttttcaagtatgcatgaagaaatcacttaaaaaattccaagatatgtatttaaagtttagtgaatcatcaaagcgcaaaaattcacaactaagtaagaaggttgtcgataaaaagcaaaaacaaaagttacagaatgtcttgaggagaggattcctcaaacctcctaagaaaagatcttttgggtttttgtaatctgtcattgtaagttaagcaaagtttgttgaataagtgttccagagatatgataagttgaccttttggattgtctaatctggaatcttttagtttatggtgaactctcaccccaagctcaatgtgatgtccatgtaactaatcttaggcaacatgatgtggcataggagattgggcatcctcatcatcaagatccctaaatgacgaaatgattttaaaataataattcctaagatttcacatccttaaacccttattaagtcctaacattcgaaaatacacaacattcatttgatttaatttaaatttttatattaacttctctattttcattaaaaattgtaaaatatttttttattgtcgtaaaatgttttacttttctatttccattaaagttgtaaatatgttttattaacgtcgtaaaatgttatttttttaaataaaaatatctgttgggccaaagacttaaaaatatctaaaaccgtgacttcttcttcctctcttccttgaaatttcctttgatgtgaacgacgatcccttgcccaacgcacaagtttcatctccttcccacataaaccccaatcccaaattctcttcatttttccttattcttgcgactaatcgattcaatcccaaatttcagaattcaaaatttcatctaaagtttagagatttctcgatt

SEQ ID NO: 14794 - DNA, 3000 bp, Unknown
  misc_feature (1)..( 3000): cDNA_ID_2730891_gDNA_ID_2684225_Annot_ID_137560 3000 nt of promoter + ATG
catgaagaaatcacttaaaaaattccaagatatgtatttaaagtttagtgaatcatcaaagcgcaaaaattcacaactaagtaagaaggttgtcgataaaaagcaaaaacaaaagttacagaatgtcttgaggagaggattcctcaaacctcctaagaaaagatcttttgggtttttgtaatctgtcattgtaagttaagcaaagtttgttgaataagtgttccagagatatgataagttgaccttttggattgtctaatctggaatcttttagtttatggtgaactctcaccccaagctcaatgtgatgtccatgtaactaatcttaggcaacatgatgtggcataggagattgggcatcctcatcatcaagatccctaaatgacgaaatgattttaaaataataattcctaagatttcacatccttaaacccttattaagtcctaacattcgaaaatacacaacattcatttgatttaatttaaatttttatattaacttctctattttcattaaaaattgtaaaatatttttttattgtcgtaaaatgttttacttttctatttccattaaagttgtaaatatgttttattaacgtcgtaaaatgttatttttttaaataaaaatatctgttgggccaaagacttaaaaatatctaaaaccgtgacttcttcttcctctcttccttgaaatttcctttgatgtgaacgacgatcccttgcccaacgcacaagtttcatctccttcccacataaaccccaatcccaaattctcttcatttttccttattcttgcgactaatcgattcaatcccaaatttcagaattcaaaatttcatctaaagtttagagatttctcgattatggtgaaatcgacggacggtggtggtgggtcttcttcttcttcttcagtggcgccgttcttgagaaaatgttacgatatggttgatgattctactactgactctataatctcatggagtccaagtgcagataatagcttcgttatcttggacaccaccgtcttctctgttcaactcttgcctaaatactttaaacacagcaatttctctagcttcattcgtcagctcaatatctacgttagtcctctcttctcctctctcttttcaattttgtacaattggatcttctttgttatgtctcttactcttacatggtgtgattgtatttagcaaagtttcattttttctctgcttttacaacgtgtggataggttttagagaagattgattatgaatttggtttatgaagcatgaagaaagatgttttgttcaacttctattatctggaacagtgtttagaactagtactagtcacaatcttgaagactctatgatagtataagttggttgatctagggtaaatctggctcattggatctttgagtagacttgtgcctgattcgtggatgtgtttgtttacagggttttagaaaagttgatgcagatcgatgggagtttgcgaatgacgggtttgtgagaggtcaaaaggatttgctgaagaatgttatcaggaggaagaatgttcaaagtagtgagcagagcaaacatgagagtacaagtacaacatatgctcaggaaaagagtggattgtggaaggaagttgatattttgaaaggtgataagcaggtattggcgcaggagttgatcaaagttaggcagtatcaggaggtgacggatactaagatgttacatttagaagacagagttcaaggaatggaagagagtcagcaggagatgctttcgtttttggttatggttatgaagaatccaagtcttttagttcagttacttcagccaaaggagaaaaacacttggcgaaaagcgggggaaggagcgaagattgtggaagaagtgactgatgaaggagaatcaaactcatatggtcttcctttagtaacataccagccaccatcggacaacaatggaactgcaaagtcaaactcgaacgacgtaaatgatttcttgagaaacgccgatatgttgaagttctgcttagatgaaaaccatgtgccattgatcatacctgatctatacgatgatggagcatgggaaaagcttttgttgttgagcccttcaaggaagaagacgaagaagcaggagaacattgtgaagaaaggaaaggatgatttgacattggaggaggaggaggaggatggaacaatggaattagacaagagctatatgcttaagctgatatcagaagagatggagaaaccagatgactttgaatttggacagcttactcctgagaggtctaggaaccttgagattttgacagagcagatggaattgctggcttcaaatgaatagttgattttttgaacatatcagcctcaaaacttttgttatgtaactctataacaaacaacgaagtatgcaccggatatattactttcaccggtgcaattctcaatgatgtgttatagcagcttactacaaaaacatggttgaaactttttgacaataaccatgagagcaaaccagtatagtaaacctcttaggattcctatatcggttcgattttgtgggttttaaatcgaatcaaaccataaccgaatgcattataaaacccgtttccgagtcaaaaccaaactaatcacttgatttttctgtcattgtttattggcctatcggattggttttactgcggttcggttatccctaaaccgaaccgaaccgactaattattttctcagtcactctaaactaatcgcttaaatttaagaggctttttaagaacacgtggcagcatataattgggttgctttgtcagacttttttatagcgttacacgacgacgcatgtcacgcatctaaacgccgtttccaaaacagcgttttgcgtctcgacaaacaacaatcaaaatctccttactctgtctccgtctctctggttttcgatttcgtgaatccaatttttgtgtgtatgtattcgcttcgtctctccatttttcttcgtcttacgtttacgtaatcca

SEQ ID NO: 14795 - DNA, 3000 bp, Unknown
  misc_feature (1)..( 3000): cDNA_ID_4265552_gDNA_ID_2684225_Annot_ID_137562 3000 nt of promoter + ATG
gaatcgatctctgcaactcctccatgtatgaggaagcgttgttgtccatgtcagcgtcatcagcaccaaagttttgatcatggatttgaagaatgcatgactcgagcttgtctcgcattgctttaaacaaaggtgtaactggctcacatgccgcatcatagattgcagccagataaggagacaatacatcagtagcaatactgggaaggtccgctaccatggatgagatatgtgtgtggattccttgcagatgctgacataatgtgaagttcctgatctgtgttgaagtcgcaggacctgatatctgccgcgtctcagggcctgtagaaatctgcaatataagtgtagctgtgttacatttcaaacataaacgcataagtagcagaataacttctttacactgttaactctaattatgtcaggtagttaacacgtatatatttgcatagtagaggtagatgtagctctaattctcttcatttctgtctggaagaaattataattgccccacgaattattactttgtactcaatctctcctatacaactgtatgcaactttaagaatttctatataatacaagcacaaattgataccatactaagggagctatcgcacataacaagaggacaataaccaacaagaggtctatcatacctggcactcagctcgttgagctaggttactaagggccttgcctatctcacgcaaaactagaagagtcaaacgagcatctggatgaacagcctcaatctcatcttgaatgtgtgataatacctgtgaaatctgttctttcgaaggtaaactcccacggctcgacatagggaatatcgagtttacaaggtctgacaagcggccaaagcatagggataagaaagcagtctggaatatagcaatgcatgcaaccatttgttctttcctttctaaattaatggcaggtaacactcctttaacatctgtatcacgagaaatcctttcaagaagattttctatcatagacacaagcttcggatatcccatggtgaatatttcttttacaaaactcgaagctgtgtatgcagacttcatttggctagtaaaagccttcacaagtgcatcccagactctatcggttaacatagaatcgccttcctgtgcatataaacacttcatgtaagcaataaaaccaattaaaaagttggaatctaaactaatcaacagccctgacaccacagaaacccatcccaaaacttccttttgatgcaaaaacattgaaggatcatctacttaaattgttcaaacatcatcgagctcgctaaaagtgacaagaaactctgatcctctcaatgatctaatgcagcttattcctcaggacattgacaatatctttaactaacgaataaacaaactcagggagcctaaaattccagttaaattccgcaccttgatgacttcgtcaagaagaaggacatgagtaaatggatccctcttcttagacagtacacgctgcaaatgccacacagcaactacaagtgaacacaactgttccatacaactagccatcctctgccacaacgcctccctaactttagcaccaccaccaatatgcggtgatccgctagacctaatcccaccaggcccgaagccaccacctgagccagaagtaatagctttcatatccatagcaacactcacactcttcacagccattcccttatacttattcaccaattgatccaccgtagacttaagctctccaaggttatagaaaacttgcaaaccagtcccaacttcagcttgattcaacccttccatgcctctctccaacaccttcatagcttcagatctcaatttctctccaatctcagtaacaaacttgatttcctcatcaatcacatcaatgccaaagagatcatactctttacacattgttaagatctcgaaatggaactgtgcagctttagtgagatcgatcttatctggatcaggaaaatccgctagatctcgaagcttcttagagagacgaagcgtacgaacggagtgagatagtaactcagtagctgtatggagattagatagctgaacagatttagatcggatcgatttgatcggttcagagaggtcggatctgacacggcgaattgaagattggagtgaagagacggaggatcggagagaagagagagatacatcggcgtgtgagagagaagagagctgagcgagcaattcagggtgacgagagatgacgtcattacggagctgtgaatcgaggaggcggattgcttggtggagacgttcggcggtggaggccggagatccagaagcgagagcggcggaggagaatgatgcggaggagaaggaagatgagaggaatggggagaggattggatcggtggcaaaagaatcgagcggcgaagaagaggaagatgacggtgtttgtggtggtggtgcgccggaggagagtgaagaaggaggagggtttttgaaggtggagagacgttgaagagatggagatgatggtgaaggagacgatggaggtagtgccatttttttacagtttcaatctctacaggttttgaattttgcaatggcgattttagcaggagatcaaagcgatactcatttttcaaagttaatctctgaaacaccaaaaaaaaaaaaaaaaaactcaaagcgaagttatacgatagtgaaccggtctactttaatttctgtgtctgaattttgttggttatctacgaaccggaattatcatttctggcatagtcaagtgatagatgtagtcatgtagggaatttgtatctggatgtgaaaaaaaaaaaaaacaattcctcctctaaatctcgtgatgtcataaattatgtaaatgtcagagattggtcctaaaagttggccactaagtggtgtaagaataataaattgtcaatatcaattgactgattcttattgttcatatacggacacaaatcttttcgttaagtgagtgttttgatcaaaaaaagttgaaaactttaaagccatg

SEQ ID NO: 14796 - DNA, 3000 bp, Unknown
  misc_feature (1)..( 3000): cDNA_ID_2730887_gDNA_ID_2684225_Annot_ID_137563 3000 nt of promoter + ATG
tttttagatctaatcagaaaggagttacatgctacgattttgtggataaaaccactgttctcttgttctgtgatgaagtctgagatctctctttactgtgtcggtgttattaaaaaaaaaacagaactttttttgtttctcgagttttttttttttgaatccagattctgttccacagatgctaatttcaatcatagtatcaatctcaattgaaagtttctggctttggatgaattaattcaaaataaatttgagtattgatgatctctccacaggctgctttcattgattcggatcaaactcagcacaacattcttatggattcccaatcaactgtctccggtgtaagcaaccaacatttctcaaactttcatcttcgctgtgttatgggattatctttgtattgttgttgtaaagctgtctgttcaaaggctttgtattgattcattgttgtgcaggtgaaaactgtcaagattagcaatgtttcactaattgtttctaagaaagatgtcaaagagttcttttctttctctggtgacattcaatacgtcgagatgcgaaggtatgaaaaataacttgttgtaaattatcatcttcttgttaaagatgatctttaccaatatctctaatgtttactctaatgatctcagtgagacacaagagagtcaggtcgcatatgttacttttaaggattcacaaggagctgaaactgcaatgctcttaacggtattttgctttccgcgtatgcatcattccgtatatttcatgaattagtgcttacagcgaaaaacatttccttccagggagctgtcattgcagatcttcgtgttagtataactcctgctgttaactatcagctaccaccagaagcccttgcacttgactcggtaaagaccggaaactctttgatttattcgttactctctcggtgttcatgttgtttcctctgtgtagcaggaacattcgtttaatggtttttctgtcaagaaagctgaagatgtggtgaacatcatggtgggaagaggttatgctcttggaaaagacgccatggagaaagccaaagcatttgatgacagacacaacttgatctcaaacgcttctgcaaccattgcatcgcttgacgataagatgggtctgagcgaaaagctaagcataggaacaactgtggttaatgagaagttgagagatatcgatgagcgatatcaggtgagggagataacgaaatctgctttagcagctgctgaagagacagcaatcagtgcaagaacggctttaatggcaaacccttatgtatcaagtggagcttcgtggttttcaaacgcgtttggcgcagtgacaaaggcggttaaagagaaagttgagaatggaggagaaggaagaaaggagatcatcacacttgatccctcttcacccaaagttcctgctgtagttcctgttaagctcggttgatgcagatctcatcaaaccaatcggatctcgactaaattctttgataggtttgttgttcatatatatgctttcgtatgctaaagagaagataaaaagacataaaccatgaaaggtgttgttacattcaaccagcatttgttcctctcttgaaagagattattaagattcaagcaaaatagcaaataacttgcaggaaccatcaatgagaaaatggtctcaagaactgagttgaagaaacctctgtgccattggatgcgtagcgtgcgaaagctcacttggtttaagaacttcaacaatctctccgtcgacaacaaggcaaacgatatcagcaactttctgaatctgcttgatactgtgagaaacaatcacagtagtaatccctctctgcttcttcagtttcactataacatcctcaatgttctctgtcgatatcggatcaagagcacttgttggttcatcgagcagcaacacctcaggctcgttggctagagtccttgcaagtgctactcgttgagcttgacccacagataactctgcaccagtcttcttagcaaaggaagcatcaaggtctgcaagacttagcagcttataaacctcttcgtcacttagtttctcccctctcaaattcggaccatatctcacattatccgcaacagtccctgtaaccaaccacacattatcaagacctatgaaactagaggctaagcaaatcccaaaatttgattattaccttgaaaaagaacaggaagctgaaaaagcattccaactctacgacgaagagcaataacatcaacgttggttatatcttcaccgtccaagaacacagttgactccggtggttcccaaagacgattcagagatctcaaaaacgttgactttccacttccactaggtccaatcacaccaacgatcataccttttggtatatctatcgtaactcctttcaagatccgagatccatcatcggcgactcgggtcagatcatgtacccgaatctttggttctgaaccagacacaacaacatccacaagatgctctcgtaatgatccatcggattcgttagaccaaagtgatggcatggctttaaagttttcaactttttttgatcaaaacactcacttaacgaaaagatttgtgtccgtatatgaacaataagaatcagtcaattgatattgacaatttattattcttacaccacttagtggccaacttttaggaccaatctctgacatttacataatttatgacatcacgagatttagaggaggaattgttttttttttttttcacatccagatacaaattccctacatgactacatctatcacttgactatgccagaaatgataattccggttcgtagataaccaacaaaattcagacacagaaattaaagtagaccggttcactatcgtataacttcgctttgagttttttttttttttttttggtgtttcagagattaactttgaaaaatgagtatcgctttgatctcctgctaaaatcgccattgcaaaattcaaaacctgtagagattgaaactgtaaaaaa

SEQ ID NO: 14797 - DNA, 3000 bp, Unknown
  misc_feature (1)..( 3000): cDNA_ID_2730879_gDNA_ID_2684225_Annot_ID_137567 3000 nt of promoter + ATG
ctcgcttatacgtctaaaacagaaactgcaatgccaccctgaatccgccaagataacatcagactgtcgataatgcgcataccttgttttacccgtctggtatctatgcaccgatgctctccagctcttatcatcaacagggaactcaaaagagtacaagtaattcttcagtctaagatgaagaatttgtggtatgtcatcgcaccaacggagaagatttatcgtatgtctactcggaatctcatcaacatcagacataatcaacaagtcatcatcagtgataccagctattctcaatagctgatccaatgcgattctttgataagcctcttcgtaaaaaggattcttctcacctttcttaaaccttcctcctatcgacccgtaagtcaaccgtggctcgataaacttaaactcatccctatgccccgcgaaaacaagcggttttggtaatccggtgaaagtcgagttagattcaagtagaacaaactgagtaacatatgggtacagttctttccaccgtatcgtgaggagttcaacttcagtactgaacaaaacagcgtcgtagacacgacgagggtactcacgggttctccaaccgtggagtttacagagagattccatagaagcgttctcgtggtgataatgcggtatctcatggaatggttttggtggtgattcccataaaggtctcaagaaatatgaaatcttgagagcgttaatgtatacaccaagaacacacattggcatgattactaacagaaacagaaccgattttaaatccacaccacgcaagatacaacagagtcttgaaataccaaagcctcgatctgattcctgattccaaaccaaagagaaaaattgtcgattcgctgactaaaaccaaacaagagatgttgaccaatctaagcaagtgcagagagatcaatctaattcaagagaataagattccgcaagatctatgatatagatccaaaagggttctttgagcattgactaaagatcttgtttttatcaagaagaagaaaatcacaaacctgagttccgcataaatcatcggactttttagaacagtagtgaccaccgttttctcccatcatccaccacatctttcttcgaacaagaactcgatttgagatataaagaaccaaactttaccacaaataaacagaatcttagagattggtttcaacaagagatagaaaaaacacacgaattaaagaatccaagcctaaaaaggggagattttgaaagaattaaagaataaacagagcaaaaacagaggtttttttttttatgtgattgtgtctatgatgataaatggatattgtctcgaggaactaacaagagagaaaaggggtaattaggtcaatgaggaaagtttcaacgttagttccgttgcttggctttgattgatgaagtattatcatttatcattctctccacaccacgcgttgtgtgactcagtcccccacttccagcttttgtcgtgtctttttagttgaaaaagctcagaatcacttatgtactctttcttttctcttcaaccaccacgtggcttccactctaaaatatacacaaataatactatctaatttaatcataaacttagacaatctgtatataatatactctgatgtcaacagttttttagtataagctaagtattcatattagggagagttttggaaagtactaagtaattgcataaagttctgaaaaaaagcactcaccaagtttgagacctagaaaaatgcatatctgacactgttggtttcctgggtctatttgttgcttttatctattgatttttctttaaaaaaaaataaaaatgatacaagccgaaaagagaaattaaaagcccaaaaggcccaataccgaatggtgaaacataggtttgctgctggagtaataaaacctatccggaggaggagaaattccggcatagttgctccctcttctgtgttatttgtgttgatctatgcccatgcattttctcatgcgagggaccaaaacattttatgtggcacctcccaaagtatttgaaaattgttgtcaatacttcatttactttgatggttaatctttttttttttcctctgatggttgagagtcttgagacttacgagtagacaattcgttttatgtgtgtttttgtttaattatgtgtcataaactcatactaaaatagaatctcatactaacaataacaacaaattcgggaagagtaatcaaaattttcatcgcttcatataactcctttaatttcaccgctatggttgagtcgatagaccaaaattctatttatgatttacttcgatttttttttttttaactctaatcattgattataaacctaaaccgttttcatttttataaaatacatatatatttttagtcaaaaaaatccattctttaccatttatttttatttttttgaatagaatataaattttatttaaaaactcattttacattaaatgtaacggtaacttaaacattttgactaaacattactaaatggttgaattttttttttaagatctttcttatctcatagcaaactaaatcgccatatatcctccctcgtatcttccgtctccttcttctctaccacttgtatttctccatatatctatattctttttacttggtcaaatccataaatttgtatcactcaggtgttattgaacacaagttgaagaaggaaaaaaaaacaagttgaaagaaaagtagcaaaaccgaaactaaaaaaaagaaagaaaatagtaagaacaaaatgaaaacgctaaaatcagaaataaaagaatcaaagaagcaaagataagcaaaacaagttttccaaaattgttgactctcttttacaactacacaaaaacctttcttcaaaatattctcagattctcttcttcttccttcgagctttcacagttgattcaattcccgatttcaaactcaatcaccttcagattccgatctccattctctacatcaatcacaatg

SEQ ID NO: 14798 - DNA, 3000 bp, Unknown
  misc_feature (1)..( 3000): cDNA_ID_2730875_gDNA_ID_2684225_Annot_ID_137568 3000 nt of promoter + ATG
taaaatttagactacacttgtcaaaagatgcaacaatataccaaaaggtcagaatatgtaacctacagttagactaaccaaatctgagatcttagatgctatagcagcttgaataggctgctgagaatcaaggccaagtttcgacacaacagcttctttggaatcaaaaccaagcctagaagcaacaccattagtcccccggcaaaagcttgaatccccttcttgccacctgtttttagcgggaggaactctcggccgttgaaaaagtgccgaatcattcgtgatacatataatcccaataagcaaaccatcatcatcataaaaaggagaaatcgtagtcacaaccgaaaacctctctcccattttattcttaacaggaaactctccagtccaactctctccactgctgcaacgctgaaagatattttttgcaacagcagcatcttgaccatctacgagtatattaatcgagtccttccctaacgcttctgcagctgagaatccataaagcttctccgccatcgagttcctaaaacaaccattccaacaaaatttgaactgtgaacataacttagctaacatatcagatactaaatcctatactacaaacgataccaacactctctaatcaatcgattccaagagctcctatatgaatccaaatcacaatcctagcatttgactactaattatgaagaaacaatgggaaccaaaaaagttctacctactcaccaaaagataatttggccattaagatcgaagacatgaacagcttgagccatagactgcaaaatattcaaatactgtttatcggtgaacttgcctgccgatggtccatcaccaccaccagctactccgtctttagaatgactctctttccgtaacggagaagcgtgacggaacgatgcggcgccggtttttctccataacggagttccttctccactgtttctccttgaaggtcgtttaggtgatgaagaatgcgaacgccttttaatctctgctgatactttgagttttgacatctctcgctttagatcttcttggctttcttctagctctcgtatcttcttcaatagcttctctgctggtggattcggattctccattgtgattgatgtagagaatggagatcggaatctgaaggtgattgagtttgaaatcgggaattgaatcaactgtgaaagctcgaaggaagaagaagagaatctgagaatattttgaagaaaggtttttgtgtagttgtaaaagagagtcaacaattttggaaaacttgttttgcttatctttgcttctttgattcttttatttctgattttagcgttttcattttgttcttactattttctttcttttttttagtttcggttttgctacttttctttcaacttgtttttttttccttcttcaacttgtgttcaataacacctgagtgatacaaatttatggatttgaccaagtaaaaagaatatagatatatggagaaatacaagtggtagagaagaaggagacggaagatacgagggaggatatatggcgatttagtttgctatgagataagaaagatcttaaaaaaaaaattcaaccatttagtaatgtttagtcaaaatgtttaagttaccgttacatttaatgtaaaatgagtttttaaataaaatttatattctattcaaaaaaataaaaataaatggtaaagaatggatttttttgactaaaaatatatatgtattttataaaaatgaaaacggtttaggtttataatcaatgattagagttaaaaaaaaaaaaatcgaagtaaatcataaatagaattttggtctatcgactcaaccatagcggtgaaattaaaggagttatatgaagcgatgaaaattttgattactcttcccgaatttgttgttattgttagtatgagattctattttagtatgagtttatgacacataattaaacaaaaacacacataaaacgaattgtctactcgtaagtctcaagactctcaaccatcagaggaaaaaaaaaaagattaaccatcaaagtaaatgaagtattgacaacaattttcaaatactttgggaggtgccacataaaatgttttggtccctcgcatgagaaaatgcatgggcatagatcaacacaaataacacagaagagggagcaactatgccggaatttctcctcctccggataggttttattactccagcagcaaacctatgtttcaccattcggtattgggccttttgggcttttaatttctcttttcggcttgtatcatttttatttttttttaaagaaaaatcaatagataaaagcaacaaatagacccaggaaaccaacagtgtcagatatgcatttttctaggtctcaaacttggtgagtgctttttttcagaactttatgcaattacttagtactttccaaaactctccctaatatgaatacttagcttatactaaaaaactgttgacatcagagtatattatatacagattgtctaagtttatgattaaattagatagtattatttgtgtatattttagagtggaagccacgtggtggttgaagagaaaagaaagagtacataagtgattctgagctttttcaactaaaaagacacgacaaaagctggaagtgggggactgagtcacacaacgcgtggtgtggagagaatgataaatgataatacttcatcaatcaaagccaagcaacggaactaacgttgaaactttcctcattgacctaattaccccttttctctcttgttagttcctcgagacaatatccatttatcatcatagacacaatcacataaaaaaaaaaacctctgtttttgctctgtttattctttaattctttcaaaatctcccctttttaggcttggattctttaattcgtgtgttttttctatctcttgttgaaaccaatctctaagattctgtttatttgtggtaaagtttggttctttatatctcaaatcgagttcttgttcgaagaaag

SEQ ID NO: 14799 - DNA, 3000 bp, Unknown
  misc_feature (1)..( 3000): cDNA_ID_4265548_gDNA_ID_2684225_Annot_ID_191958 3000 nt of promoter + ATG
ttatatttttatctctttgggattttttctaagacaagtttttgttattcggcacaaatcgaagatggtgagtgtggtatagtccacgttatggcatatgcttgcacgacgagcaagccagtgaacaaaatatgtcatgtcaatgtattttctattgctgaaactatacaaaaatggacactaaccagaccggccagtgtcacatggctatgttactggggaaagagtatgcggaaaataaattaaagtatataagagaagatgatagaaatatttaacgaagtattgattgattctttattggggaaaaaaaagaaaagagtataggttgttgatctatcaaaccgacttttagtgttaggctgcaaatgattgatacctctcagaaacatgtatacatgcatgttttctttttgtcgacgaaaaatgtgtacatgttaattataaatatatatgtgtacacaacataatttacgatataaaaaaaacgaatccttaataatcacttcaatcgttttatggatgttttatgtataccattattagaatatgaatttctaactcaaaactaattagtaataagtgaaaaagtttatatttatatatgtcatttaaagttttactcaatttctactgtgagatattattaaccctaatattatattaatttaaagtaaaaactagatcatacttagtcaattattatccaatcgcaagaaatccctccaattaaaatgcgtgtagccaatgttggcgaggttatctacaattgaccaaggattgtagacatgcaatatgttgtagttcctttctttcaggttttgaagtctccaagtaaaaccacgatcgccactgataagcatcacattcgccaatgtgcgactggtgcaagtccaaaacacaatcctcctttgaatttctttgtcactggcttgtttttctttattctcaagataatggtactcgaccccattgtcttcctatgttcgttgaatttcaggggaagaacacgtttataatttgccgcaactggaacaatctttataggtcttatgtatccttatccctcaacacagctttaaccgtaggaccaaaagtggtgggatcactatcatgtggaaccccacaaaattctatgtacaacattgtcaaggtccaagctctcgcatagattggagtgtgcatgcagtactcgtcgacaacatcggcactatttatctgtaaaaaaaacaaattttgtgacatttactaagttcagagcaaagattaacaaagtaagttgttcagttctaatttcaatgcctcaaattaaaaatctccgatagaaaagtggtcttagtgttttagtctagtcttaaaggactcattcaagtgattacatgttcaaaaacatatgtctaagactgatatatgaacatcaagcaagaagtcatggggacaaatctagtacacaagatcataaggattgaatcgaagatacaatgagtaaggatctcaactcgaaattgatgaagctaagacttgaaggacataagcaagaatggagaaaacaacgttccagtgatgtcatcaagactagatgaattgcattgcagttctaatgtgaataagattattcacgtattagtaataaacacatcagaagttgactaataagattattcacgtattagtaataaacatatgctatgctaactttaagctttatgttcttaggaaatttgagaaaaatgacccaaaaaaaaacaataatgaactcaatgaccatataacttatacggcaggatcctgcatataattaacccaaataataatcccttaaattggtaaaatgtggatttcaccccatcctcccacctccctcctctttctaatgttaaattgttggggcaaaattgatatgtaagttcgtctatgggagggaattaagtttccgctgagtaataaacaaacaagtgcaaacctaggaattcaacaccaatgtaattttttataattttgtaggactctttaatagtcaagtcagtatttaaaccacaagagtcggtcagaaaccagaaaaactagaaacaagttatgtcagttctaagaagagagatgtgcaatgtattcggcaatcgggtatatcatctaacattttagccagtgaaaaaagagaaagatatgaggatttttccattgttcagtaagctaagagaagacagtttcattaaagagtcgaatagaatggatattctcatgaaactgagaaggttaagtttttttggggaatactttgcatgcctttatataggtgaagagtcatgttgcatagctccgaggcatttcagcttataagtatccatgtctcgactcatatgatgaatggacttgatgaagggactaggcaatcgatcgtcagtgcgggtgaattttgacgtcttgagtccatccgaccattcaaaagaaagtattcttcttaccacgtagcatgtgactttacctagagttcgtggagcacaagtagaacaaataggattatgcctaaacacctttagaactagaccaaaggtcaaaaactatcaaaacaagttttttacgctacatggtttacataaaaaaattaagtgatacactcaatgatgaataacaatattaacccaaacaaatttgatatcaaaacacagtataaccaaaatcaaaaccgtagtggaactaaactagattatataatatgcctccataaatactcggattttccacgtgaattggactaatcattaattaggaagaacggaatcagaataaatatgtctactcaactttcggtatggtggtggtagaaaagagaataagattcaaagcatattacgaattattgccatatgggatcatatctaacacaaatttaaaagaacactctactactacagtacaaaattgtatatatataaacacctgaaagattttaattacttatccctatcaaagaaactaacacaagtataaatttacagaaaa

SEQ ID NO: 14800 - DNA, 3000 bp, Unknown; identical to SEQ ID NO: 14798
  misc_feature (1)..( 3000): cDNA_ID_2730875_gDNA_ID_2684225_Annot_ID_191957 3000 nt of promoter + ATG

SEQ ID NO: 14801 - DNA, 3000 bp, Unknown; identical to SEQ ID NO: 14796
  misc_feature (1)..( 3000): cDNA_ID_3019044_gDNA_ID_2684225_Annot_ID_191950 3000 nt of promoter + ATG

SEQ ID NO: 14802 - DNA, 3000 bp, Unknown; identical to SEQ ID NO: 14795
  misc_feature (1)..( 3000): cDNA_ID_4265552_gDNA_ID_2684225_Annot_ID_191949 3000 nt of promoter + ATG

SEQ ID NO: 14803 - DNA, 3000 bp, Unknown; identical to SEQ ID NO: 14794
  misc_feature (1)..( 3000): cDNA_ID_3019048_gDNA_ID_2684225_Annot_ID_191947 3000 nt of promoter + ATG

SEQ ID NO: 14804 - DNA, 3000 bp, Unknown; identical to SEQ ID NO: 14793
  misc_feature (1)..( 3000): cDNA_ID_2685667_gDNA_ID_2684225_Annot_ID_191946 3000 nt of promoter + ATG

SEQ ID NO: 14805 - DNA, 3000 bp, Unknown; identical to SEQ ID NO: 14792
  misc_feature (1)..( 3000): cDNA_ID_2730895_gDNA_ID_2684225_Annot_ID_191945 3000 nt of promoter + ATG

SEQ ID NO: 14806 - DNA, 3000 bp, Unknown; identical to SEQ ID NO: 14791
  misc_feature (1)..( 3000): cDNA_ID_2994211_gDNA_ID_2684225_Annot_ID_191944 3000 nt of promoter + ATG

SEQ ID NO: 14807 - DNA, 3000 bp, Unknown; identical to SEQ ID NO: 14790
  misc_feature (1)..( 3000): cDNA_ID_2730907_gDNA_ID_2684225_Annot_ID_191942 3000 nt of promoter + ATG

SEQ ID NO: 14808 - DNA, 3000 bp, Unknown; identical to SEQ ID NO: 14789
  misc_feature (1)..( 3000): cDNA_ID_3019052_gDNA_ID_2684225_Annot_ID_191941 3000 nt of promoter + ATG

SEQ ID NO: 14809 - DNA, 3000 bp, Unknown; identical to SEQ ID NO: 14787
  misc_feature (1)..( 3000): cDNA_ID_2730923_gDNA_ID_2684225_Annot_ID_191937 3000 nt of promoter + ATG

SEQ ID NO: 14810 - DNA, 3000 bp, Unknown; identical to SEQ ID NO: 14784
  misc_feature (1)..( 3000): cDNA_ID_2730950_gDNA_ID_2684225_Annot_ID_191929 3000 nt of promoter + ATG

SEQ ID NO: 14811 - DNA, 3000 bp, Unknown; identical to SEQ ID NO: 14799
  misc_feature (1)..( 3000): cDNA_ID_2730871_gDNA_ID_2684225_Annot_ID_137569 3000 nt of promoter + ATG

SEQ ID NO: 14812 - DNA, 3000 bp, Unknown; identical to SEQ ID NO: 10550
  misc_feature (1)..( 3000): cDNA_ID_2715851_gDNA_ID_2684226_Annot_ID_137575 3000 nt of promoter + ATG

SEQ ID NO: 14813 - DNA, 3000 bp, Unknown; identical to SEQ ID NO: 10549
  misc_feature (1)..( 3000): cDNA_ID_2730998_gDNA_ID_2684226_Annot_ID_137576 3000 nt of promoter + ATG

SEQ ID NO: 14814 - DNA, 3000 bp, Unknown; identical to SEQ ID NO: 10548
  misc_feature (1)..( 3000): cDNA_ID_2730994_gDNA_ID_2684226_Annot_ID_137579 3000 nt of promoter + ATG

SEQ ID NO: 14815 - DNA, 3000 bp, Unknown
  misc_feature (1)..( 3000): cDNA_ID_2730990_gDNA_ID_2684226_Annot_ID_137580 3000 nt of promoter + ATG
cttggctttgagctgtagcaaagaaaagaaaaaacatataaatcggactttttcctgcataaatccaatggttcagctgcaaaacaaatcacgcttaatctattatacaatcctacaacaagtaccatagaatgctatagagagtattcaggcttaaatctccaggaggctgtgtcagtcatacaggaagagttaaccacagaaatagaaaaagacttacttgttagttgcattggcatcacaataacctcgtaattcaggaggaaccctgaattccattctctgatatctgaaacacaattattcaatggagatataagtgaaaactagtcattatgcacccatctgtgtgtattaccatttcacctaaaaaatgtcacaaaccatacaataagaatatacaaatcaatgtcttaaaagagaacttacacacgagactcaggatcattccgtggatcatagcctcttttaatccagaacctaagaaacggaccactggagaaataatatgcagctctgagcagaaacctgcagagagaccaaattgatcaatatagtactaaaaacacctcagtataagaaccccgtattagaaagctatatcacctgtttaacatatgatgtgtacatttaagacctttatcaagtagtcgttgaacaacagaatcccttgtccatataggccgctcctcaaacaatgcagacactgctacctgccattgccagtggttggagctgcgagaaacaaagtcttcccacttcagtttctttgggatctgtattgaaagctaaggacagaccaagcaaatacagctctttctactcgccagataagaaaatgtcaaagaatattggaagaagaactagcatataagaaaaaggatatctttgacgctgaaatcaattgcaaacactgggccaacatcaatctgcacataaaagaaaatagtcatgacatagatcaattaggatatggcaaccgaaaataaactataaggaagctgtcatggcatctttgaaatccaaaaatgaacagaacgcattcttgacggttcattagagtgaaaccaagagtttttacatgcttcaaatcttttactactgcatttgaaggattgagatataagttctctaatttcatgccaaacctctctaatttccgcaagatgaaggttagatatttaaagtcatgagttcctaactgtctattccgcaagatgttttgtttatttagaaagctcatatgcttcaatttctttatttttacctcataaaagttctgagtcgctgcatcatctttcttcttgggaccagatgtcgccggaggtttcaacctgtaatcacacaagaaaattgaaatcagcactgtaatcaactataagtaaatggcttatgccaccgaataagaaatagaaaaaggcagtgtaatcttacgccacattgtccggtatatctttgggtgcaaagaactgtggcaataacatcattacatcttcatcagccaggcccatcaaatcactttttcctgcatatatatccgatctagtttaggtgagcacaccacaagaaatctggaataaattggaaaaaaagagaaaatcaatatccgaagttgatcttgtacctgtaaggggatccacatccatccactttctctttttctgctgcgcaatgtccgcgtgaataggaataacatgctgatagtcagccatgcctagacaacgaagaagagggaaaaatcttgaaacacttttagaggcataagaaccaagcaaaaggagaggtaagtttttaccatcaaagtgaaacgattcagacaaacgagctacgatatctgcacatagaactggactagcttcctctaaacatacatccctactagtgtcaagaacagactgactttcaggtttcttgatatcctgcttagaaattcttaacaaaaaaccactacaaggacgttgttctcccaatgcaggatgtgcataaggatcttcaggccgaaaccgtagctcaagcttatttgaaattgattcccttgcctaccatataaaaataaaagactcaaactgaataaatcgtgcaacaaatttaacaaaagctggtggatgcatataccaagactgtaacaacatataggctttaaaaccactctatgaactagcatatgaagacaatctcagtaaaaggaagagactttaaaaccaaaattgaaagattttacttgtgtaattccttggatacctccaagtgtttcaatagctcgagaaatagaagatgggtaaccagggaagtgtactacaaacgcctccttgcttggcaaggtacctgagattgttccttcttctataattcccattgattctttccagagattactctcttctgtaaaacaaagagataaatccaatgccaatgcaattagagaattataatgtgtatatatattcctatagattttcagttttatatgtgcttcattgtgtcgccttttgccgacggagagttaggaaaacgaatggtgaatttaacaaagatcggaaatttataattcaggaacttcagactcaccggaaatacgaattttttttgcctcaaattcttcggtttcccgacatcggcgacggcgaatattttcaaaacccttaatttgaactttttacttatttgggcctattgcttaagcaaaaacgacatcgttttattaaataaagagattataaagccgtcacttgcgcttcgaactctggtctccgtatttggactcaaaaggatttgggcttagcccatcatctaaccgacaccgttttaaaaaacgagcacgttgactttttgttaaactcgggaagaaataaataattgaggatctgatctgcgtcactgcgattcgaactagggtttccgtactgaatcaacttcatcagttcgtttcgttgtcaaaagcaaagcagagcaagttttattttccctccaaaattctaagttgatcttcactttttgatg

SEQ ID NO: 14816 - DNA, 3000 bp, Unknown
  misc_feature (1)..( 3000): cDNA_ID_2730986_gDNA_ID_2684226_Annot_ID_137581 3000 nt of promoter + ATG
gctatgggtctgaactatagcagtaagttccaccatgggagatacattgctgcgttcaatgtgatagcattcaggtgcatgaactttccatatggaaacgctcccggactttgaaccaattgccaaaagagagaatcttaacatattcccacaagaactttctgatgagaatcttagaagagatgaccaggcaacggaatgggaggataataatgcctcacgagacacatacgtttgcggacttatctcttgactgcatttttttagagctttaggcaaggaacgacgatcttggccattgcttgcctgtttatatacttcaatctcaagtacctgggaatataaggaatcgagttagatatgagtacaatgcgacgatttgattcttactagatgacacttgagagtgggagtgtcaaacttctaagaaccatatggtgtgaacgatgcattaaaggattcaggtggaattcaaaagcatgacaagattcgaaatgcatcaaatcaatgacaagacaatataaaaaccacacacatgttctttctataagaacactggagggaggtacaaaatgtcaaaatctactcaagatactaatttacttgatgaaatgacctagtttcttattaattactaatcctaacaaaaagagtttccacaaaaacaacggataagatacaatctgcaggaacagagttagaatctgaaacttgttacagaatacactacaaagtgaggaacagaaataagttggaggaatcatgatagtattttttcaaagcaatgcactacaacagaaagaagttaagagatatgaggacttacattatgctctgctttactgtcttgcttggaacatgatgctcgatctgtataattcttttcatgcaagttgctaaaacaaagaaagtaagttagtcaagtgatcaaaacagaaaaaagaatatggaaaacaatttctcaaaccactggtatgcatctgacgaaattgaagagtgaaagaaatgctctttacatgttatttgcacttgtttttcttcgcttgcgtgccttcagacttgaaatcctttcatcctcctcatggtcatgttctaccacttgatcctgttataaaagagcacaaatcatttcaataatatagtttggataaaaatattatgcagacaaacatcaacaattccatcaaaacgcaataccttccacaacaacatttgtccattaataaaggataactaaagatataaacgatttgtttagatgcgtctttatctaaatgtgaagagtacgaagtataaactatctacatatcccttataggaaacacatacatatagtttgcgggagtagtaagtcatccttcatggttatcaaacttccactgaaaacactttagagatacaagttaccttagataatgaagtagaaggatttttggactctccaaagttcatgcttgatagattctcataaagcattttagatatatcaacaatctgcgaaagagaggagaaagcaactttaaatgcataggttagttataaaaggcgaaagagaatttacgacctacctcaatccactcagcacagaaatcagaatatggaggtcggtatagcttaacccttccttccgctgtgcaaacagccagtaagcacctgagcagagttatttgaatcacgaatttaggaaatagagaaacaaaacaaaactgaacatgttacaagaaatacagtacccgtggtttggagacattcctatctcagaccatgagagagatcgaacacatggacttctttcccgcttcaaactcgaaggcaagagtccaccagttagcaaatctacaatcacatcatcactcacattgttatccgaaacttctgaatgatcgaaaacacagaaaccaacagaaatttggtctacaaacacacaacttcatgaagaactaaacagttgcaaaagattgaatttttatcttcaaatctgaattggcaaacatacaggcaggattttgaaatttgatctgaattttcataaaacaggtacaccaaaattctgtatttatcaataaaaaaaacagaccttgagagcgaacacgaccaatctgataaagctcggcgtcagagattgtgatcaatccacgagggccagtaggcaaagccggattctgacaattacaaaagtcatcaatacaatttaaaaagactcaaactttaacctcaaaaaacgaagcagaagaaaacttacaatgatgatgactagatgaccagcagcgacggcgatgagattttccgatgaccaagcgacggcgttaggatacgacggtgaagtaaccagtgaagcttcctgaaaccgcgacgccatcaaaaagtgaagatcaacttagaattttggagggaaaataaaacttgctctgctttgcttttgacaacgaaacgaactgatgaagttgattcagtacggaaaccctagttcgaatcgcagtgacgcagatcagatcctcaattatttatttcttcccgagtttaacaaaaagtcaacgtgctcgttttttaaaacggtgtcggttagatgatgggctaagcccaaatccttttgagtccaaatacggagaccagagttcgaagcgcaagtgacggctttataatctctttatttaataaaacgatgtcgtttttgcttaagcaataggcccaaataagtaaaaagttcaaattaagggttttgaaaatattcgccgtcgccgatgtcgggaaaccgaagaatttgaggcaaaaaaaattcgtatttccggtgagtctgaagttcctgaattataaatttccgatctttgttaaattcaccattcgttttcctaactctccgtcggcaaaaggcgacacaatgaagcacatataaaactgaaaatctataggaatatatatacacattataattctctaattgcattggcattggatttatctctttgttttacagaagagagtaatctctggaaagaatca

SEQ ID NO: 14817 - DNA, 3000 bp, Unknown; identical to SEQ ID NO: 14504
  misc_feature (1)..( 3000): cDNA_ID_3017649_gDNA_ID_2684226_Annot_ID_137586 3000 nt of promoter + ATG

SEQ ID NO: 14818 - DNA, 3000 bp, Unknown; identical to SEQ ID NO: 14506
  misc_feature (1)..( 3000): cDNA_ID_2730144_gDNA_ID_2684226_Annot_ID_192002 3000 nt of promoter + ATG

SEQ ID NO: 14819 - DNA, 3000 bp, Unknown; identical to SEQ ID NO: 14505
  misc_feature (1)..( 3000): cDNA_ID_2730148_gDNA_ID_2684226_Annot_ID_192001 3000 nt of promoter + ATG

SEQ ID NO: 14820 - DNA, 3000 bp, Unknown; identical to SEQ ID NO: 14504
  misc_feature (1)..( 3000): cDNA_ID_3017649_gDNA_ID_2684226_Annot_ID_191999 3000 nt of promoter + ATG

SEQ ID NO: 14821 - DNA, 3000 bp, Unknown; identical to SEQ ID NO: 14816
  misc_feature (1)..( 3000): cDNA_ID_3019126_gDNA_ID_2684226_Annot_ID_191993 3000 nt of promoter + ATG

SEQ ID NO: 14822 - DNA, 3000 bp, Unknown; identical to SEQ ID NO: 10548
  misc_feature (1)..( 3000): cDNA_ID_2730994_gDNA_ID_2684226_Annot_ID_191991 3000 nt of promoter + ATG

SEQ ID NO: 14823 - DNA, 3000 bp, Unknown; identical to SEQ ID NO: 10549
  misc_feature (1)..( 3000): cDNA_ID_2730998_gDNA_ID_2684226_Annot_ID_191987 3000 nt of promoter + ATG

SEQ ID NO: 14824 - DNA, 3000 bp, Unknown; identical to SEQ ID NO: 14505
  misc_feature (1)..( 3000): cDNA_ID_2730961_gDNA_ID_2684226_Annot_ID_137588 3000 nt of promoter + ATG

SEQ ID NO: 14825 - DNA, 3000 bp, Unknown; identical to SEQ ID NO: 14506
  misc_feature (1)..( 3000): cDNA_ID_2730144_gDNA_ID_2684226_Annot_ID_137589 3000 nt of promoter + ATG

SEQ ID NO: 14826 - DNA, 3000 bp, Unknown
  misc_feature (1)..( 3000): cDNA_ID_2731031_gDNA_ID_2684227_Annot_ID_137594 3000 nt of promoter + ATG
atacatacgtatagataaatacagatacatgaaatatatatgtatagaagtaggtatgatatgtgcctagtgataggctcagaactacactaaaaatgttgcagctaactgttaaatagcaatcaatctacactgccatcgattcaaacactctgcaccgtcgtgcagtccaagaagcagaagaatgtttaaagttgctgccttaatatttgttttctcatttgcatttccatttacattacatgcatgctcttaactcttcatttaccattctctcatttcttatgttaattaatgtctctattgacttaattaattacgaaaatctcttgatggaaacttgtgtagaagttttatattgtcacgtgggggggacatgatcttaacttgcagtttcaaatattttaaccaatttaaaatatttttttcacaaatatctttgagtttaagttgaaattttaaaaagaccgagttgttgttatcattgtgagtaaaatagttttgttgtaactcaaagttttgtatctttctgcttctactgaagctaggaatagaagtctagtagctaggttatatagtttcatatatatacgctcttgccaaatagtacagtatatacgtataagtatataacttttctatgaataaattagtgatcccttgattgtgagaataatataaaatcaaaatatatatgatgatacgtctgaatccaaaaatttatgaataaaccatgtttttttagattcgttgaaatatcttcatattaccgaaatcaataaacaaatagacaaaatcctaatcatagagctatagaaaaataattcatattaataaacataactgacatgtttgagaaaacataagtagattatctataagaactttaaaatccatatataatccgtgcaaaaccctaaaacactatcctacctaaaatagaaaaactattaaaatacaccaatacaaaaataattcatattaatcctaatcatagagctatgtaaaaatgttatattaatctatagataaagcgactccatacaaatttaaattaacgtatacgaattaatatcagttgcattaacatatacagtaaatgttatttacctgtacctattgatgaaaataggaaagaagagattttcctttttgatatctgaaacagttataataatagacctatagtagccttgccgcatgcaaccatgctactctatttaccattaattagcctcattgttttttattctctctcatttgttttcttttgaaccacacacaagagaactctcattaaacaattgcagatgaaatcaagtacgaactctaagattcataaatcaaataaactatttgttgtgatcagttcgatccgaaaagttaaatagattttcataggcttaggtttatttcattataccatatcacaagtacttttactctgatctggttatgtttagcataatatcatcattaagcttaagttagcattagcatacgagatatttgtatataaggcaacattgtatagttttacacttcattgagaaaatagtcagtttcatacgatctctctctcttactttactctttcactctcagaggtttgttacgaagaaatcttgaccttgttgaaacccttcggatattatttaatcagttttattttccttttgctattcagtgtatatgttctatattttccataaaatctaaaagttctctgttctttcttttttttcggtgcaaatatattcaaatgatgtatatattgtaatcattgtgggccttatcaacttactgaactctatcttcattcttttgaagtaacaaggcctcaatatttggaagcccagaagaatgggctttattaagtaagacaaatgcatctcttccttggtgtttttctactcgtcgtggacgtggacctaacgtcgacagatattttgtgtgttacccgattgatttagtgctttagtttgacgaaacaatagtatgtgtggcatcttacatgtctttttattcttccaaatacgtatggtgtttgaggcttaatttgttttgaaaagtttctactgctccacttgtttgcttgaaaattaattcaagatttcgaattttgtcctaattaagttttgttacgtaagaccttttgtttctataaatttgttaattatgtagactagactatattagcttctttatgaccagactatatatactttaaaactttaggttgttgtatatgtttagtctctttgcttaaaatgcccttcatcaaattttgtaggaatgttaatgtaacaagaagctataggatgcttaacgtcagccacttcaacatatttttactatgactactgtatttgttaagtgttctaatatgcggtttaagcgttttgatttgagcaaaaaaaaacgttttaccaatagctaaagaagaacagaggaaacaatggtttgaaaaaccccatgtcacttcatacccctttaaggctaaaccaatgtgaaaacaattaaacttcttcatttttgtttcattagagcaaaaatataatattacagctctaaacaattgtcatcaacaaaggttacttaaaaccaaattataattatgagatttctccatatatcactaagacaagttgttaccgacaaaatttatttaaagatagaacaaaaagcagtttaaaccacttttggaaagaaatactggtatatgattattttttgtttttctcattatatgcaagataaagttaaaaataaataaaaatagagattaagagtttgattcaaataaaagtcaacagaattcataagtcataactaatggatacaattttgaatatatcacattagaaaacaaaaaaaaataccctgggtttcatgttccaccaaacgtgaaagtaaaagtaataaaacctcattgtctcattctttaaatatctcacgacttctcacctcatatttctctctctctctccatttaccatg

SEQ ID NO: 14827 - DNA, 3000 bp, Unknown
  misc_feature (1)..( 3000): cDNA_ID_4266623_gDNA_ID_2684227_Annot_ID_137599 3000 nt of promoter + ATG
aaagatctcatggccatcgccggtgaagccctcaaggcaaacatcaccacaataggtaataaacacacatcattttatttcacctacatatatacactaacaatgatatacacggtgaaaactatatcaaggggtgggcattaaatattattggtcggctccgttttgacttcaattcggttttaaataacagaataattactctatctctatatatgttttgttattatggttaaatgtactttcttggtatatgtctcacttctatggaaatttaggttactctattcggttgcattcaattcggtttgttcgatataaattttattatgatttaaagcaaagtttggtttggcttaggtttaaggaattatggtacgtttttggttttgatagatgaatttgtttgaacaggtcctttggtcctaccggcgtcagaacaacttctcttcctcacgtccctaatcggacgtaaaatcttcaacccgaaatggaaaccatacataccggatttcaagctggccttcgaacacttttgcattcacgcaggaggcagagcggtgatcgacgagctccaaaagaatctacaactatcaggagaacacgttgaggcctcaagaatgacactacatcgttttggtaacacgtcatcttcatcgttatggtacgagcttagctacatcgagtctaaagggagaatgaggagaggcgatcgcgtttggcaaatcgcgtttgggagtggtttcaagtgtaactctgccgtgtggaaatgtaaccgtacgattaagacacctaaggacggaccatggtccgattgtatcgaccgttaccctgtctttattcccgaagttgtcaaactctaaactgaaaacgtctttgaacggtttagtaacggtttgattttgtgttacggtttaggtttatttggtctcgggatttggtttaaaggggattgagaaatgggaagttagagagaagaaaaagcaaagcataaatgtttgtatttaattgctctgcatatacttaaatctctgcttttcatttggggtattttttagtttctcgtgctgtaattaataacttgtggtgtactcaaataagaatatttctctctgttttattatttttaaattggagaataaacttctttgttttcatcgctgccttatatatattgcttctgatttgggttgaccatccatccagtttgcaggatccgatagcagtaaatatgtccactatgaatgtggtgcatggacagtcatctcttacagacttttgcatgtaaaattatatgttgcatgcatgatggtatgtaatgaatggattggatgatgtcatgactcatgatgattaaaaaatacgtgagtccatatatttctccaatagtattaaaatacgagtacatcaaacatgttttccaacactgccacaaaatgtattggacctatatcaataagtgggccttgatttcccagcttatgatggcttaggtttcattgtaaatggtgaaacaggccttcctagtgaggatgcaggtcatcaatagcaaggtttaccaacggaggtttaatcctcatgaagtgatgaagaagatgtcgaagagttggagtttgagaagagatgtttggaaaggtattctaagaaggatgcagaggatgataatgagattgatgatgttaacgacgttgatcaacaagcgcttttgccatcagtccgtacgtgaccctaaactgtggctggtgaaatgtggcgttatgagtttttgttctctatgaattccaagtattaaggatatctcaacagacaggacaaaagtttaaggttaatgatcttttatcaaattcaatcaataatcagtctccgaaatcttagtgtatacaaatggcgaaaaaaatataaacatcattttccaagtacacgaataatgccaagagtggtaaatgatatccatcaagcctcttatcttctcaagaaaaaggttgatgcctttgtttttgaagttttctgcatattgatgtggtccagcacaaaccattgttatccactttatcttttatttttctttaaccccaacgttttctactttagcacttctacttatctctagtaattctccatttatcacttctacttattgtccacttgattcttgagcttcatattgttgaattcgtttctacttttctgccatcttctctttatatgcttaaattgtatatttttacgcttgctgtatagttttttaatgattatctttagtcctaataattggggatttaattgatttttttcctttgtataaaaatatacagtaaagatattaatacaatttcattgtctctaaagttttaagataactatgtagaaaataaagatgtagacatatcatactataattaatgtcattactcattatctttaaacgtaaaccgacacaaccaatcaaaacctcgctttccacataatcacgagaataagccacactaatcgactttttccatggaaaataatgaaatctaccaaaaatgaatgaatggtaacaaaatccaaaaataaggagtgattgggtcagtgaaaacgacaagtggaccataaagatatccatctgattaagaagctgaccaatcacaacattaagaataggatcaacttgaagaactcgaccaatcagaatcgagataagatctcttcatggccctcatggggtataagcaaccaaaaaggtgcatcaaattttcactttaaattatacaagaagaaaaaagctcacatcgtgtgggacatgtactagccaacaacgcctctacacttaacccttcaatgcctcataaaatgaaaatgtagtctctctttttataaccacttctcgaaaactgaaacctttgtagagagaacccatagttcgataaaacattctttttgcaactgagacttggcaacttggttttactcaaagtaagatttcttcttgttgatggtgataagttcaatatgatg

SEQ ID NO: 14828 - DNA, 3000 bp, Unknown
  misc_feature (1)..( 3000): cDNA_ID_4266627_gDNA_ID_2684227_Annot_ID_137600 3000 nt of promoter + ATG
aaaaattaagggaacttgtctttgatattttatttactagttatatatagtccttaccgaacctcgtcggcaacatcatcagtgcgatcaagaatcgatcaccattaaaatgctttattgagcacgatcagtgttcaccatgtaagaagattattgtctcacaattcaaatcaaacctagcctaggcaacaaaaattaaatttctttaaacaatagaacaaaactcgtccgccccaaccatcctcttcacaacattccttaatcttacaatatctatataactaacgcatcatttggatttcactatgtaactaagtcgaactggtgtgaaataattataaatttaaataaataaaaaggtgaaaatatggttgtacacgaaggtatgtgaaataattatgaataactaaaatgtactgaattatttattttattttaatagcaatggaatctaaattaaatcaggatataatgaaaattttgtaaaattgtgattaaattgtcattccaaagaaatcagagaactgtctttaaaaatttggaagcgagtttaatgatatagcctatatgaatggtacagtgtgaatgtctctgagaaaaattacaattccacatttttattacagactagatgagaaaaaaacattgatgagtaggtcaaattaaaaaactatattcacgttttcggtgatacattggaaaaccatataaaacgatcatttttcaaaggaagaatagaaactttatttacatatttaattattatggaagatgaaggaagaactttatcatagactacgaaatcggtgtggctaatgaaatacagacaccttatatattacatattaaatgtacatttcaatctggtggatagttccaaactaatcttcttcatcaaatattgttggcattaatgatctcactatggaacacgaaaattcagcaatgttcatttttagttaagaaacaaatcctcttacgaactctgtaagatcttgaaggatcaaaagcctttgatctcaatttctgtatagtttttattagcctagtgctttatatatgtttgatacttctgtttggcaatatcaatcatagtagaaaagatatggacttcatttgaggtttttggtggattgtgtctatatgtgaaatcatgggatctcaagatttgtctgcattcagtttccaagtcaaacatcgtaactactgtttgattttccctcatgcttgcagttttcatggatatctcaagatttgtcttcttgcactttccaagtcaaacataaagtaactactgattgatattccctcgtgtattaccctctttcaaatgacacaattgggcccaagtagaggaatttcatagtgaattcaaaagattaactgtattccaccgtcgtattttgataacatttagttattccttttcttttttttcttctgcaacagtttttttttaatacatttagtgttggtttggttcaatgaaatattatatgttacttctttttttggaaataaattattcattctttctactataaaaggaattgttcatgcttttttgatacaatagtataccatttcaaaagataccatagaccagttattacatgaatcgccaaaacaacactaaaatcagaaaatcagtatattttggtatagtctccaacatacaatcataaaacctctgtgaaatttaaaatctatatttgacatttcaaagtttaacaacatagttctaaataattacctaaattttaagtcaaatgtgaattatattttactcttcgatatcggttgttgacgattaaccatgcaaaaaagaaacattaattgcgaatgtaaataacaaaacatgtaactcttgtagatatacatgtatcgacatttaaacccgaatatatatgtatacctataatttctctgattttcacgctacctgccacgtacatgggtgataggtccaaactcacaagtaaaagtttacgtacagtgaattcgtctttttgggtataaacgtacatttaatttacacgtaagaaaggattaccaattctttcatttatggtaccagacagagttaaggcaaacaagagaaacatatagagttttgatatgttttcttggataaatattaaattgatgcaatatttagggatggacacaaggtaatatatgccttttaaggtatatgtgctatatgaatcgtttcgcatgggtactaaaattatttgtccttactttatataaacaaattccaacaaaatcaagtttttgctaaaactagtttatttgcgggttatttaattacctatcatattacttgtaatatcattcgtatgttaacgggtaaaccaaaccaaaccggatattgaactattaaaaatcttgtaaatttgacacaaactaatgaatatctaaattatgttactgctatgataacgaccatttttgtttttgagaaccataatataaattacaggtacgtgacaagtactaagtatttatatccacctttagtcacagtaccaatattgcgcctaccgggcaacgtgaacgtgatcatcaaatcaaagtagttaccaaacgctttgatctcgataaaactaaaagctgacacgtcttgctgtttcttaatttatttctcttacaacgacaattttgagaaatatgaaatttttatatcgaaagggaacagtccttatcatttgctcccatcacttgcttttgtctagttacaactggaaatcgaagagaagtattacaaaaacatttttctcgtcatttataaaaaaatgacaaaaaattaaatagagagcaaagcaagagcgttgggtgacgttggtctcttcattaactcctctcatctaccccttcctctgttcgcctttatatccttcaccttccctctctcatcttcattaactcatcttcaaaaataccctaatcacattttgtaacaataatacaattatacattaaaactctccgacgatg

SEQ ID NO: 14829 - DNA, 3000 bp, Unknown
  misc_feature (1)..( 3000): cDNA_ID_4266623_gDNA_ID_2684227_Annot_ID_192027 3000 nt of promoter + ATG
tccaaagatctcatggccatcgccggtgaagccctcaaggcaaacatcaccacaataggtaataaacacacatcattttatttcacctacatatatacactaacaatgatatacacggtgaaaactatatcaaggggtgggcattaaatattattggtcggctccgttttgacttcaattcggttttaaataacagaataattactctatctctatatatgttttgttattatggttaaatgtactttcttggtatatgtctcacttctatggaaatttaggttactctattcggttgcattcaattcggtttgttcgatataaattttattatgatttaaagcaaagtttggtttggcttaggtttaaggaattatggtacgtttttggttttgatagatgaatttgtttgaacaggtcctttggtcctaccggcgtcagaacaacttctcttcctcacgtccctaatcggacgtaaaatcttcaacccgaaatggaaaccatacataccggatttcaagctggccttcgaacacttttgcattcacgcaggaggcagagcggtgatcgacgagctccaaaagaatctacaactatcaggagaacacgttgaggcctcaagaatgacactacatcgttttggtaacacgtcatcttcatcgttatggtacgagcttagctacatcgagtctaaagggagaatgaggagaggcgatcgcgtttggcaaatcgcgtttgggagtggtttcaagtgtaactctgccgtgtggaaatgtaaccgtacgattaagacacctaaggacggaccatggtccgattgtatcgaccgttaccctgtctttattcccgaagttgtcaaactctaaactgaaaacgtctttgaacggtttagtaacggtttgattttgtgttacggtttaggtttatttggtctcgggatttggtttaaaggggattgagaaatgggaagttagagagaagaaaaagcaaagcataaatgtttgtatttaattgctctgcatatacttaaatctctgcttttcatttggggtattttttagtttctcgtgctgtaattaataacttgtggtgtactcaaataagaatatttctctctgttttattatttttaaattggagaataaacttctttgttttcatcgctgccttatatatattgcttctgatttgggttgaccatccatccagtttgcaggatccgatagcagtaaatatgtccactatgaatgtggtgcatggacagtcatctcttacagacttttgcatgtaaaattatatgttgcatgcatgatggtatgtaatgaatggattggatgatgtcatgactcatgatgattaaaaaatacgtgagtccatatatttctccaatagtattaaaatacgagtacatcaaacatgttttccaacactgccacaaaatgtattggacctatatcaataagtgggccttgatttcccagcttatgatggcttaggtttcattgtaaatggtgaaacaggccttcctagtgaggatgcaggtcatcaatagcaaggtttaccaacggaggtttaatcctcatgaagtgatgaagaagatgtcgaagagttggagtttgagaagagatgtttggaaaggtattctaagaaggatgcagaggatgataatgagattgatgatgttaacgacgttgatcaacaagcgcttttgccatcagtccgtacgtgaccctaaactgtggctggtgaaatgtggcgttatgagtttttgttctctatgaattccaagtattaaggatatctcaacagacaggacaaaagtttaaggttaatgatcttttatcaaattcaatcaataatcagtctccgaaatcttagtgtatacaaatggcgaaaaaaatataaacatcattttccaagtacacgaataatgccaagagtggtaaatgatatccatcaagcctcttatcttctcaagaaaaaggttgatgcctttgtttttgaagttttctgcatattgatgtggtccagcacaaaccattgttatccactttatcttttatttttctttaaccccaacgttttctactttagcacttctacttatctctagtaattctccatttatcacttctacttattgtccacttgattcttgagcttcatattgttgaattcgtttctacttttctgccatcttctctttatatgcttaaattgtatatttttacgcttgctgtatagttttttaatgattatctttagtcctaataattggggatttaattgatttttttcctttgtataaaaatatacagtaaagatattaatacaatttcattgtctctaaagttttaagataactatgtagaaaataaagatgtagacatatcatactataattaatgtcattactcattatctttaaacgtaaaccgacacaaccaatcaaaacctcgctttccacataatcacgagaataagccacactaatcgactttttccatggaaaataatgaaatctaccaaaaatgaatgaatggtaacaaaatccaaaaataaggagtgattgggtcagtgaaaacgacaagtggaccataaagatatccatctgattaagaagctgaccaatcacaacattaagaataggatcaacttgaagaactcgaccaatcagaatcgagataagatctcttcatggccctcatggggtataagcaaccaaaaaggtgcatcaaattttcactttaaattatacaagaagaaaaaagctcacatcgtgtgggacatgtactagccaacaacgcctctacacttaacccttcaatgcctcataaaatgaaaatgtagtctctctttttataaccacttctcgaaaactgaaacctttgtagagagaacccatagttcgataaaacattctttttgcaactgagacttggcaacttggttttactcaaagtaagatttcttcttgttgatggtgataagttcaatatg

SEQ ID NO: 14830 - DNA, 3000 bp, Unknown; identical to SEQ ID NO: 14828
  misc_feature (1)..( 3000): cDNA_ID_4266627_gDNA_ID_2684227_Annot_ID_192029 3000 nt of promoter + ATG

SEQ ID NO: 14831 - DNA, 3000 bp, Unknown; identical to SEQ ID NO: 14826
  misc_feature (1)..( 3000): cDNA_ID_3019189_gDNA_ID_2684227_Annot_ID_192020 3000 nt of promoter + ATG

SEQ ID NO: 14832 - DNA, 3000 bp, Unknown
  misc_feature (1)..( 3000): cDNA_ID_2717080_gDNA_ID_2684228_Annot_ID_192123 3000 nt of promoter + ATG
ccattaaaagagctaaaaaaaaaagtaaatgaactttaaacttgaggctgattttttttccgttgagttttgggaaataagaattaatagttgaaagtttggaattactttggattaaaatatgaaagtttagttggtttcttattgtaagatccatatattcgaagaaataattggttagaatgtctaacaatactagttagatttttctagcatatatcaattaattcatatattaatgttatctaaagaaacccactttctcagatcgcaatgcacataagctcatagttaaattaaaagcatgcattaggataaataatatacaaagaaataaataaattttagggagtggagaatcaaaagaaactttatgcccctaaaagacatgaaaatcaaacaagtgtcaatcatagatacgatcttgatcgagccaatgagcgcaaagatgcgaggaaaaagaagcaacagatcgatcacacactttttgcgttttgcatgtttgatgcattttgatttgacaaagattctttatttacttccttcttccttacttaagctgaccctctttcttaaagtttaaactgtttttagaacgatcaatcatttcaattttggaagcatcgaaatcaaaatgtccaaaatacatattttgacagcgaaatattttgactagatttcaatagtttagaactttggttccacaccagtttatgttgtaatggcaaatgtaaattatttatagaggaatcccattctaatactattttgaatactaaccttggccttttcaacaaaaaaaataaatcgaaatgtgtacaatcaccacgaaattatcatattttttagttatggattctgtaaagatggattaaattagttaaagggaatatactcttacattagctatattaaaaaaaaaaaaaattagctgctaaggggatttagtccatggaaaatgttatttaattctagtttgattaaaccttactttcttcatggtgaaatttaaatttgatgatataatccacgctaaaaaataccatcgtaaaaaacgttgctaaaagctgtgtctttttttttttttttggtaaaagaagctgtgagtcttttgttatatgatgagttaaaccgctcacagaataccagttagtgaccttaaccaaaaaagttccatcgttacagagtatcaatctatgtttcaatgtattatgtatttctttgaaatattgatgtcgaatataaggtggattttctactcagaaataagagaaaaatcccatattccaagaaaaaagtgagttgaaaaaccccgtaatgttgaagaagaataagattcaggagtttgttatgtagaccaaaggcaaagcaagatggtcaaaaaaatatttagaaaggagaaaaacgacctacttaatcaattaacaagcaaaaaggtgaaattcaataaattaatacacctaacaaaaaaaaaaggctacattggcacctaacatgggcaggtcattggttctccaccacgatgagatgcacatgatacccgctttaatatgggctaagtatgcttaatgaccatcacttaattgttctttttagttgttaaaatgggttaagaattccacgtcgttaaatgtgagaaatgtataattcaatacagaataaaaagctcggacgaaaaaaaaaaaaaaaatacagaataaaaagctcaccatggatttttaacatgacataataatgatgagcagttctatatataccacaatgaaaattctttgtaaacttctttctattagtctgctttatattttctagtaatcgaatttcatatttagacactaaatagagatcatgtgagtttcaactctagatcaaatatggttcgttttaataataacaaaaatatatacatataatatattttgttattattcggacggtaattcgatagtgtaaatacattaaacttttgcttaatcaatagagcaaaaacctcccacttttttttttttttttgataacttcttgtttattattagttgattttaagatgaaattttatgtatttttaatgatttacatcaagtcatcaacccaaaataaatatattcgatctttggatccagttaaagtaaataagatatgagaggtacgtgcagagatatattcagaactatacattagtaaatataagaggcaaaataaatgatgctatgaataaagatgctatgaatgtttaactaggaacagaactagtttttgtttcattgttgaactcttatttactctaaatccttcacataataacgctttgtttataaaaaataaaacaaagaattctttttttaagaaagtgaatcgcatgccatttgggaactcaatctttttttatatatatagtcttgcacatatcaaatccagcctccatctcttggtgtagaatgtaaattgtaccaaattagattgttaaatatatttggatattgtaacaatagtgcatgtcaggtcatatgtcacatcagatgtaacatcaatcaatcaaaaagaaacctaggaaattatactacaagctagaggaggaagggatagtacaatacaaaccccttataataacaaagaaagacggagctttcgcatgtaaagctatatactattgtatgaatgcatacttaacatataacgtatatgagcgcatacatatataagggaaaatgaggctgatgtggaaaaggtgctttaagaagcagtgaagttagtgggagaatatgataatggagattatatataaagacaagaaggtggcatgagattggtaataacttcacagttgtctccgaagaaacagagaaaccaaagagttaagtggggaacctcgaagctagttcaaactagtgggaggttgtttcacgtttcaactttcaagtcataaaaccaaatccaactctaaacgtaaacccaaacgtcaaatcatcagatagaaggaaatattctgattgagagatg

SEQ ID NO: 14833 - DNA, 3000 bp, Unknown
  misc_feature (1)..( 3000): cDNA_ID_3019226_gDNA_ID_2684228_Annot_ID_192141 3000 nt of promoter + ATG
aaagaatccctagccgcagcagcttcaacagaaattgacatcataccttctacatccttgaaaaaagagaatgaggtaaaaataagttgacaaaaacttggaaagcatttaaacatctgagacgaccatgcagagctatatatatttgcgttcaagaataagttagaaggacaacactgaaccaaatactgtaagcaatacaatcagtgctcatcggcatatctacctttagagttttgtttagattattcctggcgttactcagcagctttatttggtcatgattgtcaatcaaagtttgacattcctgacaaagcctgtggcacaagaagagaagttagagggagagaaatgcaaaagttggtaactcagcttcaagaatctctagtcaagcaaaaacatacttgtcgatagaaatgaaattatcccgcagttcataaatggttttctcagatgatgaaagtgactctaacccagcttgagcttgttcaacctgaagtttgtcaacagctattacttaagaacaacaaaaaagtcgaaatacattaaagtacaaagaaggccagattaaagctgtacctgctcagcaaccatagtactgagctgtgcatcatttgcctgattgaaacagcaagcatcactagtcaggtcattaaaaatttccagaaaatcgaaaataaaagataacaatagcatatcaaaacctaacaactcaaatctagcattgctcaggaatcactaatactcagtgcaaatgatacttcaaaagccaattcagttccaattgcaattcaaaagcaagatgtcaaacctgttgacgagcgatgtaatcggccttgattgaagaaatagactgcaaaagttcaggtaagggtaagagcttcgccacttctcgcacagccgcttccttcgcttccacaccaagatcttcgaccatcatcttcgctaaatcaccttatttacgaactccgatcctaaattgaaggctacctctgcaaagttattcaaaattccagcacaattacgataacgcagaggagaatcaagagatctggaaacagaaacgtagaggaaaaatggacgcaaccgaataagaagtcattgagcaaatatcgagagccaaatgtgcgattctccaacttcaattacttcgtcgtcctcttatcttcttccttcgctgattctgaagatcctggaaacagtgatgttggacgcagatcagctgggaagagaagcaacgattaaatttctggaacgagtctcatctatcgtctcgcgactctaatggaaagttcggaaacgctgaaattttccgtctcgccggttttgatttttctttttcttttttgccagctgttgatgcaaacctattttttttttttttttttttgcaaacgctaacgctaattcgttgagcaaaacgcaaatcttaaccccatgctcgggttcgtgttattttttattttttgttatatgtttaatcatttgaaatgtcactaaaatatcatcgattttaaatcttaccataacgtatcgaattcgaaaatattagtcgtaggggtctgattggttatctagcgatgttacatacgtttgatattaatggggttgcatatgttttgataagtttataatttgacgacatgctttgcaaaacttggatgtgatatattagttgtgatatcatcaaagttttgcacataacgtagtacatgtaatatataagaaataaatcgatgagatggatggaatattgaactcgacgaaaaagaaaaacaaagcctaagaaaatgacagcttccaagtacaaactatttgaaaagaaatttgtaaaatctcataaatatcaatagaatagagttacaatattttgaaacaaataattattcatctagagtccgtttagcgtagaggataaacggacgcacaattttcgacaatacatttatataaatataatcagtagcaaaatgataatagttaggcattagagtcactaggtagtctaggttcacaacatggacataccatgcgacgtaggtaatggccatacaagcacgaagcaagagctaccataaggacgcccgataccacgccgatgtattctgtcaaatgatacatgtccatcttcttgttcaccacaccaccaatctctaatctttcttaaccttttttttcgtgtactgattatatttatatacatgtatcgtcgacactaactttacatttttgtaaatatatcagcaacatttggtaagtttacattttttcattaagaacatactagagaaaattcgaaagtttacatttaggaaaaaatcgaaaatatattatgttcgaattctttctaaaatactccacaaactgatattatgatatttactaattactactactagtaaaaatatattttaagatatgtgtatttcattattcagcttgtttcagattttgatggtttacataaaaagaagagtcattggtatctaaaaggaataagatctacagagttatatatcaattaccaaatatgtggatgtgatatattctttatctcttttatatatacactaaatttctttttcttcaaaggaagcatccaaggacagataaataaacagacaatctacaaactttttcatatgtttttcttaagttttaaacgtaattattatgaatagtttggaatgatacagttttagtcactaaccaaaaaatatgattagtagctaaataaagtacatttatatgacatataaatacttaaaaaacgtacaaaaagattggtgccatttgtgtgacacagaaaatcccagcaaatgtcgagagagagagaaagtataaagaatgtgaccggcaaaaaagagataaaacagtagagaaccatattatttgccatttcttagaagaatccactgcatgatattcaaaatctcaccaacaaccattggcgaagaagaaaagaaaaagaagataactctgtagattttgaaagagatg

SEQ ID NO: 14834 - DNA, 3000 bp, Unknown
  misc_feature (1)..( 3000): cDNA_ID_3019230_gDNA_ID_2684228_Annot_ID_192140 3000 nt of promoter + ATG
tctctccttctccttctccgtcatcgatgacatgactaacaattcaccgtccgatggaaaaaaagatttataatcccaggaaagcaaaaaataaatattctgttcataacgacgtcgcttagtaaaaggcctcgtaatgtttgggccttatgatgggcctaaagggtataatagacaataagagattggttattcggttgttaccttttagttcgtcttctcagaggagaagtgttttttttctccggcgaggttggaaaaaaatggaggcagctttgggacttctccggagaatgccgccgaagcagtcggagacggctctatctgctcttctaagcctcattcctcaacattcttccgatcttctctctcaagtcgatctccctcttcaggtattttctatctttatcgagatttgaaaatgtgattttgttgccttagtcgtgcttatctcccaatgtttggtttggtgatgtaatgacaggtgttacgtgatattgaaagtgggaaagatttcatcttgtgtgagtataatagagatgcagattcctacaggtacttttttgctctatttcattgtgtagagagaaaattcaaaatattggatcgctttggtttgggatgatacagtacttcgtgttcatagctaaattgctatttgttggttcttgtaatctttacttttgcaggtcaccttggtcaaataagtatcttcctccgctagaggatgctctttacccatcttctgaattaagaaagcttgaagttgaagccaacgatatctttgcgatctatcgtgaccagtgaggttctttacctacctcgttcaacatgaaaaccatgtagtgaaagtaatttgagttatctaagacggagacatagttagcatctgatctgaaaaaaaggcttgcctagtcgtgagatttatctcatggtttaacaatatatgatatgtgtttcattcttctaatgtatccattagactggagactgaaaaaagcttgcaaagttaccaaaagaacacctgtgttgatcagttttcttttccaggtattatgaaggtggtatatcttcagtctacatgtgggaggatgataatgaaggctttgtggcatgtttccttatcaagaaaggtacattctttctgtagagttcaataacactgaatgttaggcaataaaaactctttacctgagctgttctggtttttatttttcgaagatgggtcaaagtcaggtcatggtcggaggggatgcctggaggaaggagcgtgggatgccatacatgttatacaggtgactctcttaacataccattaccaagcgtgccttatgtgttttaaaatgttgcccattttgtaacacataccaccctcaattgcaactttatcatagtttcctaagcagctctttaatgagacttcatattttgcttctaatgcctgaggttctcaactaggttggttcagaggaggaggaaatggcacaatattgcttaacaagtaccatcatgctttctctgacaactgatgatgagtcttcgggcaaattcggcttatctggatcaattagaagacaagtaagtattagcttctatttagcccatgccttcatagataaatagttcctggtatgaattgtgattcaatggaggaaaaccaaatatctgtaaaagaataacattattctgctactgttgaaattagatgaaaatggagctagcagtagctgacggacacctgtgcaatatggggagaatgattgaagaattggaaggcaaactgaggaactcacttgatcaggttctacctccaatccctgcaccaattccacaaactccgtctacttgtgtaaccgccatatatgctgaaaatggtttcttaattaccggcattcggattgcttagttagttaaagctcatgctacagttgttctgtggtgcttggcagaccccaaaataagtaaacgagaattgtaggataagttttagatcaaatcactttctaacatctcatgaattaatctagaccaagagaaaagaataacgtaatgtgcgtagcttcaagggtttgagaattgtttggtgaaaagcgcaggtttactttgggaagacaagagaaatggtttgcacattgcgtccaccagctgagattgtacaaatgagattgcctgacacctgacctgatgctcctccgatcacgctttatgtaagaaggtctcgatatttgtttgttttggttggtctgatcttaaacgcttctccgagtgttttgtgtggatgtctcttactcccatgtttttctctgacttcaccatcatgtgaccatcttttcccataaatataacgaatgatgcagttttaaaagtcgtataaatattatggaaatgcttggttttctccaaaagtatagaatagcagaatcagtggtggctgcgacatgttgtgaacttaggacctaaagcatcaaacctcatttagtgatatcgcactgccttcgacatgcataccgaatggacaaagaaagtaagaatccttgatgtaatcgccatatgagtccgtttagcgcctaggtgccatctagacggtcagtaactaataacaacctaatcaataactatacaaatatttttgtccaacatataaaaaaagatattaaaataaatttccttttaaccaaaatatcagtttcctttttcggctttcttttttttattcttgttgtagagagagatataaataaatatcgacgacgacggtactaatcgttttgctaaataatttcattcgtcttctcttcttaactctttaaaaccaaaaactgaaaaataaagacaaaaagtctcctatcgacgacgaatacgaaagatctctctcttcagaagaatttaacgaaactcaactgtttcgaattcgatttgaatctcgacccgttacttagcaggaagaagatgaagcagcgcttcaccttcttcttcgttatcttctcttaataatcccca

SEQ ID NO: 14835 - DNA, 3000 bp, Unknown
  misc_feature (1)..( 3000): cDNA_ID_3019210_gDNA_ID_2684228_Annot_ID_192145 3000 nt of promoter + ATG
tctaactttttcataatcataccaacaggttgtgagctccttgaattctcatacagattcagttgaatgtgtgaagttttcaccaagctccgcaaccatccctttggctgcaacaggtggaatggacaagaagcttataatctgggatctgcagcattccactcccaggttcatctgcgagcacgaggtataaacccttatagtttctctgagatagcatcaaaacagatattgaaactaaaacaactcctctcttcttcttttttcgattacaggaaggtgtgacatctctgacttggataggaacctccaagtacttagccactggctgtgccaatggtacagtgagcatttgggacagcttattaggcaactgcgtccatacctaccatggtcaccaagatgcggtccaggccatctcagtctctaccaacacggacttcattgtttcggtatctgtcgataacactgctagagtctttgagtcatctgagttccaaaacaaagtgacataggcaagtgaggagaatacttgcagatactatccagacatgttgctatctgtgttcgttgttgtggtcttaattctatgctttgtgggggaaaattttgacaagaaagttatcaatgtctaaaattccatatgtacacggcttaatttattgataaatgtagtctctgtttggaatttgtccttcattttacagttcttatggttcgaatgagattgataaatgttactccttacattgatatcgttaatgaatgagattcatgctaatgttccactagcaattgaactacttgatatcatgagtctgccaaatcgactggagaagtcagatttagggtctgagcatcaccatggaattataaccgaactctttataaaaactcttctcccttgagaagtaagaatgaaacgggcaagctatagagtgagattactacacaggagaagaaacgaatctgctgaaaatgcagccaccggtaaagttggattaagtctctaatacatccgactcctcttcttctcagtctttaaactgatcttgctccgcctcgattgtgccttatctcttgaacctgagtttccaaaactcctcctaccagatcttggacttgaatttctacgaccacgctccagatcctggttttgatccacttcatcatcgtcctcgtcatcatcaacaaagtctccttgacgatcatcctcgacatcagaaccagaaatgtcatcattctcagccttcgcatcagtatcacaaacttccccttccactttccccttatcttctttcttgctgctcgaagaaactgccttgttatctttcttaactgtattcatgagtttcatgtaacggttcctgcttgtcaccaattcattactctctatcaacatccccctcttgtaaccatctctaagaaccacagtgtgagtcctaagcttactagacaagtaaaagataccaggatgattatggagaactctcttaaacctcgatctcaatcccataaactcaccaagatgcaaaatagcatctttctcaaccttcttcgacacaaaaaggttcatgatctcgtgcaaaacagccgccgcccacttatcagactcatcgctagtcgcagacagatgaagtgcattctcataaggagaaatatacggcaacttctgccaatcatcaatccatttcttcatcttcttatcaaccacaaaaccattcgaaaacttcatcggaaaagcaatcgccgatcctttcgtatactctcctttacgtaatgttctagctttcttctccaacacagatacagcatgctcattgctccaacaaaccagctctagctcaccactacatcctcttaacttcgatttgataactctaaagtaatcaggaaactcaggtaccatagtttcaacataatccttaggtaaacctaaatcccatttcaacaaatctagaatctctaatggaattttgttaatcctattaatcatcagcaatttcaaaagcctatcagctaatccttgcttataagtctcactaccgtaaaccaattgctcatcggcatcgtggtttagaatctccggcgtgaggctgatgtgaggatgaataccaattcctccggggagaaactcttggaaaacggaagggaagctacgtatgaactcgattggacgaagaggaactcgtagtgaatctttctgtgaggtgataactgagatcggaactgattttgctggctccgatctgattaggtctttgatactgagaagtggtctgagattcttctctctttctaccgcgtggtcgagtcctctgtctcttacgaatttgtaggtatcttccaccgccgacgtatcggcgaaggttcggtggccggaatgacggcggatagaaatggaacggaaaatggatttcatcggcgatttgattttttagggtttaagagggttttggctcatcaatggtgtttcgaagacattgatgtggagctgtgtgtgtcactcgagactcggaagtgaagagtttttattattggttatgggcttttaagttgggcgttttaggcccactgtagttttttctgtgacgttgcccatctttttttttataatgatgagcccatctaaaatgttattctacaaaacaataaaagaaagaccaggattcctttgcttaaaagaccagggtcctttgctaaaactatattataatgaccaatgaaatcataattaataatgaccaattaaaatgatgacaaaaaaaaaaaaaacccaattaaaatagtaaatttatattatagtcatcaactttaatactttgttgcaaaataaaaggaaacagtcgcataataatccactaatcacaaacctttaccctttcttctcggggccaatcaaaaacttcaattaaccagaaaaggtcagattctccgccgcctcacacgacgggcaacttcagttcctgccgtcgcgttagatcccgccgtcaatcggtc

SEQ ID NO: 14836 - DNA, 3000 bp, Unknown
  misc_feature (1)..( 3000): cDNA_ID_3019218_gDNA_ID_2684228_Annot_ID_192143 3000 nt of promoter + ATG
ttaagatatggtcttctgtccaacttaattctcagtgagatcactaattttacttgatacgtgttcttgacttgttcctcctatggtaatgtaaataacctagctattttactttatagaatggtgcgagggacaggttaccgagtacctcgtggcaactttcggtgattatttcacagatgtgaaaatgtaagtttttctttcccccttttgtttaacaagagccaaaaatgctacaagtctattgaagatgtcgtggtgaatactggatgcaggtatgtcgaagaaagatcatttagaagatttgtcgaagcatgtttggaagaaacagtcgttgtctatgttgaccatctcctaactcaggttcccccatttattctcaagcatttttaccttttatatttcatcagcatacacaaacactgaacctttggggttgacgtgtgtaattccagaaaaactacatcaaggaagaaactattgaacggatgaggctagatgaagaggttctcatggatttctttagggagtatataagtgcatctgtaagttggtttcagcacttaactcatttttaacctgaataattttatatttctttgaagtattgcttaatatttccactggaactgtgttacagaaagtggagagcagaatcagaataatgagcgatctgagagaacttgcatctgcagagagtctagatgcatttacactcgtgtactcgaatattctagagcaccagcctgactgcccggtaaatattatctaaacaaagcctgctctggctttttacaatatcagtatacacagaatctctaatatatggtatgcaggccgaggtcgtagagaagcttgttagtctgcgtgaaggcataccacggaaggacacaaaagaggtaaacataccaaactctcttttttggaaaatgctgggttataattgtagcgaatcacatggatttttaaactatggttacgagacttcaaatggcgaagaattcttaaattgacgaaatggttatggtgatgaaaacaggtggtacaagagtgcaaagagatatatgagaacacactggtagatggtaatcctccaaagacaggatttgtattcccgagagtcaagtgcttaactgcttccaaaggatctatgtggcgaaaactcacttaatctgtaaaacagcgttcagcgtttgcgtccgtaactgcttttctagttgagatgatgttctttctccaaattatggcgtttgcgtccatgtcttctttttctttgcatggtatctttcctctgtaaattctgtgttttctcttgttttgttctttttcttacctttattcctggatttgaaagttgaaacgctcggtggccacttgcactaggatattatcccgttgtatttaggaggcgtatttttttgtcgcaaattttaattctactgtttcatttaattttgataaaatcttcttaaagttcgtttctctttcataacaaggtagctcttattgtttttagaattatttctgatttgtgaaattttgaatttgaagcatatttttatcatgaatataaaaaatgttggggattataaaaaagtttgtaaattcactcattggcagctgatttagccactcacaatatctaaataaataattgtaagcattatcttgaaatattttctgaaatgactgtttcttttttactttaattaaattttgttctagaaaccttttgatcataatgaaaataaagagtccatccaccacatggggtaagcataatgtgtgatatttaaagggtaacaaatgtaatctgctttttattttactttttacctctactcaaattgtatgggcagttttttttttttttttaaatgataagacaagtatctgtttaatggtattgtgatgaaacagtagtaaagtcatatcgggcacgccatactacttccacagtggaacttggccaaattttgtctttgccgtctctacagtttcttccaccaaattttttgttgacaaaactcaaatctttcaatctcatctctgccaaagttgggtttagaaagaatatcagcaaacactaatatctttattgttgcatggtttatcaatcacaaaattcacaaccattgtaaaaaaaaattcacatttttggtatgagattgctcacatgatagtgaacctctttaacattttaactttactttcataaatacgggattacgaatcttacttgcattaaaaatttagaaaaggtttttctacttaaagaaaaaagggacccaacagagagaggtttgaccaggagaaacgggtgcatagccttaagagctttcaactactttaccccaaacccaaagcgatgtcactttcaaccatctcttctctcccccgaacccgtttttttgaccggtcagttcgggcagcagcaccgttacgggcagcttatattcctcgtcttcctcctctacaccactgcatgcccataaataaagcccgttgagatctttaaaaatattaaataatatatcaacgaaaaagctattttattcataagaagaaaaagagaggaacaacaacaacacactaatcatagtttctctggcaggcttgttgttgcggcttaataaaaagctcttttgttattattacttcacgtagattttccccaaaaagctcttatttttttgtttaaaaaaaaaagtttcatctttattcaacttttgttttacagtgtgtgtgtgagagagagagtgtggtttgattgaggaaagacgacgacgagaacgccggagaattaggattttgattttattttttactctttgtttgttttaatgctaatgggtttttaaaagggttatcgaaaaaatgagtgagtttgtgttgaggttgtctctgtaaagtgttaatggtggtgattttcggaagttagggttttctcggatctgaagagatcaaatcaagattcgaaatttagcattgttgtttgaa

SEQ ID NO: 14837 - DNA, 3000 bp, Unknown
  misc_feature (1)..( 3000): cDNA_ID_3019222_gDNA_ID_2684228_Annot_ID_192142 3000 nt of promoter + ATG
taggatcagctttagaccatcaagaacatgctttcccacgtacctgtccaagggacgctgcagcaacaggctcaggagaaatctcagagaaaagctcatctataggaagaccaagttcatcctcaatcatattgaaagcaacttcggttgaaaacggagttatttgatcttgtagcagggagagttcatccaagtatataggaggtatcaaatcctagtttcgtgaataaagctagttcagaaaccataatcttcatagcaataacaatcacaaagctccagaaaataagaatcaaacatgttaagaaagacgcttacaggacgagatgaaacagcttgagcgattttgacgtacgcctaaaaacaaggtcaagacatgataagaacactagcattgagcaaattgatggactgatgatgaaatctcaaagaacacgtgagagataaccataccggacctagctccacaagcaatttcctaagctccgctgctcgtacctaatgataccaattcgtgaaatcgaaaacgaagcatgagaacacaaaatcatcattatcattgaagagcaaatcacgaaattggaaaaaagaccttgaacatttgatcagagcgttccaaagcctcatcagctaagcgaagcccaaaccaataactaaacgtagttccgatctgagctaatctacgaagcagaatcagaggtttcttcttatacatcccatcaatcctgggaaaattgtactccgacaaagaatcagcctcatcggcactgagactgaacaaataaccggatttactagtgaaactatctacatctctagacgcagcggagacaacaacggcggagtttcctcttcgcgacggccaagatggttgtggattaatcagcagattgggattggcgggaaaagaaacgattggcatagaagaaggaagccgaagcatctctttcaaaatctacagagttatcttctttttcttttcttcttcgccaatggttgttggtgagattttgaatatcatgcagtggattcttctaagaaatggcaaataatatggttctctactgttttatctcttttttgccggtcacattctttatactttctctctctctcgacatttgctgggattttctgtgtcacacaaatggcaccaatctttttgtacgttttttaagtatttatatgtcatataaatgtactttatttagctactaatcatattttttggttagtgactaaaactgtatcattccaaactattcataataattacgtttaaaacttaagaaaaacatatgaaaaagtttgtagattgtctgtttatttatctgtccttggatgcttcctttgaagaaaaagaaatttagtgtatatataaaagagataaagaatatatcacatccacatatttggtaattgatatataactctgtagatcttattccttttagataccaatgactcttctttttatgtaaaccatcaaaatctgaaacaagctgaataatgaaatacacatatcttaaaatatatttttactagtagtagtaattagtaaatatcataatatcagtttgtggagtattttagaaagaattcgaacataatatattttcgattttttcctaaatgtaaactttcgaattttctctagtatgttcttaatgaaaaaatgtaaacttaccaaatgttgctgatatatttacaaaaatgtaaagttagtgtcgacgatacatgtatataaatataatcagtacacgaaaaaaaaggttaagaaagattagagattggtggtgtggtgaacaagaagatggacatgtatcatttgacagaatacatcggcgtggtatcgggcgtccttatggtagctcttgcttcgtgcttgtatggccattacctacgtcgcatggtatgtccatgttgtgaacctagactacctagtgactctaatgcctaactattatcattttgctactgattatatttatataaatgtattgtcgaaaattgtgcgtccgtttatcctctacgctaaacggactctagatgaataattatttgtttcaaaatattgtaactctattctattgatatttatgagattttacaaatttcttttcaaatagtttgtacttggaagctgtcattttcttaggctttgtttttctttttcgtcgagttcaatattccatccatctcatcgatttatttcttatatattacatgtactacgttatgtgcaaaactttgatgatatcacaactaatatatcacatccaagttttgcaaagcatgtcgtcaaattataaacttatcaaaacatatgcaaccccattaatatcaaacgtatgtaacatcgctagataaccaatcagacccctacgactaatattttcgaattcgatacgttatggtaagatttaaaatcgatgatattttagtgacatttcaaatgattaaacatataacaaaaaataaaaaataacacgaacccgagcatggggttaagatttgcgttttgctcaacgaattagcgttagcgtttgcaaaaaaaaaaaaaaaaaaaataggtttgcatcaacagctggcaaaaaagaaaaagaaaaatcaaaaccggcgagacggaaaatttcagcgtttccgaactttccattagagtcgcgagacgatagatgagactcgttccagaaatttaatcgttgcttctcttcccagctgatctgcgtccaacatcactgtttccaggatcttcagaatcagcgaaggaagaagataagaggacgacgaagtaattgaagttggagaatcgcacatttggctctcgatatttgctcaatgacttcttattcggttgcgtccatttttcctctacgtttctgtttccagatctcttgattctcctctgcgttatcgtaattgtgctggaattttgaataactttgcagaggtagccttcaatttaggatcggagttcgtaaataaggtgatttagcgaag

SEQ ID NO: 14838 - DNA, 3000 bp, Unknown
  misc_feature (1)..( 3000): cDNA_ID_3019256_gDNA_ID_2684228_Annot_ID_192130 3000 nt of promoter + ATG
tcttatcttataaaatcttgtcaaatataaataatatatatgacgggatacaaatttgggtatcgaccattgcattttgcctataacattgtggattgtggtcaagaatcaaaattgatgtgatgccaaaggggaccaaacatgttttcttttccttatgatctctttatctctattctcttttattttgttttcttttgctctcttaattcatttttctttcgttactgatccatcctcgtgatatttttttcccttttaatacatctagttaaaaatatattctatctacttgtttatctatatattggctaaagggctagcataagcattcgatacttgatgatatattatgccatcttcatgctaacttccacaccaaaaaatagatgtttccgtaacaatgttttgttgtttggggttataagataattatagaataggatagggtactctcaaattggtgtaaaaaaaaaaggaaacaaaaaaagagagtagggtctcaaataaataaaaatactgaagtacaaaaacatcatccaagaatgtagtatggagcttcatgtgacttgcacccttatttttccaaatcttaggcgtgtgatgttttcaacgaattgaatctaaatctactcagttaaatacaatgcacttgttaggtcgtaataattatgacaaactaattaaaattttcacttactaactctatttttaaataaaatttgtattcaaagaaaatattatgcattttttttgctcttaacattatgttaaattaaagagaagtaaaaccatagattatagacaagaaacgactaaaaatatatattatcttgctagatgtaggattaacttttactttcatatatttaaaatataaaatccttatagacgtgatgtacatttgttgaattttcttatattaaattgtaaagtaaacaataaaaaggaaaacttaagtaaatttaattcgttgatttaactgatttggattttaggtgagaaatcgaagcaatgaaacaaataggttgggtacaacaacacatagatccaagtctagttaaaagtgggtggacccaatagagtccaaaactccttcgtaggcttcttccatggtccgtgtatttcgtggggtctcgcaccacagaccacaccacaccacaccgacccaaacaccttatccattaaccggactctaaccggacttctggaccggatctcttctcgaccaaatttgcggcggcacaacgtacttgcctctaattttttttcctcttttcggtagtccgaatataaacttgcttagtgacattttcctcgccctacgttcatcaaaatatctatcgcatgatgtaatccccatgatttactttttttttggtcaaagaaatgcccatgatttactgcatgggtaccttttcttttcttttttgttaaagagctatggttacttttatttttgtttttgttttatgaaaagattaacgaactatcaaacctttttttttctttctcttgtttcagttttcaaccccttttaggttatcgaagcccacttaacattgacttcttttggggtaaatttgataagttttctttttaaaaaattgaaaagagttttttcttaattgcatgataaagaaaagttttataaaacatttaattagtcacatactttcagtattttcccggtgctttggccgattccggcgctgtaacactctttccgattccccattttaatggtttggttttatatatcaattttttttttatatgtcttataaacccattgagatatgtactgatacaccgtagggttaggatactatatgtataatttaaagtatcatgtattacttgtgaattgtgattatattttaggaattttgtgttttcatgatttcttataaatatgtgatttagatttatattcttttatattttgtttttatttttttatttttttattttttttgacactgtcatatcctaattttattttattttatgttgaattacaaaacaaaaaggttttcgtattattcacgtttaaataatctggttgatagacgtaaaaaaaaaagatctggttgatatgttagtgcacctttctcgctcggttattattatatacccactatgcaaatgagccacgccacaatcacctgcgtggccagtggccaccacttctgattttcctttaacatgtccgattaactttttatttgttaattaaaacacctgaataatgtgaaacctacactatacaataataaaaagaacctctaaaatacattaacccagtttaatatctatagaagcagttgttgaatgttgagttggggtccaaaagttaaagtccaaaatggctgagaccactagtttatgttaaaaaggttcagataacttaaaagtaagatcccatcagagttgttataccaagtccaatatttcataattttttacacttctttactaatcttattatatatgtaatctcgttttagtggcctttgatgatcactcaccataacgtaacaaaactaatttgtgcggatattcctgaaagttatttttaatcataattaatcattgtagatattttcaaaaaatatctttaagcttccaaaaataagcctaaacattggtttgaaaatctagattattaaaatacaaaaattgaccatatcgtaagagaaaaaatcaatattgctttgctacgccattattaaaatagaaaaacaactattaaaaaaaaaaaagttttttcttacataaaatgatgaaaagaaagacgaggactgactcacgcgttgtttcggaactcttcaagtaaaattttggatttatggtctggcaaaattaaaaaatatccagatttataaaaaagcttcgtcactttcctctttgtataaaataaaataaattctctctttctggtctgaagaaaattacgattattttcttatgtctccagttgaacccgccggtataatg

SEQ ID NO: 14839 - DNA, 3000 bp, Unknown
  misc_feature (1)..( 3000): cDNA_ID_1533468_gDNA_ID_2684228_Annot_ID_192135 3000 nt of promoter + ATG
aattaaaatgttttgtttgtggtcataattaggttatgatgaattcacaaggtttaagcagaggttttggttttgttgcttactccaatcctgaagaagctttattagctgtaagtttcaactgaattgacaatctttttacatatacataaatgttttataaaattggtactaaaatgttcattggggttgatgattacgcagatgaaagaaatgaatgggaagatgataggaaggaaacctctttacgttgctttggcacaacgtaaggaagaaagacaggctcaccttcaggttctttttagccctctcactctttgaacatcaaactctgtactgtgttgtgttgtgacactgagttcttaaactgtcttgatgttttcacgtgtttcagagtctatttactcaaatcagatcacctggaacaatgtcaccagttccatcaccgatgtctgggttccatcatcacccaccaggtgggccaatgtcaggaccacaccatccaatgttcataggccataacggtcaaggtttggtaccttcacagcctatggggtatgggtaccaagttcagttcatgcctgggatgcgtccaggtgcaggcccgcctaacttcatgatgcctttccctcttcaaaggcaaactcagcctggccctcgtgttgggttcaggcgtggtgctaataacatgcagcagcagtttcagcaacaacaagtaaagtttttatcattagttcttatgtcttttagcaagtttattatctttaacacaatcatacgaatatgaatttgttggggcttgttattatcttggaactgtcagatgctgcagcaaaatgcaagcagattcatgggaggcgcaggcaacaggaggaatggaatggaagcatctgctccacaaggcatcatccctttgccattgaatgcatctgcaaactctcacaatgctccgcaacgctctcacaagccaactcccctcaccatttctaagctcgcatctgatttggctttggctagccccgacaaacacccacgggttagtgatctcctgtgttttcttctcttatctcatttagtacttgcattataacctatatttgttaacaatatcattgcattgtgaattgatgacagatgcttggggatcatctttacccacttgtggagcagcaggagccagcaaatgctgctaaagttaccgggatgttgctggagatggatcaagctgagattttgcaccttcttgagtcacctgaagctcttaaggctaaagtgtccgaggctctggatgttctcagacgctctgctgatccagcagctgtgtcatctgttgatgaccagtttgctctatcctcatccgagtgaacatactgtttactcaagactatgtttctctcgctttcttagacagttgctttaataccttttaggacctttaaaactagctttttcttttctacatctctttgatagattgttttgagtttttcccttagcattgagacttttactctttagcactttctctagtttcgttaggagtctatttaatgtgtcaactcttttgcaactccaaattcgtttcagaaactttacatttagcattttatctaataatcggcattctggttaaacattctgatcacatgaaatctggatgtacctcgtcgtctactatctgatattccgtatttatctccattactgctctgtcccatcctcctacttcgtcatccttcaaggcctttttaacaccaaatcgcggtggtgcttggtgttctccttcgtcatcgattaagtaggcgtcccatttcgaagctggcttagtaactctttctgactctagattcctctcttccatatccttcttcctcgtcactacttcatctgcaacacatttgaaggataggagaatattgttttagtaaaaccattcaggcctttaataaacaacattcgcaacggctttacttgaactaaacgctgatatatggccaacatatgtagcagaactcctcttaccggatcgaaaatccggctttttgatgctgcgtctggagaaagaaggcttgaagatctcattactgtctttattctcacctcctgtatttgatgatgatccaccagcattagactctttgttcagctttggccttttgaacatattgcttggcatctcagtgacaatcttcacatctgcaacaaaatcgcaaaaccaagtacatatttatctattttgtctcataagatgcttgattctcgaattagactcaccgtcttcttctccagctaatctccggcgatcatttactgaatcgaaatcgaggtattgactccaatcagatcgcttcttcgttccattaacctcctcattaacctctccttcaacataaacctctggaaacgaatctccaacagcatgtgcctcttcatcggcaactttgcgagacatattaaacgattggacaaagaaacgaagctccttagccttataaccttgagcaaacacctttttcactgattgcttctgattgcatatcacacaaacccacttgttactacttttcttcttctgcttcacctgcgaattcgaaccccaaaacaaaatccctaaaaactaaccaatatataaattgacagagatagaagaggagggagcgagagagtttaatacctgcatagttgaacactcgtaacattggagagcgatgaagagagtactcgccattttttctccttctccttcttcgtcttcgtcgtctgctctctagggatttcgattttgtgttttcgatttcgttctagcgccaatttgatatacttcaaaaaatttggcaattccaaattattttgtaccgggtctgtttaacagaagacggtaaatagtttcggttagtttcggttaagctcccgcgtttttttacaatagcaattagaatcaaaccctaaaaacccaaatcaaaaagcttcgttgtggaggtaagtaggaggaagacgatg

SEQ ID NO: 14840 - DNA, 3000 bp, Unknown
  misc_feature (1)..( 3000): cDNA_ID_1023335_gDNA_ID_2684228_Annot_ID_192138 3000 nt of promoter + ATG
gcagcgtcgttgggatgatgatgaagccattggggattattaagagaagataacgaagaagaaggtgaagcgctgcttcatcttcttcctgctaagtaacgggtcgagattcaaatcgaattcgaaacagttgagtttcgttaaattcttctgaagagagagatctttcgtattcgtcgtcgataggagactttttgtctttatttttcagtttttggttttaaagagttaagaagagaagacgaatgaaattatttagcaaaacgattagtaccgtcgtcgtcgatatttatttatatctctctctacaacaagaataaaaaaaagaaagccgaaaaaggaaactgatattttggttaaaaggaaatttattttaatatctttttttatatgttggacaaaaatatttgtatagttattgattaggttgttattagttactgaccgtctagatggcacctaggcgctaaacggactcatatggcgattacatcaaggattcttactttctttgtccattcggtatgcatgtcgaaggcagtgcgatatcactaaatgaggtttgatgctttaggtcctaagttcacaacatgtcgcagccaccactgattctgctattctatacttttggagaaaaccaagcatttccataatatttatacgacttttaaaactgcatcattcgttatatttatgggaaaagatggtcacatgatggtgaagtcagagaaaaacatgggagtaagagacatccacacaaaacactcggagaagcgtttaagatcagaccaaccaaaacaaacaaatatcgagaccttcttacataaagcgtgatcggaggagcatcaggtcaggtgtcaggcaatctcatttgtacaatctcagctggtggacgcaatgtgcaaaccatttctcttgtcttcccaaagtaaacctgcgcttttcaccaaacaattctcaaacccttgaagctacgcacattacgttattcttttctcttggtctagattaattcatgagatgttagaaagtgatttgatctaaaacttatcctacaattctcgtttacttattttggggtctgccaagcaccacagaacaactgtagcatgagctttaactaactaagcaatccgaatgccggtaattaagaaaccattttcagcatatatggcggttacacaagtagacggagtttgtggaattggtgcagggattggaggtagaacctgatcaagtgagttcctcagtttgccttccaattcttcaatcattctccccatattgcacaggtgtccgtcagctactgctagctccattttcatctaatttcaacagtagcagaataatgttattcttttacagatatttggttttcctccattgaatcacaattcataccaggaactatttatctatgaaggcatgggctaaatagaagctaatacttacttgtcttctaattgatccagataagccgaatttgcccgaagactcatcatcagttgtcagagaaagcatgatggtacttgttaagcaatattgtgccatttcctcctcctctgaaccaacctagttgagaacctcaggcattagaagcaaaatatgaagtctcattaaagagctgcttaggaaactatgataaagttgcaattgagggtggtatgtgttacaaaatgggcaacattttaaaacacataaggcacgcttggtaatggtatgttaagagagtcacctgtataacatgtatggcatcccacgctccttcctccaggcatcccctccgaccatgacctgactttgacccatcttcgaaaaataaaaaccagaacagctcaggtaaagagtttttattgcctaacattcagtgttattgaactctacagaaagaatgtacctttcttgataaggaaacatgccacaaagccttcattatcatcctcccacatgtagactgaagatataccaccttcataatacctggaaaagaaaactgatcaacacaggtgttcttttggtaactttgcaagcttttttcagtctccagtctaatggatacattagaagaatgaaacacatatcatatattgttaaaccatgagataaatctcacgactaggcaagcctttttttcagatcagatgctaactatgtctccgtcttagataactcaaattactttcactacatggttttcatgttgaacgaggtaggtaaagaacctcactggtcacgatagatcgcaaagatatcgttggcttcaacttcaagctttcttaattcagaagatgggtaaagagcatcctctagcggaggaagatacttatttgaccaaggtgacctgcaaaagtaaagattacaagaaccaacaaatagcaatttagctatgaacacgaagtactgtatcatcccaaaccaaagcgatccaatattttgaattttctctctacacaatgaaatagagcaaaaaagtacctgtaggaatctgcatctctattatactcacacaagatgaaatctttcccactttcaatatcacgtaacacctgtcattacatcaccaaaccaaacattgggagataagcacgactaaggcaacaaaatcacattttcaaatctcgataaagatagaaaatacctgaagagggagatcgacttgagagagaagatcggaagaatgttgaggaatgaggcttagaagagcagatagagccgtctccgactgcttcggcggcattctccggagaagtcccaaagctgcctccatttttttccaacctcgccggagaaaaaaaacacttctcctctgagaagacgaactaaaaggtaacaaccgaataaccaatctcttattgtctattataccctttaggcccatcataaggcccaaacattacgaggccttttactaagcgacgtcgttatgaacagaatatttattttttgctttcctgggattataaatctttttttccatcggacggtgaattgttagtcatg

SEQ ID NO: 14841 - DNA, 3000 bp, Unknown
  misc_feature (1)..( 3000): cDNA_ID_3019234_gDNA_ID_2684228_Annot_ID_192139 3000 nt of promoter + ATG
ttatatgatatataaccatccaaatacaacaatcattaaaacaaataaagaaaactgaacacaattttgacgaagaagtagaagggatcatgcgttctaaacggaagccgcaaccgaatgaatctgttaagtctgctcttcatatactcgcaaaaaactacgactaacgtcttatagatgagatctagtgccacatagatatttatgttttttcttaacatcttattactctactttttttttttttttttccgtctacttctccttcttaattattttgttgttatcgtcatgtctgttttttttgttaaaagaggctttattggttcataatttacacgaaattttgatgactttaataatatcatagaaagtaaataaatgaaagattataaactattgctagagagttttttataatcttgttgatttgtttttcacaatctcgtaaaaaaatttaaacaatctctcgattttgatgatactttcatgattttattttgtgaagaaaaatgtaaaaaatcataaaccattaacagaataatttaattcattaacaatcatagattattttgttttaattgaataacgcaaaatatttaataattttataaaaatataaatcaaataacttcagatttatgaagattttatattactttttacaaattctaaactaataacatctacaatagtttagaatctttcatttattcactttcaataatattattaaaatcatcaaaattcttagtaaattaggaattccagatagtgtcaagcaggatgttatcagcaacgtcaacgcagccgcgataaactcaattttatacattaaatcaatatcaacatatttccatagaattgtttaaaacatgagacagatttttggtatgccacaaggctaatctatagaattcatggacaatattttgtggatgagacaattttgatctttaaaaaattccatcatcaataaatacaacagttgaaatctattgaacagagattgctaagtactcgtgattaatagagtaaaatgtcagactctagtcgactaaatattttctaccaccaaaaagtaagttcgatatgggtgatgttgtcattcattttagatatttctgaaacactatctgacatatgtacgaaactgagcatgtcatgcgttacaagactaaattttcatattatcagggaggaatgtagagattaaatatggacaggcttgttgccaaactattgggttttagaaaataagtatcagtttccatcaaaatggcaaaaaccaaatcgcattacacatggaaatgcataaaactataaacttcaacaaaatgcaaatgaagaaaatgattgctctctcttagttctgaaagcaagcaatttggcgcctcaaggcgtatcaaagacgaagagtcttgccaaggaagggaacttgttgggttaaggcaagagaacctctatatatatggtcgatgaaagactacaaatttcgaccacattttaagcgagacgagtgttagggtctgcgaaactaccagccatacttcttgaagaagtccctggttctctttctagctcgagtgaaaactataactatgcatgcgagcacccatggaggaaaggtcccaatggagatgttgttcttgatccaagctggagggtctttcaatagaaatgttattaagagcgtaacaatcacaactccgagaatgattctggtgatgggtttgagcagggaatcctgaaaacaaaaggtgttcaaattaatagtgttatcagatgaatcacccaattaaagctgcatgttttaatgctttttttttctgttcttgcaacaatattatccaaagactttttacgccccaacgaagtcagaataccatgacatccattctagtttctacatgcgtattctaaatctatgagccataggagtgattccaagaaattgtttactttaagtaagaatacaagctttgacctaaacctaaggttccatgagacaccgaatccacgttaattgatattccagggcaattgaagagtaaagaagcctagaaagtctagagacatgtatgaggtttatgagcacaatcaaaagaaaaccatcaacttatctaaatgcagaacgccaatgtagagtaattctacaatccaagggtatgaagaacatgtaaaggagacaagaagcagattgggtcctatcctattccttaatcatgcgttcagagaaggtccaacagatgcaatgcaacaatattcaccgtgagtttattcattcaagcatcagtagggaactataactaagctaaggagatcgttctctgtccttttttcctattgcgtaagtgaaaactcaaaatcaaaacaatcagattacctgaggttcaccgtcgatgtaaatgacggcaccatccctataaggcaacacagaccgaccattcctagggtgaaatctgatcggaacagcacgacctttctcaacgttgaaagcgaagattgctttcaagccatatttctcaagaatagatcgaacctcgagctgatcctgctcataaccgccgagatttgacttgaacacatcgatcggaccttttccacacttatacagatgaatctccacctcaggaaccttcgccgccgcggtcgtcgatctcaattcactttccggttgagaattttcgagcaacggagtagtctcttcaatctcttgatgtggtggtggtggatctctctccttctccttctccgtcatcgatgacatgactaacaattcaccgtccgatggaaaaaaagatttataatcccaggaaagcaaaaaataaatattctgttcataacgacgtcgcttagtaaaaggcctcgtaatgtttgggccttatgatgggcctaaagggtataatagacaataagagattggttattcggttgttaccttttagttcgtcttctcagaggagaagtgttttttttctccggcgaggttggaaaaaa

SEQ ID NO: 14842 - DNA, 3000 bp, Unknown
  misc_feature (1)..( 3000): cDNA_ID_3019400_gDNA_ID_2684229_Annot_ID_192161 3000 nt of promoter + ATG
tgttgatatcatcagaacgatatcatatttaccaacttttccacaatagttgtgacggtcttgtttgcctctttgattaccaaaccttaaacaacattgtttataatcccgccactcgatggcatcgacgtttccctgtttccaggttgcaacaaatctgtcttgagcagccaagttattttagtcacgttaaatttggatttggcaaagacaaaatcagtggcatatacaaaccggtttggttatgtataactcttccgaacttggcctagaaaacgctactacatgtgaagtttttgattttagcaccaacacttggaggtatatcaatccttcttctccttatcggattaatacttcctcgtctcgggggcatgctctgtatgtagatggatcgctttattggttaaccgggaagaaagaaattaaagttttagcgttagatctccacaccgaaacttttcaagttatctctaaagctccttttgcggaagcagatcatagaaacattatcacacgcagcctgaataaccgtttgtgcttatcggttagtaaacctctccaacaaatgataatatggtcgttcaattcagagaacaagacctgggaacaaatatattcgatagtgaatcgtagtgttacgcaatcattaccagtagccattttggagaagaataagcttttgtgttgtcctagatcaaatagtagacagctgatgatatatgatatcaaaaccaaatctgttgattcagtttccataggcacctatcgttgcggagatagtgttttttgttatttcgagagtttaatctctatattgtaactttcaccattttcttctttttgtttgcttctcgtggatccatctatttgatttaaattttagattcttgttgtccaagtttgcagctttttcattattaattaaatttttaaagagacagattacagtgttgattgagtaagtgtgtacagggtctgaaaaatattgcagaacaaaatctttgaagcttagagttctgaaaccaagatccgcttttgtatgtccgaaaatgtctgcacatcttctccccacaacctaaattttcaaagaaaacagataaacaaaaagcactatgtgttatgatggatgagaatttaaaaacctcggaaaaaacaagatgaaaagtatatttggcgcaccaacaagcaataccgatggcgtttgctccgcctttatcagctccttcatcatctccgacatgcactgctctgtttacatctacgctgatttgttctgcgcttgacacaaaatgttaacgttaatttgttctccgcttgacacaaaatgttaactctgaaacctttcttataatttaaacgaaacaacacttcagtttagaatgcaatatgccaatacctaacgcagatttgaagattcgttcatcaggcttctcgtatccgacttctgcggatacaatcacagcatcgaacctgcaagagatgcaagcattataaacgattaccattcatggtgttaactttggtactcagacttctggtttatataacaaaacatgacaaagcttacatatctatgacattaagatccttcaatagctttcttagcctggtatcgaaattagacacaacagccatcttaactgcaatcatctaacaccaattttacaaatccgccataaagaatacaaaaagttatctaagttaacaaggagagagtaataataacctccagcatctttcagtagtgacattgtctcataagctccttctgggagatgccatgcctcgccattcgcataatacttaagagataaaacaatgtgatggattgttaatggaaccgaaagactagtcaaaagcctcaaagaaagagtctttcactcgatactcacttggtagacgtcttcgaagtagtcattatcagaacaaccagtagcttccgaaacaacaagcttccagaatggtcttccatctccctaacaatgaaagaatgttctcttttaatacgtttgcttacagtaacgagcaaagatagaatctattacaaagagagattcacacatgcatttagggacctggtaacgtaacttctcaggccaaggggcagaaaaaactctcttgaaaccttccttgatctcagctggagttgtcttgagacctgaactagaaacaaatgccaacatgagaacatctgaaattggttttggaacagatcaaagacaaagagtgtaagaaagtgaccatatttttggcccaaggaagcgtaggtttcatgaacaggtttcgacaattgcaaaagagttcctccagcatcaagcaacaatccatcataagctctcttgattggcttgccttcacaatgaccaaataattgaagtaaaaaaaaaggtcagattttgacagacatacaataagaaccctaatttacagaatacccaattccaaaatcaaaatgcaactcacagactctaattcaattttggtcattttaattgagaaacagagaaggattagaaagtagaaactaaccggtgctaaaagagacagaagaagaaggccggagagagctggagagtggtctcatggcttcaattagatagcttcctcgtgaacatctcaaacaagcttccatctttgtcaaatccgaaaatgtcaagatttcttccacggacaaatttttgtctcaaagatgaaactggttttattttaggtaaaattttaaaacaatcctcaaactaactaaaattttgacaaaataacccaaaacgtattactattaattggaaggtgattatgaaaactttgattagtctgtgggttgttttgcaatattactgaatttggggtttttttaaaccttctgaacaatttagagtgtttagtttagttgtacaacaaaaaccctgaggatttttcgtgttcgccggcggtgacatttacgcgcagaaacgttgatactctctctctctcgacggaaaattcttcctcggagatatg

SEQ ID NO: 14843 - DNA, 3000 bp, Unknown; identical to SEQ ID NO: 9418
  misc_feature (1)..( 3000): cDNA_ID_2182365_gDNA_ID_2684229_Annot_ID_192190 3000 nt of promoter + ATG

SEQ ID NO: 14844 - DNA, 3000 bp, Unknown; identical to SEQ ID NO: 9416
  misc_feature (1)..( 3000): cDNA_ID_2105933_gDNA_ID_2684229_Annot_ID_192186 3000 nt of promoter + ATG

SEQ ID NO: 14845 - DNA, 3000 bp, Unknown; identical to SEQ ID NO: 9408
  misc_feature (1)..( 3000): cDNA_ID_1012357_gDNA_ID_2684229_Annot_ID_192185 3000 nt of promoter + ATG

SEQ ID NO: 14846 - DNA, 3000 bp, Unknown
  misc_feature (1)..( 3000): cDNA_ID_3019345_gDNA_ID_2684229_Annot_ID_192182 3000 nt of promoter + ATG
ttaaaagagttttgcttttgcttttttttcctctttatgatcgtgttaatatatagtacacacaaatatgtgtatttacatgcatatgaacaaagctcttgggtccttatagttttgtgttcttttaatcatgcattataataattcatacatgcaaaaacaaactaacggtgaatatgcacatgcccactattttgtatgttttcgaagttttctttctggctctcaaattgattcattagtcttgtaagcaaacgttgtctccatgttattttggataatataacatgtagtcatgtagagaatacccaaggaggaatcaaagtcaagcgacagattaataatatcatagatggtcctgttcttttttgtaattagaaggaaagagtatgtacatatcctatgaaaatatcatgattaactattagtgatactttattaattcaataattaatactacctttttcttaatgattaaccaattgattaatgtgcttaatgttgttgttacattaaccaatcgtcctacatttaatgggcctaatactaaataatgggccttaacgagcttatcatgttcagttataaactcaaatattttttaaaaaaatcttcttccacttgaatacgaaacacggaaacactaacgaggaagagaacgtgaagctatatatatatgtctcgagagctcactgtatctcttgccgccatagcttcacaagctctaacatttcctcaattaaaccaaatccatgctcagctcattgtattcaattctcttcctcgacaaagctactgggcttcgcgtataatcagctgctgcacgcgcctccgtgcgccgtcttactacacgcggctcattttcgattcagtgacattccctaatgtcttcgttgtcaattccatgtttaaatacttctcgaagatggatatggcgaatgatgttcttcgtctgtatgaacaaagatctcgttgtgggattatgcctgacgctttttctttccctgttgtgatcaaatcggctgggagattcgggattttgtttcaggcccttgttgagaagttgggattttttaaggacccttatgtgaggaatgtgataatggatatgtatgtgaagcatgagtcagtggagagtgcacgcaaagtgttcgatcaaatttctcagagaaagggttctgactggaatgtgatgatttctgggtattggaaatggggaaacaaggaggaagcttgtaagttgttcgatatgatgccagagaatgatgtggtttcttggacggtgatgattactggttttgcaaaggttaaggatttggaaaatgcgaggaagtattttgatcggatgccggagaagagtgttgtttcttggaacgctatgctttcaggttatgctcaaaatggttttacagaggatgctctgagattgtttaacgatatgttgagacttggagttaggccaaatgagaccacatgggtcattgttatttccgcatgttctttccgtgctgatccttccctcactcgttcactagtaaaactgattgatgagaagagagtccgtttgaattgctttgtgaagacagcattgcttgatatgcatgctaagtgcagagatattcaatctgctagaagaattttcaacgagttaggtacgcagaggaatcttgtgacttggaatgctatgatatctggatacactagaatcggggatatgagttcggctaggcagctttttgatacaatgcctaagcgaaatgttgtttcttggaattctctgatagctgggtatgctcacaacgggcaagctgcactagccattgagtttttcgaagatatgattgattatggagattccaaaccggatgaagtaacaatgattagtgttctctcggcttgtggacacatggctgatctagaattgggtgattgcattgtagattacattcgtaagaaccaaatcaagcttaatgattcaggatacaggtctttgatcttcatgtatgctaggggtggaaacctgtgggaagcaaaacgggtgtttgacgaaatgaaggaaagagatgttgtctcttataacactttattcacagcttttgcagctaacggagacggggttgaaacgctgaatttactctcaaagatgaaagacgaaggtattgagcctgaccgtgtgacttacactagtgtcttgacggcttgtaaccgtgcaggattactcaaagaaggccagagaatattcaaatcaataagaaatccactggcggatcattatgcttgtatggatttgttgcgctgagttgataagcaaatagattaatcagccaaaggtagaatgtacagtccctaagaaattgccaatggatgcacgctcctcaatgccagtcttacatcaggtgagcataatctgtatttgaattgatttaatataaagttcaaaaaaatttccttacaacctaggaaaaggatagaacccaaaattaaaactaatactaaagtcccactcttgtcaatgtaataatatggtcgtctggttagaccccactttttgcctttttttgtttctttagttgcttcttctcccatttaacattccgtgtgaataggatatccttaaagtggtttctatgtgatttcttgggtcttttctttgttatttcttacatgtgagtgcttccctaaagttcacttttgttttgtctaccattctgtgtgggttcacttatttactggtttttgcttcgaagcttcctcctgaaactcccaagcttgccactttattttgtttaagaatgtgtatataatctgaattgtgggttagggcaacgaaaccacagtagaaaaccaacatctgcagaaaggaaactatctcctgaaaagaaaaacaaacttctttgttcctgtttatattgttctctttctcaattatatcagttttgcggagtttctattatataactgtgtcttgatcactgagtttctgcctaaatttttttttct

SEQ ID NO: 14847 - DNA, 3000 bp, Unknown
  misc_feature (1)..( 3000): cDNA_ID_3019355_gDNA_ID_2684229_Annot_ID_192179 3000 nt of promoter + ATG
actgtacattctacctttggctgattaatctatttgcttatcaactcagcgcaacaaatccatacaagcataatgatccgccagtggatttcttattgatttgaatattctctggccttctttgagtaatcctgcacggttacaagccgtcaagacactagtgtaagtcacacggtcaggctcaataccttcgtctttcatctttgagagtaaattcagcgtttcaaccccgtctccgttagctgcaaaagctgtgaataaagtgttataagagacaacatctctttccttcatttcgtcaaacacccgttttgcttcccacaggtttccacccctagcatacatgaagatcaaagacctgtatcctgaatcattaagcttgatttggttcttacgaatgtaatctacaatgcaatcacccaattctagatcagccatgtgtccacaagccgagagaacactaatcattgttacttcatccggtttggaatctccataatcaatcatatcttcgaaaaactcaatggctagtgcagcttgcccgttgtgagcatacccagctatcagagaattccaagaaacaacatttcgcttaggcattgtatcaaaaagctgcctagccgaactcatatccccgattctagtgtatccagatatcatagcattccaagtcacaagattcctctgcgtacctaactcgttgaaaattcttctagcagattgaatatctctgcacttagcatgcatatcaagcaatgctgtcttcacaaagcaattcaaacggactctcttctcatcaatcagttttactagtgaacgagtgagggaaggatcagcacggaaagaacatgcggaaataacaatgacccatgtggtctcatttggcctaactccaagtctcaacatatcgttaaacaatctcagagcatcctctgtaaaaccattttgagcataacctgaaagcatagcgttccaagaaacaacactcttctccggcatccgatcaaaatacttcctcgcattttccaaatccttaacctttgcaaaaccagtaatcatcaccgtccaagaaaccacatcattctctggcatcatatcgaacaacttacaagcttcctccttgtttccccatttccaatacccagaaatcatcacattccagtcagaaccctttctctgagaaatttgatcgaacactttgcgtgcactctccactgactcatgcttcacatacatatccattatcacattcctcacataagggtccttaaaaaatcccaacttctcaacaagggcctgaaacaaaatcccgaatctcccagccgatttgatcacaacagggaaagaaaaagcgtcaggcataatcccacaacgagatctttgttcatacagacgaagaacatcattcgccatatccatcttcgagaagtatttaaacatggaattgacaacgaagacattagggaatgtcactgaatcgaaaatgagccgcgtgtagtaagacggcgcacggaggcgcgtgcagcagctgattatacgcgaagcccagtagctttgtcgaggaagagaattgaatacaatgagctgagcatggatttggtttaattgaggaaatgttagagcttgtgaagctatggcggcaagagatacagtgagctctcgagacatatatatatagcttcacgttctcttcctcgttagtgtttccgtgtttcgtattcaagtggaagaagatttttttaaaaaatatttgagtttataactgaacatgataagctcgttaaggcccattatttagtattaggcccattaaatgtaggacgattggttaatgtaacaacaacattaagcacattaatcaattggttaatcattaagaaaaaggtagtattaattattgaattaataaagtatcactaatagttaatcatgatattttcataggatatgtacatactctttccttctaattacaaaaaagaacaggaccatctatgatattattaatctgtcgcttgactttgattcctccttgggtattctctacatgactacatgttatattatccaaaataacatggagacaacgtttgcttacaagactaatgaatcaatttgagagccagaaagaaaacttcgaaaacatacaaaatagtgggcatgtgcatattcaccgttagtttgtttttgcatgtatgaattattataatgcatgattaaaagaacacaaaactataaggacccaagagctttgttcatatgcatgtaaatacacatatttgtgtgtactatatattaacacgatcataaagaggaaaaaaaagcaaaagcaaaactcttttaataatgtaagaaaatataagtattctaagaaaaacaatggcagtaaaataggcatgtgatgtttaattcgtttttgttggacgacatttcaaacggaccaaacaataaaacagatcagacgtgagatctaaagactgaagacatttgtcacagaaaagataatactcctatatctatattttgttatgaatgcaactaaaagaaaaaattatttgttctccaatttattttgggcaacaaaaagaaaaaagacagtgaagactgaagaggcgtgagaagagtgaagacttgttttagatctgacacagagagaccagaagaaggagaatcccgagcgtcaccgctccttccgacccatttttcactttttcacatttcttttcgtgtctttttttaattattttattcattcttttatttttgtttgataaaaagcaaatcaatcagccaatcaccgtgaattttttgaatttcttcagtaatctctttcttcatctctcccactctcatcctttcgctctcacatcttctgtttcttcttaaaaagattcttggtatcacctgcgcaatttccggtgtgactatactaaatagttcggagaagattagtctaaaactatgtaagatttgttttctggagagaaagaaagaaaaatg

SEQ ID NO: 14848 - DNA, 3000 bp, Unknown
  misc_feature (1)..( 3000): cDNA_ID_3019359_gDNA_ID_2684229_Annot_ID_192176 3000 nt of promoter + ATG
gctttctggaataaatccatatctactggatttgttctctgttatttcccaagtttggtctctattcagtaatttgattattgtcaatgcatattgtaatatttgcttcttccatcaacagtttgttggtcaaattttgcaactcttcaagatattgttttggtccatatagctaataacattcgagacaagataagagagctaattgatgaaagtattacgaggagattgtataattagtataaagatctaaggtattttgattttctcatttttccgtagaaaaaggaacctggatcctattaagaataataatccgaaaactgcgcattatatatgcagtcttagttacaaaacaccattcatagaaaaacattctctttcgttttctctcctctctctccatattgtttttcttgaacaacaagcaaaaacagggcaaaagctttggctgtttgttggaagggggcaaaatggttatgtaatcagcaagcttcaccaagtttgcagccaagtactcctgcatccatggtaagtttccggaccatcgttcccggtttaggtcgaattgtaaacttgtttgggagcggggttttcggtttagagctccacgcatttgcttttccggattgcacaaaataagctccgttgagaaagtaatctccttctgattgccaattccaagatttccattcaccgtatggtgtgtactctctttttgtaatctgtttggcttcttcattaggaggagcaatgaaacgattgccttgactaataattgtagggttcatgttcccaccaattgcatacatttcccaatgtgtgtagtcattgttcaccacatgtatcgttccgtatctgcaacgaggcattctctgttccaatcgcttaccgaagtggttaaacgcaaccgttatctgcattttcttgtcgatcacgtgttcgtccctcgccccaaacaacatcacctgttctctcacaaaatttaaaacaagactctaaattagaggtcttgattgtttcatatgcaacttcacatgagcgaaaacaaaggaatctttttacctcttggtggtcggtgaaatgactgttggaaatagttacagcagtggagccgtcaatagcatcgatcataccatctgcacatcttgtcattgagacatggtcgatccaaatattggttgctccaaacaaactgattccatcaccatcactttttgtcctaagccctatgtgagcctcagagtctctgatcaacccaccgttcccaggaacaatgtgcttgacataaatattgtgaatgatcacattattcacaaattgcaacgttaatccagcaccttccatgatgtaaaccctagctcctcttccatcgattgttttgtcgctcgttatcatcagttcttgttgcagttttatgatcatgcttcttgcgaatatgatccaaagcggtccgtctcgagtcactgcatgccttaacgttcctggtttagggttgataagatcgttgtcagacgcgtctttgacgacgtatatcggtccgtcttttcctccggtggttctccggccgaatccgagcacacagtcggctagtttcttccggttattagcccagttacgatcgcatcgccagcagttgtctatcgggttataagctaggcattttccgctgcttttgtgcgttttacgaccacttctcacctgagtaagctctctccttgtatcgttccttgattccgatgcatccactgctctgttaaaaaaaataaaaagtgtttaattagtacttgtttaggaagttaggttaaacatttgacctaacaaagacaaaaactcacatattgacatggtaattaaaatggttggtgacgttaagtggatgaggatcgtaagagccgatggtttgtttcaatgcatcactttgtcgttgcgtccagtagctatcaaagacagcaacattgcctcgaacctgtggggccactatagctaagaacgaagagaagaaaacgaaaacatagccgccaagattcaagaaagctgctgccattttaaatatattgcaaatgcagagaccaaagcctgtgaactttatattttcccggcaaaacctcaaacggaggttgttgtttcagataggcctgccgggattaaaagattaaagatttgaatcacctgattgctttaataaccaggaactggggagagagaaaaggagatgagaagagtcaatagaggattgagaattaacatagattagacaaccattgatttaaatctctatggtcatttctccaaaaaacccaattatagattttggatgcctttgtttaatccttcttttctggatattttcagttatttttgccttgatctaatattatttttactgagataattacccaatagcacctttaaaacttgaggtaactatttttgtatttacttaattaatcatacatactacatatgattattaaacgtagtatatatcaagtctctaggtctattgaaaataattatcatacaagtaattaaaaaaattccccatggggtcagaagctaattaatggcgggactctctgttcccccaaaagaatttgaagacatgactataaaaaaaaaagaatgaaacaattttattttggactcctgatctgtgaaagactgaaacagttcatacgcaaactgatataaaatccaaaatgttatctctaagaatatggtccgtgatcaataatacagatctaaaattcaccaacttatatgcaaattgcaaaatgcaataaataaatcttgaccatatgttacaaatctaccagatcattatgtacagagagcactgcgagtcttgatcacacatttcaccagaaaagtaaaacaatacaacaccataaatgtttcttctcctaccgatttcaagaaagacactaataattactcaaagaagctttaaatgttaaatctctttcaccggagaaagaagattcttagctgaaaata

SEQ ID NO: 14849 - DNA, 3000 bp, Unknown
  misc_feature (1)..( 3000): cDNA_ID_2991381_gDNA_ID_2684229_Annot_ID_192175 3000 nt of promoter + ATG
ccattgatgatgtctttgccgaatccaagcaaaggcaaaggaaagacactactatattcactagaagatttgtcgagaatgacttgtttatacctaggtggaggaaaacttcgatgccatctagtggctggattgactacaatacccgatttataaagattgtagaagcatatcaaaccatcacaactactaggacaaacaaaatcaaatatcttctcccgaggagtaggggtcttaaccgaaatttcctttttttttattaactaactttcaccaattttttattttttttaactacaattcttcaaaaaatcaatcaaaaaactaatgaaataataaaaggattgctttaaatcttaacccaaacagctacactcggaattccacggtgaaccacgaacatcatataatacccaggtggtgccacgtaggagttagtaggcccgtccacgtcagctttataagcgaaaacagataactgactcacgcgcctgacgcgcaaaaccaacaacctctggttcatcgccgttgagtgagtgctgaacgacggcgccacgagcctcaccgatacccctccgtcgaacattccgaatgccggaatcgcgaacgttacggcaaaagcctgaccgtacaacatattcccggcgagctccaccgtgatgatcgtcggtctcacacgtgcgtactgtggatccaggtaacgcgggagataagcctcgaggctgagctccgttgggtacggcctcgccgtgaaattgtaatttcgatgaggattgcttcctccgactaagactctgccgtctgacagaagaagagacgccgaatggtacattctagggattcgagtcggggtgagaatttcgaatctccgggtctggtcaggctcctcgggtaagtataaaatcgggttgagaacagcgttcgtcgcgtcttcccaaccagcggttccgttagcagcaccgttaatgatcaaaacgtcaccgtttggtaacagtaacatatcagacatgacacgtggcgatggcatttgctccatgacccatttcggatccgggtcggtcactttcaatctcccacacgtgcgtgatcccgcgacgaagattttaggaatcgtcctcgccgctttgaagaacgctcccggcggagcaccgccgcataccataacctcagcagttatcttcgttctgttaatgtctccggtgagaaagagagggaggagcacggaggagccagtgctgggataattccgtttatcgccgccgggaatctgtggaaactccttgatgattcggtgattgacgaaatcgaacaaaatcgatctccgattggcgaagatgaagagattaccgtcggggagaagatgaagaaacggataaagattgttttcttcattcggatctctcgtctccgccaagaatctgagattgaaaacggattctcccggatccttggggtaaaactcgtagttgaaagctcttcttccgccgacgatgataatccgaccatcgggaagaatctgattggtggaataccaccggcgagaggagagatacgctctgttctcaatccaatcacacgaaacgcttccaactcctccgtcgcaaggtgtgaaaacccgtacagttctttcgccgttgccataaccgccggtttggattaaagaaccggaagcgtttaaagaaccggaagagcaccacgtgtcgtaacgtagtgtaagtgggcgaaaggtatttgaagcgacgtcgtatagtattgaatgagcagagcagtcaaaaacggtggcgttttggcaggtttgagaagggagagaaacattcgaaggtccataatccgtacggtcaaagatgacgactttgttgttgtgtagaagctgcatgtgcattgcggatatacctacactcggctgcagaagatcccacctcccgccggtgagaatagctaacggtgaacgtggaaggagcaaatccgacgtggaacagaggaagaagaagaagaatgatatcacgacggcgttaaggttgttcttgaatctttcttgcgtcattattttcagctaagaatcttctttctccggtgaaagagatttaacatttaaagcttctttgagtaattattagtgtctttcttgaaatcggtaggagaagaaacatttatggtgttgtattgttttacttttctggtgaaatgtgtgatcaagactcgcagtgctctctgtacataatgatctggtagatttgtaacatatggtcaagatttatttattgcattttgcaatttgcatataagttggtgaattttagatctgtattattgatcacggaccatattcttagagataacattttggattttatatcagtttgcgtatgaactgtttcagtctttcacagatcaggagtccaaaataaaattgtttcattcttttttttttatagtcatgtcttcaaattcttttgggggaacagagagtcccgccattaattagcttctgaccccatggggaatttttttaattacttgtatgataattattttcaatagacctagagacttgatatatactacgtttaataatcatatgtagtatgtatgattaattaagtaaatacaaaaatagttacctcaagttttaaaggtgctattgggtaattatctcagtaaaaataatattagatcaaggcaaaaataactgaaaatatccagaaaagaaggattaaacaaaggcatccaaaatctataattgggttttttggagaaatgaccatagagatttaaatcaatggttgtctaatctatgttaattctcaatcctctattgactcttctcatctccttttctctctccccagttcctggttattaaagcaatcaggtgattcaaatctttaatcttttaatcccggcaggcctatctgaaacaacaacctccgtttgaggttttgccgggaaaatataaagttcacaggctttggtctctgcatttgcaatatatttaaaatg

SEQ ID NO: 14850 - DNA, 3000 bp, Unknown
  misc_feature (1)..( 3000): cDNA_ID_3019363_gDNA_ID_2684229_Annot_ID_192174 3000 nt of promoter + ATG
aattaagtaaatacaaaaatagttacctcaagttttaaaggtgctattgggtaattatctcagtaaaaataatattagatcaaggcaaaaataactgaaaatatccagaaaagaaggattaaacaaaggcatccaaaatctataattgggttttttggagaaatgaccatagagatttaaatcaatggttgtctaatctatgttaattctcaatcctctattgactcttctcatctccttttctctctccccagttcctggttattaaagcaatcaggtgattcaaatctttaatcttttaatcccggcaggcctatctgaaacaacaacctccgtttgaggttttgccgggaaaatataaagttcacaggctttggtctctgcatttgcaatatatttaaaatggcagcagctttcttgaatcttggcggctatgttttcgttttcttctcttcgttcttagctatagtggccccacaggttcgaggcaatgttgctgtctttgatagctactggacgcaacgacaaagtgatgcattgaaacaaaccatcggctcttacgatcctcatccacttaacgtcaccaaccattttaattaccatgtcaatatgtgagtttttgtctttgttaggtcaaatgtttaacctaacttcctaaacaagtactaattaaacactttttattttttttaacagagcagtggatgcatcggaatcaaggaacgatacaaggagagagcttactcaggtgagaagtggtcgtaaaacgcacaaaagcagcggaaaatgcctagcttataacccgatagacaactgctggcgatgcgatcgtaactgggctaataaccggaagaaactagccgactgtgtgctcggattcggccggagaaccaccggaggaaaagacggaccgatatacgtcgtcaaagacgcgtctgacaacgatcttatcaaccctaaaccaggaacgttaaggcatgcagtgactcgagacggaccgctttggatcatattcgcaagaagcatgatcataaaactgcaacaagaactgatgataacgagcgacaaaacaatcgatggaagaggagctagggtttacatcatggaaggtgctggattaacgttgcaatttgtgaataatgtgatcattcacaatatttatgtcaagcacattgttcctgggaacggtgggttgatcagagactctgaggctcacatagggcttaggacaaaaagtgatggtgatggaatcagtttgtttggagcaaccaatatttggatcgaccatgtctcaatgacaagatgtgcagatggtatgatcgatgctattgacggctccactgctgtaactatttccaacagtcatttcaccgaccaccaagaggtaaaaagattcctttgttttcgctcatgtgaagttgcatatgaaacaatcaagacctctaatttagagtcttgttttaaattttgtgagagaacaggtgatgttgtttggggcgagggacgaacacgtgatcgacaagaaaatgcagataacggttgcgtttaaccacttcggtaagcgattggaacagagaatgcctcgttgcagatacggaacgatacatgtggtgaacaatgactacacacattgggaaatgtatgcaattggtgggaacatgaaccctacaattattagtcaaggcaatcgtttcattgctcctcctaatgaagaagccaaacagattacaaaaagagagtacacaccatacggtgaatggaaatcttggaattggcaatcagaaggagattactttctcaacggagcttattttgtgcaatccggaaaagcaaatgcgtggagctctaaaccgaaaaccccgctcccaaacaagtttacaattcgacctaaaccgggaacgatggtccggaaacttaccatggatgcaggagtacttggctgcaaacttggtgaagcttgctgattacataaccattttgcccccttccaacaaacagccaaagcttttgccctgtttttgcttgttgttcaagaaaaacaatatggagagagaggagagaaaacgaaagagaatgtttttctatgaatggtgttttgtaactaagactgcatatataatgcgcagttttcggattattattcttaataggatccaggttcctttttctacggaaaaatgagaaaatcaaaataccttagatctttatactaattatacaatctcctcgtaatactttcatcaattagctctcttatcttgtctcgaatgttattagctatatggaccaaaacaatatcttgaagagttgcaaaatttgaccaacaaactgttgatggaagaagcaaatattacaatatgcattgacaataatcaaattactgaatagagaccaaacttgggaaataacagagaacaaatccagtagatatggatttattccagaaagcataatcatatgaattggtttcgaagtcaagtgtcaacagtgttcttgttgagacagcatagccaagtccaattgtatatagatctatggaacatattttgtctcatgtcttatcacttggtcgggccaatcgttggtcctaaaatcgaaaacttcgcatgtagtagcgttttctagacctattaatgcagaggtacatagacaaacgaccttgtatgtgcctgcagatgtatatagacaagtttcagttcaataaaagtttctctttcgttcttttgtcttctctaaggagaagagatattatctcttactctgtttcttctttctctcaatattccaacaaaatttataaaatttgggtctatttgtaatttttgaagaaataaagctgtagaaacgaattaacgaaaagttatcactttctttgtctcgtcatctctctcgagtctcgagtctctgagtgtgtaaaggaagcgcctttttctctcctccatcgtaattcgcagagaagacacactacattgactgagagggaacaaacacaaagcgatg

SEQ ID NO: 14851 - DNA, 3000 bp, Unknown
  misc_feature (1)..( 3000): cDNA_ID_1027959_gDNA_ID_2684229_Annot_ID_192173 3000 nt of promoter + ATG
gatgtatatagacaagtttcagttcaataaaagtttctctttcgttcttttgtcttctctaaggagaagagatattatctcttactctgtttcttctttctctcaatattccaacaaaatttataaaatttgggtctatttgtaatttttgaagaaataaagctgtagaaacgaattaacgaaaagttatcactttctttgtctcgtcatctctctcgagtctcgagtctctgagtgtgtaaaggaagcgcctttttctctcctccatcgtaattcgcagagaagacacactacattgactgagagggaacaaacacaaagcgatgtcgcaactcttatcgactcctctaatggcggtcaactccaatcctcgctttctctcttcgtcttcagtactcgtcaccggaggttttgcagtgaaacggcatggattcgccttgaaaccgacgacgaagacggtgaagctcttctcggttaagtctcgccagacggattacttcgagaagcagaggttcggtgactcttcttcttctccttcacctggtaagccatctcacttggttactttagggttttagcttgcttaattaagaaattggaagcttaaaaacacaaaagggtactcttaattacgagaaatttgtaaccttgaagcttgaaatccaaaaagagaactctttttatatctatagatggagctcgtaggtgatgtttacttgtgttctttgtttcgatttgatagctgaaggattgcctgctagattttacgtgggtcattcgatatacaaagggaaagctgcgttaacagtggacccaagagcaccagagtttgtggctttagacgtaagtctctatcccaaaattaaagatcaaagagctctaactgaataatcatgctttgagttttccatttgatttctgttgtttttctgcagtctggagctttcaagttgtcaaaagatggtttcttattgctccagtttgctccttctgctggtgtacgacaatatgattggagcaagaaacaggtttggttttatctctttaacttcagatgatccttgagctgtaactttgttaagaccatttgactggatttggtgttaaaaggcagtcttttttctattatgaatttggtaaagcttcatgtcaaaattgcaggtgttctcattgtctgttacagaaattggaactctagttagcctaggcccgagggaatcttgtgaattcttccatgatccattcaaggggaaaaggtaaaaagcatcattacactgataatattggttgtattcttattatattgctcctgatcggtttgtttgttgtatgtagtgatgagggaaaagtaaggaaagtgttgaaagttgagcctctcccagatggttctggtcatttcttcaacctaagtaagtaaatttaatcttcttcttgattcttgtcaaaaaggatagtctctaacgatctccgtgtatatattaggtgttcaaaacaagcttgtgaatgtggatgagagcatttacataccaattactcgagcagagtttgctgttcttatctctgcattcaatgtaagatcagaaaatatctcatctttaacattaccggcatgaactttcaaagaaacattactaaactcctttttttcttctatattgcaagtttgtcttgccttaccttataggctggcatgcatttgcaaactccatcaaaccagaagagacaagccgtgtgaacaacgcttcgcctaactatggaggagactatgaatggaatagatgatgaatcttagggccataacaggaacatatatcagagatcatcctaccctttttgttttgctgataggtttcgtcaggattgatatatgttcgtaggtagcagaagagactaaaagtagtttattttttcgtccttttgaccaaatgttcaaaagccacatatcatttcgtggtaagcggttgtatctcaaaacatcagtctgatcttagttgtttttgatttaagagcaaatctcaatttgaagtctgagtacgagctagtatgatccaaatgcctaggctttgagacgaggcttgaagatgaattggtttgtctagagagattggagaaacaagacataccacaaaaacatttctctctagtaacaaaaacatcactctactctactcttgtggtttgggtctggattttagtccggttagtggtacaatggtttatattggtttattagaaatatatagtttacgctacattaagaaaagtactctaatttgtcatctgaagatttacataaaaaagattacatgtcatcgttgtatgttaactaacactaatctcccggttaaagtgtagattgccctaaacggtttaattccggttaggaacaaaccaaccactcgctcggtcgtccaaagggcaaagcgaatccaactttacagatatgtcagagaggagccaagcttctagaagatcattcattcatcacttatacgatctcttcccaaattattgattttttttacccatttctctcatcgcacggtgatattgagaatcgccgacctgaatcgatcggaaaactttctctgattaccggcggtcaacaccgctgaacacatatgtttgtttgacgacctcttctctccgcgatctttacctcaacaacgagatctgtttccacggtaccattttcatccgatctctgttcttctatgtttgtttactggatccgttgattttactttcatcttatcatttgtgtgtggctattttggtgaattgatgcgatcttaagctgtttctaggttcaagccttatatgtttcttctaagctaatcataggtcgtagacttgttaggaagattcgaatctagtacaaagttagcaactttagcatacgtaaatcgttagtagtaatttctagattgatagaggttcgagaccttaaaaggtgatgaatatttggtgggttttgtttattagaaagaaaggaggatg

SEQ ID NO: 14852 - DNA, 3000 bp, Unknown
  misc_feature (1)..( 3000): cDNA_ID_3019366_gDNA_ID_2684229_Annot_ID_192172 3000 nt of promoter + ATG
ccaaagtaaaaatcaaacctttctatcaaattcagagctgaggaagtgatataaagataaatctaacgatcagagattaatcagatctgggtataaatcaaaagcagacaattttagcaaaaatggtgaaaaaggaaattaaaacgtcaacctcagagaattgaattgatgagtagtagtaccaaacttactgtggttgttcttcgaatgttgtccttccttctaaaagtcggaaacaagatcaatgacctaaaaggcttaaaggcatagtggtagctcactgtgaacaaatagtcttccccaacggttccactgatagcgaaagaagaagatgacagatattaccacttttaattagaaagaaaaaattaattaaggaatagacaaaaacaaaagaaatttcggttcaaagcgacgtcgtttggaatgatgtgtaggcaaagtctaaaactaggcctttctgggcccaattaaaggagtcaaagggagttatttacagaaataccctcctttttcttggatcatgatcatgacattgatgataagtgataaccttttttctaaaacaatactaacaatcaagaatgatgggtgtcattatccaagtggttagttcgcttaatccaaacatctaatctagtattcctaatcaattatttaaatcgtaaccactaaccagctcatgataggaatgtattgtattctaactagatattttttgacgtttcataaacgaatgtgaaagaaacatgattaaattatcactataataaagtttagatttgattctgttcgaagttgaatcctggttttaagaaatgaatatcttaaaatgtttgaattttttttgtggataactttacattagcaaattttatgtcacaactaaactacagtgtaaactttatgatatttttttttttctgaatttattcaactatatgctatataatttgggtaatttattttgaacatgcctaatttatatggacctaaagatgcatattttgggccttaaattagttggatacatatatgggtttaaattctaacctttaataagcctataagcccaaaaaataacagtttgtaagttatctgacaaaggattttaataataaagctgcatataaaattgaaaagaaatgcatgttgtataatattaattgatactttggcagtgtcgcttattacaaaggcagttgcatgtgatgtgcttgcaaactcgcattttatcttcccttacctttttgtttttagaaaatagtatattttttcatcatgattacttggaaacttggaagctgtgacaaaatattggttttgagtgcttctgataaaaccttgtattttgaacttgaaaacttttgttttcagccatttttttaacttactacgatgacggtcacttgttttgggatgaaactttttactacttggtgttggtgatgcatggtttctataattcctcttatacaacaaaacttttttggtttttgtcaaaaattgtatataaccaaccttctttttattaggatcgcacgtcaggccacttaaaaagaagtaaagaacaatgagagatcgatgtaaaaagaataaaggaacaaaagagaaagtaatggacagttcatcacaattcacacaccaaaaagaaaacagctgaacatttgttagaatctcaacactttccaaacacacgaaaacaaaatgacactcatttctcaccgacaatagtgatgaaaatatatcatggccgaactaattggtagtattattagtttgagattggtattttttgtaacagtttgatattgaattgttgattgatgaccacgagaaaaaagaagtacgatttatatcatttgttggtttactgtatatagatgatcatttggtgtccttctggtttcgagaaaaacaacaagtggttaaaagtgtagttcgagaaaaagatttggttaggacatgtaattctttatttgagcttttaatccaacgaacggggttagattttccttgcgacggtggctttggatgatccttaacggcacgatctgatcattacatatttacattgacgaaagagcacgtgtaaaaaaactcgttcactggtctggttgacttttattacatactgtctggtcgctatatatctatcaaatctctatgcattaacaattaatgcaacgttgctcattaattaagtatgtattttttgttattttacaagtagtattgatattacaggagttaaaatgttataaaagaaactacaaacatttattcgtaagtttattcatttatattttttaaaaaattggtaaagatgaaagaatttaccttggggaagagatcaacggatttcgagagaagtactactacacaacatttattcgtcaaacatgtatgtatttgtatgtttatgcatgtattatgtatcaaataaatgcatgttatatgagtaataaagaaaggtcttctgaccataacagagaaattaattaagaaccagttgaagtaaataaataactctaaattgtggaaattttagatcaaaagtagataaatagtcagatatttcatgtggattttacgtattttaaggatctaattcattttatgcttttaaaaaatttcattcactttcttcgaagcagtaaaacagtctgtcaatgtgaaacttatgaacaatcaacataagaaacaaaaattaaacaaaatttgtatttattgtcttcttctcagcagaacttctctccacttaattttgtttcttgctctgtcccaaaaacattgtttcatttttttatctcccaatttccctagaaaatctgcttccgatctaaaaaaatctctagaatttatgtacaaaacaccatttttttagactactaaacaaatactaacactaatctcggctacaataacagaaagaccttctgttccttaagccacaataacatctttctttctaatttctctgtaattcttcctgagaga

SEQ ID NO: 14853 - DNA, 3000 bp, Unknown
  misc_feature (1)..( 3000): cDNA_ID_3019368_gDNA_ID_2684229_Annot_ID_192171 3000 nt of promoter + ATG
cagaagacctttctttattactcatataacatgcatttatttgatacataatacatgcataaacatacaaatacatacatgtttgacgaataaatgttgtgtagtagtacttctctcgaaatccgttgatctcttccccaaggtaaattctttcatctttaccaattttttaaaaaatataaatgaataaacttacgaataaatgtttgtagtttcttttataacattttaactcctgtaatatcaatactacttgtaaaataacaaaaaatacatacttaattaatgagcaacgttgcattaattgttaatgcatagagatttgatagatatatagcgaccagacagtatgtaataaaagtcaaccagaccagtgaacgagtttttttacacgtgctctttcgtcaatgtaaatatgtaatgatcagatcgtgccgttaaggatcatccaaagccaccgtcgcaaggaaaatctaaccccgttcgttggattaaaagctcaaataaagaattacatgtcctaaccaaatctttttctcgaactacacttttaaccacttgttgtttttctcgaaaccagaaggacaccaaatgatcatctatatacagtaaaccaacaaatgatataaatcgtacttcttttttctcgtggtcatcaatcaacaattcaatatcaaactgttacaaaaaataccaatctcaaactaataatactaccaattagttcggccatgatatattttcatcactattgtcggtgagaaatgagtgtcattttgttttcgtgtgtttggaaagtgttgagattctaacaaatgttcagctgttttctttttggtgtgtgaattgtgatgaactgtccattactttctcttttgttcctttattctttttacatcgatctctcattgttctttacttctttttaagtggcctgacgtgcgatcctaataaaaagaaggttggttatatacaatttttgacaaaaaccaaaaaagttttgttgtataagaggaattatagaaaccatgcatcaccaacaccaagtagtaaaaagtttcatcccaaaacaagtgaccgtcatcgtagtaagttaaaaaaatggctgaaaacaaaagttttcaagttcaaaatacaaggttttatcagaagcactcaaaaccaatattttgtcacagcttccaagtttccaagtaatcatgatgaaaaaatatactattttctaaaaacaaaaaggtaagggaagataaaatgcgagtttgcaagcacatcacatgcaactgcctttgtaataagcgacactgccaaagtatcaattaatattatacaacatgcatttcttttcaattttatatgcagctttattattaaaatcctttgtcagataacttacaaactgttattttttgggcttataggcttattaaaggttagaatttaaacccatatatgtatccaactaatttaaggcccaaaatatgcatctttaggtccatataaattaggcatgttcaaaataaattacccaaattatatagcatatagttgaataaattcagaaaaaaaaaaatatcataaagtttacactgtagtttagttgtgacataaaatttgctaatgtaaagttatccacaaaaaaaattcaaacattttaagatattcatttcttaaaaccaggattcaacttcgaacagaatcaaatctaaactttattatagtgataatttaatcatgtttctttcacattcgtttatgaaacgtcaaaaaatatctagttagaatacaatacattcctatcatgagctggttagtggttacgatttaaataattgattaggaatactagattagatgtttggattaagcgaactaaccacttggataatgacacccatcattcttgattgttagtattgttttagaaaaaaggttatcacttatcatcaatgtcatgatcatgatccaagaaaaaggagggtatttctgtaaataactccctttgactcctttaattgggcccagaaaggcctagttttagactttgcctacacatcattccaaacgacgtcgctttgaaccgaaatttcttttgtttttgtctattccttaattaattttttctttctaattaaaagtggtaatatctgtcatcttcttctttcgctatcagtggaaccgttggggaagactatttgttcacagtgagctaccactatgcctttaagccttttaggtcattgatcttgtttccgacttttagaaggaaggacaacattcgaagaacaaccacagtaagtttggtactactactcatcaattcaattctctgaggttgacgttttaatttcctttttcaccatttttgctaaaattgtctgcttttgatttatacccagatctgattaatctctgatcgttagatttatctttatatcacttcctcagctctgaatttgatagaaaggtttgatttttactttggtatcttgctcaattggaactttttttctttttctttctcaattggaactttaccagcttaatttttggatattggtttatctgctggatcttcatgattttggtttgctgtcttcaagatctctgcttttgttcacttcatttaatgccatctgttttatttctggcttccgttactttttttattttatgccttgattcatgctacttttttatgttattatattactgaaccattgtctttagctgatggattgtggtactgtatgttcctgttaaatacttttcagctgcaacttcttcatgttcgttggctatgttgctgtgttaaaagtgaacattcacaaatttagctactttctttgcttgtaaaagttcacagaattggcttgtttctttgctggtgaaattcactggatgagcttgtttactttgtttgtgagaatttacagacttggcttgttcttctgcaggtttctacgtttagcaactcattatttttaggcgccatcaagaatg

SEQ ID NO: 14854 - DNA, 3000 bp, Unknown
  misc_feature (1)..( 3000): cDNA_ID_3019397_gDNA_ID_2684229_Annot_ID_192162 3000 nt of promoter + ATG
atggtcaaggcgccaactggtttcaattttaatgtgtgctaattaattacaatctctacatattaaaaatttaatatacgaatggtgaaaatatgattagaaacacatgccaaaaaacataaaagtctaaaaacaaaatcattgatttgattttgcctctctgttctcttatctgtacaattgtggacacatttggtggctacctcgtggggttggcaataatgtggtgtttatcgtttattaattgatatttctataaaatatgtaaaaaacattaactcattagtagtttaattagatcttctctgcttgatttccgattcagattcaaaacaattagagaagtagcaaaaaatgtgtgtaagaatacacaaatatattgtctaacgaagataacatactataatgtctaatataaaataaaattacaaccaaaaatagaaaatggagcactaataagatcgcgtaagtcaataacgaatctagtgttacaactagtagtgcacaagatgtagtagtaactctttcataacaggataagtaacttactttgcgagggcagccaataatggggactagagtcggagaacaacaaataatgaacttcaagactctgcttttgttggctccaacgactcttccggacctccagcttcctcaacaagctggttaaaaacggcacagcaaataacggttaatagtgagaaagatgctatcttaagtcctgtagagttagtcagtgagtgagattagagggagtgaacataccaaagaaccgacttgctcataggctctcattgctttcggatcttcttcatattcgtatcccaattgtagaatccgtgggccgttgactgaccaaaatgcccttcgacctgcctcctgcaacatcaaaagtagttttgacataacagaggaccttttgtaagttttgggtttgattggtccttcacaagagttcacaagaagggaaagcgagacagagaaatgttttacctctaagatgatcaaatatatagcttcgagtgtctgaacgcgaatgtcaggatcagtaactggttctcgctcaatggacagtgcacttccaagctcaggtggcatttttgcgacatcttgctcactgtatgtctaaggaaagtaaaacccaataatcagaaactattttctcataaaagaagaaaacctttgtaagcaacaacgtagcagctataaagcaaaatcaacaaaccttgctgcctgcaactggtaggagcagagcgggccaaagaaactctgatatcaagagtatattctggagttggtttttggcttcaaaacaacagttacgaatagtcccagcaacctgaaagccgataagcataatccatgttaaattgttcaaagggtatagactaagcaacatgttcattaaagagtaatctgccaaactccttttaaacgtacccctttctttcgcaattgatttgttgaatcaaactgcctaatgatctgttttaatagtcgtctctttggctccagtaacaatttcctcccatcttctgtttttgatatgttgacaaggatcgaaccaacatgctcaaactgatcatctggtgcgcaaataagaacaatattcagtaattcattcctctttttatacagtagctatgaaacttgattgcaaactaaaaaaactaccagtaagtaactacgcataatattcaatggtgccaatgcaaacattaaaattctagactgtcctaccgaggattagatttagatatatgaaacaaaaacgtgatatatgaaaaggaaattccaaactatcatatctagaagtagatatatatatatataaacttggacaaattatattacaatactaaagtgggaagtacataccagcagtttcaccagaagacctgcaaaatgacctaacaagcttcatgatatgtagtccatgcatcttctcatcgtcaatctaacaaaggcataaagttttacacgattagctacgtcaccattagactaccaaaagataatccccactatatattacacaaatttaacttatgataaacgacctgaagcaaagaagaaaccccatcatccaactgagtaagattcactagaagcataacaagtaatctggtaatacaagactctggcttatacaacatgtccatggccactttaatcaaacccatttgaatcatcttctttgccaattcacacttctgagaaagattaacaagagcttgagctgctggctctgatacctcctgcaaaattgaattcaaaacaacatttcaatatctctcaatccaaattcaggaaacaattagtgcttcttaagagttgattcaatgaccttgctttcatttagaagctgagacaatgatggaagaagaatctcggaatactttgatagagattgtaaaccttcctcggaaccagttaaaccactaacaatttccaccgcagctttcttcacctacaagtttgtttcttcattcaatcagactcatcggtaacaaaaaccctagaatctaaaattatcaatgcatccccatagctcagaaacagatgaaaccaaaaagcttacaggcggtgaaggagatgacaaaaattcgacaagctcttccagctccgtcaccatatctccgaggaagaattttccgtcgagagagagagagtatcaacgtttctgcgcgtaaatgtcaccgccggcgaacacgaaaaatcctcagggtttttgttgtacaactaaactaaacactctaaattgttcagaaggtttaaaaaaaccccaaattcagtaatattgcaaaacaacccacagactaatcaaagttttcataatcaccttccaattaatagtaatacgttttgggttattttgtcaaaattttagttagtttgaggattgttttaaaattttacctaaaataaaaccagtttcatctttgagacaaaaatttgtccgtggaagaaatcttgacattttcggatttgacaaag

SEQ ID NO: 14855 - DNA, 3000 bp, Unknown
  misc_feature (1)..( 3000): cDNA_ID_3019395_gDNA_ID_2684229_Annot_ID_192163 3000 nt of promoter + ATG
taactccgagcttcagacttggactacacttccgaagatgaataaaccaaggaagatgtgttcaggtgttttcatggatgggaagttctatgtgattggaggaattggtggaaatgattcgaaagtgcttacttgtggtgaggagtttgatttagagacgaagaaatggactgagataccggaaatgtcgcctccaaggagccgggaaatgccggcagcagcagaggcgccgcctcttgttgcggttgtgaataacgaattgtatgctgctgatcatgctgatatggaagtgaggaagtatgataaggagagtaagaaatggtttactttagggagattgcccgaaagagctgactcggttaacggttggggattagcgtttagagcttgcggtgagaggttgattgtgattggtggtcctaggagttcaggtggagggtacattgaactgaattcatggataccatctagtgatcgaagtccgcctctatggacattgctcggtaggaaacattcatcgaattttgtttacaattgcgcggtgatgggttgctgataaaagggtttcaacaataactttcagatgatttttatgattctcctgccgttggagatgtcgaaagttgcagtcttttttttcttattaattttggttataaaagaaatttatttgaattcaattggatacaatcatcttggtggtattgttagtttcttggaaagaacagaaacaggtcttgtaataagtttggtggagaaagttcagaatctagagtttttcagttctgctatactatttgttaaaatttttgtttatattcgtttcattcattttttcgcaaagagactatattatgtgttttgtgtgttcttctttcaattctctgataagagaagaaaaagagcttttaatcttatagttgttgtttgcaagataacttgatcttttgcttgcaagtaataccataaacttttcaatttttctcctttctcttggttctctgttttgggatttttgcttccttcttcagaaattatggcaattaattctttgaaaagtaaaaaaaacaaagatagacttaatcaggaaaatggcagtttgcatctgattttgacgtgtaggtaggtctctgtcattttctctttgaactctcagccttgcatgacaatacctaagatgggcttgctatgctaatttcaaatcttttatgcatactaaatgatccaacaaggcaatcacccatctctatctaaaacttcaacgattttcaagcaaatcttcaattaaaatatttaaagctaaagccatgataaaacttgcaaatgaaagatatatggccaagaacgaaggaacaaaatcatttcagagcttaaacaaaagagtcacaaaaagattcagaatactgattgtgtccaactaaaaacttaaaacaacaccagagataacgataagtaaaaagattcaggctgattataattcttcttcaccggaatgagaaggatacttcagttctgatactcttcagtagtgggctggcaaaaaggcacttcccggctgacggttagccaaaggtccatggcatgagaggaactgaaaaaaaaacgaaaacattgttcaattcaacaacaaatgatatttccaatgataactatcactgctataggatcaaagagtgacaattctgatgtaaagccaataataccttagcgttgacaccatcagggacaacacgcttctcttgcctcaacttggtgaagtcagctctgttaaacttcgtgaagcccctgaaaaaaaagtcaaagacttgatgagttagcttacttgtatccataaaacaatcaaacaacaaaatgattcaaggatcaatctttgaacataccatttcctgctgacaataatcttttgacgaccagggaacttgaacttagcacgacgaagagcctcttgagcatggtgaccatgggcatccttgcaacgaacagacaaaagaacctgtccaatagcaacacgagcacaagtacccaaagctttaccaaaagcacctctcataccagtctgaagcctatcagctccagcacacgaaagcatcttgttaatcctgagaacatggaaaggatgaaccctaatcctcaaatgaaaagcatcttttccagcagacttcaccatgtacttgttgcaagcaatacgggcagcttcaagtgcttcacttgacacattctccttctcccatgacaccaaatggacacagaatggaaactcatcaacacccttcctcttcataccaacatcgtagatcctgatttttggatctggcacaccacgacagtagcgagactttgggtatggcttacccttgatctgacggtaacacctcgcaggtcctaaatcaatattcagattattcagatttcagctcagaccaaactcatatagctcaaaatcatcacagtatataaaaacctaatcaatcaattggtatctaaagagaaactatataaacctaatcatttatccgatgaatagaaaaactgaatcgcagaatctcaaaatcgcaacaaagagagaacatttggttaattaaatccatggaggaatcggaagaacacagaaatcctgacagagaagtcacaagagatcgagagaaacttacttcttcccatggcgtctctctttatccttcctcggccaaaaagcgcggctgctcgacgaaaaaactaatgacctagaaaatggcttcaatttatagatccgaaatttgctaggtcaacaatatagctctgggtttttaactaatgggctttaactattaaagcgcattacatattaaagagatttgttagggatagggttagggcccatcgattgtatatacgtttttttttttttatcttcctcctcaaggaaaaaatcaacattggattgaattgatacaaataagcatatctttcatgttatccatcactcagaacaaaatcctctcaatagacagagaaataatg

SEQ ID NO: 14856 - DNA, 3000 bp, Unknown
  misc_feature (1)..( 3000): cDNA_ID_3019302_gDNA_ID_2684229_Annot_ID_192164 3000 nt of promoter + ATG
ttgtatgtctgtcaaaatctgacctttttttttacttcaattatttggtcattgtgaaggcaagccaatcaagagagcttatgatggattgttgcttgatgctggaggaactcttttgcaattgtcgaaacctgttcatgaaacctacgcttccttgggccaaaaatatggtcactttcttacactctttgtctttgatctgttccaaaaccaatttcagatgttctcatgttggcatttgtttctagttcaggtctcaagacaactccagctgagatcaaggaaggtttcaagagagttttttctgccccttggcctgagaagttacgttaccaggtccctaaatgcatgtgtgaatctctctttgtaatagattctatctttgctcgttactgtaagcaaacgtattaaaagagaacattctttcattgttagggagatggaagaccattctggaagcttgttgtttcggaagctactggttgttctgataatgactacttcgaagacgtctaccaagtgagtatcgagtgaaagactctttctttgaggcttttgactagtctttcggttccattaacaatccatcacattgttttatctcttaagtattatgcgaatggcgaggcatggcatctcccagaaggagcttatgagacaatgtcactactgaaagatgctggaggttattattactctctccttgttaacttagataactttttgtattctttatggcggatttgtaaaattggtgttagatgattgcagttaagatggctgttgtgtctaatttcgataccaggctaagaaagctattgaaggatcttaatgtcatagatatgtaagctttgtcatgttttgttatataaaccagaagtctgagtaccaaagttaacaccatgaatggtaatcgtttataatgcttgcatctcttgcaggttcgatgctgtgattgtatccgcagaagtcggatacgagaagcctgatgaacgaatcttcaaatctgcgttaggtattggcatattgcattctaaactgaagtgttgtttcgtttaaattataagaaaggtttcagagttaacattttgtgtcaagcggagaacaaattaacgttaacattttgtgtcaagcgcagaacaaatcagcgtagatgtaaacagagcagtgcatgtcggagatgatgaaggagctgataaaggcggagcaaacgccatcggtattgcttgttggtgcgccaaatatacttttcatcttgttttttccgaggtttttaaattctcatccatcataacacatagtgctttttgtttatctgttttctttgaaaatttaggttgtggggagaagatgtgcagacattttcggacatacaaaagcggatcttggtttcagaactctaagcttcaaagattttgttctgcaatatttttcagaccctgtacacacttactcaatcaacactgtaatctgtctctttaaaaatttaattaataatgaaaaagctgcaaacttggacaacaagaatctaaaatttaaatcaaatagatggatccacgagaagcaaacaaaaagaagaaaatggtgaaagttacaatatagagattaaactctcgaaataacaaaaaacactatctccgcaacgataggtgcctatggaaactgaatcaacagatttggttttgatatcatatatcatcagctgtctactatttgatctaggacaacacaaaagcttattcttctccaaaatggctactggtaatgattgcgtaacactacgattcactatcgaatatatttgttcccaggtcttgttctctgaattgaacgaccatattatcatttgttggagaggtttactaaccgataagcacaaacggttattcaggctgcgtgtgataatgtttctatgatctgcttccgcaaaaggagctttagagataacttgaaaagtttcggtgtggagatctaacgctaaaactttaatttctttcttcccggttaaccaataaagcgatccatctacatacagagcatgcccccgagacgaggaagtattaatccgataaggagaagaaggattgatatacctccaagtgttggtgctaaaatcaaaaacttcacatgtagtagcgttttctaggccaagttcggaagagttatacataaccaaaccggtttgtatatgccactgattttgtctttgccaaatccaaatttaacgtgactaaaataacttggctgctcaagacagatttgttgcaacctggaaacagggaaacgtcgatgccatcgagtggcgggattataaacaatgttgtttaaggtttggtaatcaaagaggcaaacaagaccgtcacaactattgtggaaaagttggtaaatatgatatcgttctgatgatatcaacaacacgttagttttaagtggaggagaatcagcagtaacatgatggggcaacaccaacgtactgggtacttcagacaccaatacaagatttagatctttcccgccagctgagcagatcaactgtttcgcctggaaatattgagattcgattgtcaacttccattgtttgcaagcagacttgaatctgagcagagatttcaccggaactctctcaagaatatcctcaacggtgtcgtggggaagcaattgcattatttctctgtctattgagaggattttgttctgagtgatggataacatgaaagatatgcttatttgtatcaattcaatccaatgttgattttttccttgaggaggaagataaaaaaaaaaaaacgtatatacaatcgatgggccctaaccctatccctaacaaatctctttaatatgtaatgcgctttaatagttaaagcccattagttaaaaacccagagctatattgttgacctagcaaatttcggatctataaattgaagccattttctaggtcattagttttttcgtcgagcagccgcgctttttggccgaggaaggataaagagagacgcc

SEQ ID NO: 14857 - DNA, 3000 bp, Unknown
  misc_feature (1)..( 3000): cDNA_ID_3019372_gDNA_ID_2684229_Annot_ID_192170 3000 nt of promoter + ATG
tcgagagaaaataatcaacgagctaaaataagattgatcgatttcgaccctaacgagttttacttacaaggtctcttgaagaatgccttggtatatgtaagctgcccagatcccagcgacacagaacgacaataacagaactcgccggagaccggaaccgtgagattccatcgccgcacgtcgcttattgttttatccgacggagctccggcgaaaatttgaatttcaattttacgctatttgatcagttttgcgatcaaattatgagatcggtctgaagtggaaacgaaagttattagagagagtgtaggaggcgcgagaaagacgtagattttccacgtgtaactgtgtcattggcttaataatctgacatgacacttctgattggctataggacgtggatttatttctggaatccaagtcatatgcacattcatgtctgagataggaatgggaactatgtgccgttttattgtcatgaaaacgtcacgcagtttcctagaacttgtaaacggatgttctttttacagcttgggccttaatttgattaagcaaacttgcacacagctaatcatgtcagtttgactaactgatgaattcatacaaatctaagatcacttgtggtaagaaaatgaaagaaaaaggcgtatatacacaaatggaggaaagttgccaacatgatttaattgattaaaatttagtgatgacccattgttaagattactaaaacaaaatatgatatatcttaaagtaaatgtgacaataacgtcaacatagcgagaaaagtttgaaatatcgaatttccattatattaaaacaaggtatcacatgcatgcactcatgcatagttcattatgatttgagtaattttctatacgaataatattatactatatctcaatgaaaatagaagttatatatattgggaaacggaatttatatgacatacttaatcctcatgggagaaccaattatacattttgaagagtcaaaagtcaaaactcaaaagagtgactcttaccggatacaaaatgaaaatagaagtcttggtgagataacaaattaatgtgtaacataacaatataatatcataaaagattccaaatggggcttttgtccacacgtgatatgcaatatgcaaaagaaaaaagaactctctttcgatctgccggtcaataacaatgtgaatatagattaactgattaataagtagtttcttgggtcaatgcatgggatattatatttaagaaatacaccaaaaatgtattcgacgttagccaccacgttccattaaaaattcaaatctaaatgatgattaccgtcgtctacatctatgattacaaattttttgtctactatgcgtttagttatttaccatggtttgacgattatatatataacacacataaattatgacggtttaacgttgtctcttaactcaaaacttaattttacaaaaatattatttaagagttgaatctcatactttaattattcatttggtcaactagaatgcgaaaaatccacaatacttcgtaactaatttcgggtcctttaaatcttgatcacctgttgatcaacaaaagatctacacataaagattgattcatccattgactaaacttttatttatcgaagaaagactatatatatctaatgcatgcatgccatatgcacaataatctaatagtaaatccaatacgtctcagaaagataaaatcgtccataataccaaattttattctaaggttttgatatctctcataatttggaagtgtatgtaaaagtttcttaaacataaatataacatccaaagaaaagttgtaaacacttaacatcttgattgaaggggaatctcgctaataattgtgactgaacgatagtaagtattattgtaaaatatcgatcaaaatttcaacgatatgggcgatccagacccaccactttgttgtcccttagcagacgtcaaccatgaccataattagttaaaaaaaacaccaaacaaaaaccacaacttccttttaattctttttaaattctaaatttcagactaacaaaaagtattcataagctgtttcatgtatgaatttaatatcatgaatactaataacttgagccattaactttaaccaaaaaaaaaaacttgaacaatctaatataattccctgtaacatttaaaagatggagatgggaaaacaagaattctaaagaaacattgtaaaaatgaaacagagacaaatattttcaagcaagtcttgtttcatttcatttctgtttgaaaaatgacaagtttaaagtcatgtctcatatgtgtaatattattaactttaaaatataacaaaataaatatctttgattactttttgaaatgttttttatctcaagaatttggaaattttcgttgattgatacattataaaatctgaaaattagatgtgaaacacgactttttgtccaccaccaatcctcctagaaattatcagtttatcactcgattactgaatgaatgaatgagttatctctgaaaagttgtcgtaccatttattatcccacgcggatttactgccgtgagcatgacgttaccgtatctatctcaaattactaaaattgtcctttccgatggccgtctaaaggaactaactcgagggcattttgtcattttgagaaattgttatgagtttgagtacaaaacaaaaggacacgacgactttgtattatttgcttcaaatcctctgttcttcaccttccttgttccttcttctctccttcttttttatatagattttcctttcatgttgtaatacttttattctattagcgttcatattcagctaaacagacattgcgccgccgttaagtcgaaaggatagaaagaaattaaagaaagaagaagcttgttgtctttgcttcttgaggctctcttcttgtcttgatcatctgttacgttgttccacgaaaagaacagtagctttgtctctccatatagggttattatctgaa

SEQ ID NO: 14858 - DNA, 3000 bp, Unknown
  misc_feature (1)..( 3000): cDNA_ID_3019376_gDNA_ID_2684229_Annot_ID_192169 3000 nt of promoter + ATG
ttacttattcgaaaaacccattttgagaataagaagaaatatccaagaaactgtaacatagaacccaattaagcaataaagacttgagaggaaatagttaccagaattagcatgtgggctatggttgctattatccactttagctgatgaatctaaacaattacccatttcagataataaccctatatggagagacaaagctactgttcttttcgtggaacaacgtaacagatgatcaagacaagaagagagcctcaagaagcaaagacaacaagcttcttctttctttaatttctttctatcctttcgacttaacggcggcgcaatgtctgtttagctgaatatgaacgctaatagaataaaagtattacaacatgaaaggaaaatctatataaaaaagaaggagagaagaaggaacaaggaaggtgaagaacagaggatttgaagcaaataatacaaagtcgtcgtgtccttttgttttgtactcaaactcataacaatttctcaaaatgacaaaatgccctcgagttagttcctttagacggccatcggaaaggacaattttagtaatttgagatagatacggtaacgtcatgctcacggcagtaaatccgcgtgggataataaatggtacgacaacttttcagagataactcattcattcattcagtaatcgagtgataaactgataatttctaggaggattggtggtggacaaaaagtcgtgtttcacatctaattttcagattttataatgtatcaatcaacgaaaatttccaaattcttgagataaaaaacatttcaaaaagtaatcaaagatatttattttgttatattttaaagttaataatattacacatatgagacatgactttaaacttgtcatttttcaaacagaaatgaaatgaaacaagacttgcttgaaaatatttgtctctgtttcatttttacaatgtttctttagaattcttgttttcccatctccatcttttaaatgttacagggaattatattagattgttcaagtttttttttttggttaaagttaatggctcaagttattagtattcatgatattaaattcatacatgaaacagcttatgaatactttttgttagtctgaaatttagaatttaaaaagaattaaaaggaagttgtggtttttgtttggtgttttttttaactaattatggtcatggttgacgtctgctaagggacaacaaagtggtgggtctggatcgcccatatcgttgaaattttgatcgatattttacaataatacttactatcgttcagtcacaattattagcgagattccccttcaatcaagatgttaagtgtttacaacttttctttggatgttatatttatgtttaagaaacttttacatacacttccaaattatgagagatatcaaaaccttagaataaaatttggtattatggacgattttatctttctgagacgtattggatttactattagattattgtgcatatggcatgcatgcattagatatatatagtctttcttcgataaataaaagtttagtcaatggatgaatcaatctttatgtgtagatcttttgttgatcaacaggtgatcaagatttaaaggacccgaaattagttacgaagtattgtggatttttcgcattctagttgaccaaatgaataattaaagtatgagattcaactcttaaataatatttttgtaaaattaagttttgagttaagagacaacgttaaaccgtcataatttatgtgtgttatatatataatcgtcaaaccatggtaaataactaaacgcatagtagacaaaaaatttgtaatcatagatgtagacgacggtaatcatcatttagatttgaatttttaatggaacgtggtggctaacgtcgaatacatttttggtgtatttcttaaatataatatcccatgcattgacccaagaaactacttattaatcagttaatctatattcacattgttattgaccggcagatcgaaagagagttcttttttcttttgcatattgcatatcacgtgtggacaaaagccccatttggaatcttttatgatattatattgttatgttacacattaatttgttatctcaccaagacttctattttcattttgtatccggtaagagtcactcttttgagttttgacttttgactcttcaaaatgtataattggttctcccatgaggattaagtatgtcatataaattccgtttcccaatatatataacttctattttcattgagatatagtataatattattcgtatagaaaattactcaaatcataatgaactatgcatgagtgcatgcatgtgataccttgttttaatataatggaaattcgatatttcaaacttttctcgctatgttgacgttattgtcacatttactttaagatatatcatattttgttttagtaatcttaacaatgggtcatcactaaattttaatcaattaaatcatgttggcaactttcctccatttgtgtatatacgcctttttctttcattttcttaccacaagtgatcttagatttgtatgaattcatcagttagtcaaactgacatgattagctgtgtgcaagtttgcttaatcaaattaaggcccaagctgtaaaaagaacatccgtttacaagttctaggaaactgcgtgacgttttcatgacaataaaacggcacatagttcccattcctatctcagacatgaatgtgcatatgacttggattccagaaataaatccacgtcctatagccaatcagaagtgtcatgtcagattattaagccaatgacacagttacacgtggaaaatctacgtctttctcgcgcctcctacactctctctaataactttcgtttccacttcagaccgatctcataatttgatcgcaaaactgatcaaatagcgtaaaattgaaattcaaattttcgccggagctccgtcggataaaacaataagcgacgtgcggcgatg

SEQ ID NO: 14859 - DNA, 3000 bp, Unknown
  misc_feature (1)..( 3000): cDNA_ID_2731082_gDNA_ID_2684231_Annot_ID_137603 3000 nt of promoter + ATG
aagctttcacatcaaacctaacaacaaaacaagaatcacacaataacttagtctcagcttgtggggagacaaaaaaaatcacaattgaagattgagaaagtttcaagaacactaacatgttatcgtggcagagacaaggcaaaccatttaccaagactacaagacataatagtaagtagcagagtgtcctgtttaatggaaaatacgattcttttctgattccaatcttgtaatcagcaaccctgaaatcgtagattccaacaagtacaatcgattttaggctccacagtaccttacaccaatgagaaccaaagcaaactaagatacagattctttaattacgtcgtacgagaaaacatcctagtggacagacaggaccacattattgcttagaccttggccctaatgaaacctgttattcagtagctgtttcaaaattagatccaacatatcatcaagcttatcgacatagcccggtttagcctaatttggttacttgaaacttttttttttttttttttaacttgaaacttttatcttctaaacatttttcatttttttttaataaataaaatgaaggatttgtgcgtttgtgtgaaggaatctgaaaacataaaaccaaaagaatataattggaggagcaattcaatcaatcaatgggttttttaatagttaatttacttaaggggaggtaggttttatttgtctgcttacttcgagtaaggtcgagatccaccagaacgtgacaatgtgacttccactgcttcaggacaaatcaaatatgaacctacgtcacaaaattactattataacaatttatccttatttattctttcttacgactatcttgtcttttgctatcatttacatttgtaaaaaacatcgtgatattattatttactagtatataatatcaaacttttcacgtttaataaaaattattaatttgaaattattcatttttgaatttgattgatatagttgacgaaaaagagttgttagtgtaggaagtttgtccggatatgcaattttttttttgtaacgtgtatcatctcgttaagaactcatatgtattatatgaacaaaatcaatcatgtatattaaaaatggtttgccctaaagatattctatgtttttttcgtgaataggtgttaaggatattaaacaaaaatacccttatttattcttacgactatcttgtgtctatagcactctagcttctacgttggtatcatttatattttaaaaagattttgtgatattattatttactggtataaattttaaaatttctcacgtttaataaaactaaacatattaataatttaaaattattttacttttgatttttattgatatggttgacgaaaaagagtgattagtaatggaagtttgtctggatatgcatttttttttcttcgtaacgtgtatctcgttataagaactcatatgtattatatgagccaaatcaaatcgtgtgtattaaaattggttgccctaagaaaattcaatgtttctttcgtgaaagaaagtctattttttttatagatttgattctcttcttgggatttccacattaaaattattatcttagaggctcagtttgatacatacactatattttttatatattgttcaacgtatagtgactgaatggtagttgtttaaaaggattgtgtaaacgagttggatagccaaaactatgttaacttgatccttgtaaagtaaacaaagccatgcatcctctaattcaacaatttggtcccattaccccaagaaaatgttataaagaggttatctttatcaattacttgtaaacaggacattatctttataaagaaaatgatatacatgctgcatttttttggtttggtagttttacatgctgcattttgtacttgcaaccacttctatactaattgttttagataagatagtaccttcttgtttgatcacatcgtaaaaggatcggatatgttaaccgtctttttccaaacgttatatactcttcaacactcatcataatgtatggagatgtatcaagtatctcttacgaccattggtctttgcggcctaatttgcaacagaaagtcagaaatatccatactataactatgctatttgaaaattattcattttgactcatatataaagtagagttaattaggtgtatagccaaattatggatgaaaattagacaaatgatcatgacattcttttttcttaatttcccaaaagaattgtaatatcagaagggaaaaatacattccacacatagttagaacttagaagaggtccaatcaataggcggtaaaaattaatttgtaacggtaaacaaaaacgataaaggataatagtacaaactaattggcaattaatactgtttttggtcaaatatatatgtcacgacagtagatgaaaataccgtttttggttgaatcgttttattttttactttgtcttgaatcttgtctactcttcaataccgtttttcgttgaatcattcaaaaaaaaacagatctcctagtgatatgaatcaaagtttatcaataaaaatcttagtatacatttgcaaaccataacttcataattttgaataaacgataatgtaagacaggttggctcattagaaagcatatcaaattaattgtaaggacacaaatatctataattaatgcaggcttttatgaatcaatcatcatcattcacatcctcgtataattgtctaatttcgtacctcaaaaaaaaaacaacaacgtgaaaacctaaaattagatgagttacgaaaattaggcaaaaataaataaactaaatcatagtattacaaaacaaaatgaaaacgaaaaaatgaagaaaaagcaagctggtccccaacagacatgcgagttcgtctcctataaaactttgttaatctctccttcacacttatcacgccacctcaccacctctctcctctctcctctctctcccccctggagagattattcattccctccaatg

SEQ ID NO: 14860 - DNA, 3000 bp, Unknown
  misc_feature (1)..( 3000): cDNA_ID_2730520_gDNA_ID_2684231_Annot_ID_137606 3000 nt of promoter + ATG
ttaaaatcagatgagacttgtgtataaatactttgagatctgtgttctctttcgttcactccaaagagcatcctattaagttgctaaagagagagacgccaatggctgtaaagcaaaaggtctgtgttactggtgcaggagggtttattgcttcatggctcgtcaagtttcttctctctcgtggctacactgtccatggaaccgttcgagatccttgtaagggataagatagaaaacaaatcctctcttttttgtgaacttttgaatattctctgtttcttgagtttgaaaaagttgcatgcattgatcccattgttctcaggtgatgaaaagaatgaccatttgaggaaactggataatgcttcaaaaaatctgaaacttttcaaggcagatttgtttgatgatgaaggtcttttctcagccattgatggttgctctggcgttttccatatcgcttctcctgtgccttttgaaggagttcctctcacagaggcaagttcttacatagattcttcttttgtttgtttcttgaatcactaacaaagtctttaaaacattcaggaagaactgattaaaccagctctcactggcaccaagaatgttctagaagcatgcacagaaaccaaagtgcagaaagttgtggttgtatcatcaatcgctgcagttgtttacaatccaaaatggcctcaagatgttgctaaggacgaggattgttggtcagacactcaataccttcactcacttgaggtaatattgtatctttgaagctaccatgttggtcagttgtctctgtgttatacatatacaccaagacagtaatagaattgagtgtttaatgtgatgcaaaaaatctgaggatctcagggttattggcgttattactatcttgccaaaacattaacggaacgtgaagctttagagtggagtaagagaaactttgctgatgttgttacgctctgtccgtctgtcattataggccctaggcttcaatccacgcttaactctagtagtttgggacttctcaagttcataaaaggtgatgtaaacatataatgtgtgttctcttacctcctattgcatattttggttaagtgattgattcattcttgataatttgatgaattggtgtgtctcttcttaggtggtataaagtccttgttgagcgatgaactgtatcttgtggatgtgcgtgatgttgcggatgcgcttttgttggtgtatgaaaatcgagaagcaacaggaagatacatatgtaattctcattcactttacactgattctcttatggagaagctcaagaatatgtatcctaaacgcaacttccctgaaaggtaagaagagtaagaacaaacgcttgatttcaaactttgagatttcggtctgatctgatggaatgtttattggcagtttcacggaggtaaaagagaaggaagtgaggcctctaagtgcagagaagttgaaaaacttggggtggaagtttaggccattagaagaaaccattgatgattctgttgtgagctttgaagcagctggtgatcttccaaaggcataagcttacagagtcgtcacagtgactgtttcttcacttttatcactcctgaaataaagtggtttttgttagaatcatttcattctcaaatccattatctattactatcatattagtgttgttctttgtaacagtcagttatttgtcactttcaccaacatgaataatttgatggaacatgtcagattctcacggtttctttttcacaaaacaaaactggttttgaatccgaccactagactaaagtgtccatagtccgcggcaaaatgaaaaccaatttaaatgtcgttatacaagctttgtagtctagtagagatatacaaatttaattgtcgttgttagttttgtagtctagtagatatgattagtcattagttacggtttcttaataacattgacatttagaccacaatgtggacttgtggggttaaatgagtcacgagctcatgaacccctagccatttatttgggattttccgaggacgaggcttaatctacaccgtccgaattcgttaatgacggcaaattgcttccatgagtagatttttctttgtctcattagtcattatacaatttcaattctaaggataaaataatcaacaaagtttgatttcagttttttacattatttgtgtaacgttactacaacggatagatttgattcagacaaaacaaaaagatcgatgattacgacgttaattacagaattagaggtataaatatatgggtcccacgtcatttacaatggccagaaacaaaagtatctctttctctctctcttcatcttcaacaaatcacgcaccatcataatcatcatcatcttcatcgtcatcaccaacttcttcatcatcaccatcaatggaattccccaaaccaaaccacccttcaccctaaaaatcgtttcatcttttttccttcttctaattttttttaggtttttaattaacttttgcttcaagttttcttctatagatttcttactcagaaaagtttcgaattcgaccctgtagcttagttgttgtttataatttcttgtgatcattcacagtacaaaaaaactaattcacccaccgacttcttcttcttcttctcttctctgtggcccatccttaaacccacactgcttttgcttttcctttttttttccgggaaatttgatctctttacctttcgtcattattagtagggaatgatcttttagttttttttttgtttcccccaaatctcactttttctcacttcctctccatctcaaatttcacacaaccgagtaaaccctagaatctccgcttctcattcaattggtttcatcactggtcttaatcattgctagggtttactcggttacctttatcatcatcaattgatccttgttcataattcatcctcttttctttctgtctttggcataaagtttcaatttttcttcttcttctctttctcactcaatc

SEQ ID NO: 14861 - DNA, 3000 bp, Unknown
  misc_feature (1)..( 3000): cDNA_ID_2730524_gDNA_ID_2684231_Annot_ID_137607 3000 nt of promoter + ATG
tcacctaagtaaccaaagatgagctgacctaacgcggtgccaagaagagcgattgcgtaagaagttgagagaagagcggttccgattgagtctttgtggtaatatatttgacttatcattttcatgatcggagctatacagaaaagatcgtatgcgtcggtgaaaagtcccattccggcgactattatcgctttgaaatggtaccactgtatcctcgctgcgtctaacgccgataataaacttaactccggcatcgtttcgtcgattttttaagaattttttcaagatacggagaatgagaacaatagaagtctttgtatttttcatttgaatgtgtttttggagattttttcttattggagacaaatatggaatatgctttggtttgactgtgaggaacacaacacctccctggatcgagtccacttctttagttgactttgacaactttatttataaaatttggattataagttttaaatttccctctttggtacaaagagttttagttgtaagatgtgattgccaaaatcttggttaaaacagttccgtttcacatcaaggtgctttttttcagagtctaagaacatcttaaggaaccggatcattggacatggttctacacaaaagaaactagaacattcttgagtctctaacctctgctaaatccgaccaaagacttacaggtcggccactgcaactaaatgctgattaagcatggaggatatcgtggttgaatgaaaaccggaactatgaagttgggatgcgcactccgagcttgactacgacgacttcaaagatcccatcagatctaaaattaggagaaaacaagcgaggatccacttgtcccggaagattaaacgtgattgagaatggaccaggcggacagagctgttgcacttgcattctgtataagcatcccgtgtcacttggaatcgcaatctcaggtataactccttggatgcaaactctcccctccctctgaatttcacatttgatcttatctattaacagaacagaagatagcattttgggtcaaagttgctttcatacacggatagcgtaaaagaaagcagctttcttttcacgtcattggtcattatctaacccaaaacatgaggaatccattccggtattaacaggttgttattttcattatccaacaacaggacataaggagaaaagaaatgtgaaggcttaccttgatttttctcaatgccaggaagagagactcggaagatgtaagcaacttcgctgacgccaatatcaacaagaccaatgggtggcccaacagagcctagcttagcagtaccagtgcagaatacatgtgagatcactttcgagtgagtagtagtagtctgattattctcagcgttcatctttgtgtttctgtttttttcacaagagatagaatccaaacctacctgttaataatatcacaattaagaaagcaaaagaagaagacaacaatcaaatcacaagcacaagtcaagtttgaagatgtaaaagcaaagagacctataagatttttctatacaaacagagcaaaggttaaaactttatgagtaaaaggatctaatctctctgaaggaagattccaagaacatcaaattgaaagtacaagggaagaaacaaactaagctagatcatgaccaaattcttaattttgatgaacaaaagttctgaaactcgaatcgtttgagctagatttctcaaatgatttgagaaactaaatgtggaagatgagtttcatagtacgaatcagtcgaaatcatttgaaatctaagctcaatcaggtttatgaaattagttcttctttgcattcaaaaccctagaataagtggcgatgaagcgataattttcgtcttcctagggttaaagaaacagattcgtaggaaaatggagttaaaggagacagaggagacccaaaacagaaaaaaaaaaactaatttcgattccacaatgccgaaacccagaaaaattctcaaaacgaagtcactcaagaagataatcaacaaagcgaaaacggagaagggtttgggtttaaggtaccgtaacgaactccggtaagttccgatgatggtgttgacagcgaagcttcgtggaacagcgtgaccgtcgttactcactggatttgccggtgaatttgatgagtcaaaaatataactagcagctggtcaaagtaaccactctgaataagacacgtgtcagaaactttgttgaccattctgactaaagaaaccttgtaaccaaaaacatccacatttttacatgctctgtcatatttcaactgtatactaaagttgaaatatgactatggtaacttatgtttttttagttgaaaactaaggtaaactattctatgccagcaggtaaaagatgtggatgaccaactactgctggcataatttattctatgactaaggtaaaactaaaagttaatatcactcgaaatatttacaaaagtattagataaagtactaaaaattttaagttagaaatgatgaaattaaaagatatatgtggcttatttaggaaaatagatacttttaatatgatggttgggtagttttattattgtttgggattgaaaaaaactatgaaagtgtctccaagtacagtaatatttaacaactaactaggaaggtgtacattgttcagtattcatcattctaattaatacaaataattttaaaaatttggggtcgtcaattgctcaaagatattcattattttataattttctacattttatcaaaaacagaattgtgtaaatgttgtgtcattatgtgtcgacttggatgtatgcattacataattttattttatatatgtttttaattgttagagcatttattcgaaaattataaatattgaattttaatcctcagtcacttaataaaaacattattttaggactaaaaaataataaaagttgaaacagcaaagtagcgatagatttcgtgaaaacagagaagcggacatatcttgaaacacatg

SEQ ID NO: 14862 - DNA, 3000 bp, Unknown
  misc_feature (1)..( 3000): cDNA_ID_3019525_gDNA_ID_2684231_Annot_ID_192270 3000 nt of promoter + ATG
taatcaccccaaaatcaaagagtttgtattaataaaccgctctcattcttgttgttgtttgaaacagatcttgagcctgatcagactccactaagctggtatactcggatgaaaatcgcggttggtgcagctcgtgggatagagtatctccactgtaaaataagcccgtctgtgatttaccgtgatttgaaatccgcaaacattttgttagataaagaatttagcgtcaagctctctgattttggactcgctaaggttggtcctgtggggaaccggacacatgtgtcgactcgagtcatgggtacttacggatactgtgctccagaatacgcaatgagcggaagattgactataaaatcggatatctatagctttggtgtagtgttgcttgagcttatttctggcaggaaggccattgatttgagtaaaccaaacggagagcagtaccttgttgcttgggtaagtaagattaacaattgtaaccagattaaaccggaacttaatctctcgtttaatttaaccgtgttttttttttcattttcgcgttaatgcaggctagaccgtatctcaaagatcctaagaaatttggacttctagttgacccgttgctacggggaaagttctcgaagaggtgtcttaactacgcgatttctataaccgagatgtgcctaaacgacgaagcgaatcaccggccaaaaataggagatgtggtggtggcatttgagtacatagcctctcagagcaaatcttatgaagatcgaagaacggctcgcaagtctacggactctaaccggttaagacgggaaacaaaacagagttattaattaaattgtatgagtcctaagtgaaacctctgctagaatcagaaggttcctgataaggccgcataattaatgtttgtactttttttccgggtgtttttgtttagtcagatttaagaatgggatttggtcggataaagaggtttttttttttggcttgaggtaaatggtgctttgtaaaaaaacttaaaaataaaaatgaactcttacgtttaaatatatattataggtatatactatatacgatgttattggtgggtcattaatacaaatacatatgcgtacactgtacacaagtgatagttttgataaataatatttcaagtgagctagttagattttaatacaaataatttcaaaatatatcttcaaattttaaacgtcgatttcagagtagatcaagattgtgacatcgtcaagggctaatcttttgattctttcttgcaaagaagaggacatgaaatcataaatgcaagtaggtgactaactgatttacgcggacgtcgaattatcgattatactatatatttatgtcaacttgcattataccacttaatccgatttacacatactatttcccatgtctacattacatagatatataatattcgcatattgcaggtttatgattgaagaagaataaaataacatctccccacgttttacatcggtctacgttatacatcggtctagtattactactataatatgcaatgtttcaaactttacgtggaccgttagtaaatgtgtttgtgaaagaaagaaagtcacacacatgtgtaatcgactgtttttttgtcttttgctacaaatgttaatattcattggaatgaaagttgaggtgctacaaaacagttagacctatgtatatttgttttttggcaaaaaaaacaaacaataaaacaatggagttgggacaaataaagttgttttcatcggagagccaaaaagccattaaagttgtaatcgactgttaaacgaaatgttttgttttaaccaaatatcaacatatcttatcttgctcagtgaattcacatatatagttgttagcaaaacaaaagatcataagataccacatacttttgaattttcttagatttatcatatatttttaaaattttctaataaagtttccatatgctgtcacgtttatatactcggacccgccattgctaaacactgttcttcttgtttgacctcttcccactgatatttttttagtttcttctaataaatgataccgtatatcatgataataaagattttcatatatttccgatactatttactgttttgtttttccacacaagataagaaagaaatttgttcactattatcttgcatcactcgatatctacatttttgtgagttctcttgttacgtcattgaggtgacgtatatgatcgttataatagtctatattgatcatgaacgaatgtgaatggtaatttggtatacgaggaaaaagaagtatggtacgaccgtacgagcacaagttgtaactttttttttgtttaaaaagaaacaatacagtagttacctacgaacataactttaatgttatgatactttttatttgtaaaaacagttaaaggaacttaaaaactatggttcatcgtatatattttcgatctgccacccaatgagtgagcacggcctttgactctggactaaaattatattgaatattcatatacttgatatccaagtaaatatgaaattatatacatgtcaagaaaattgtttatcgtttttggattatttatgttatcatctagtagttttattgaaatagtaaaactcgagatacacaaatgagaaaatgtaaataagtagtctgaatcaaggactaattgacgttgaaatttttggaaataaatgtatatttcaacatcaaccaatcaataatcacgacgatatcaaatacacatatccttttataaaattaataatgaatatttccccaaataaagagttttgcttggtctttcctctcttcttctcagcttcttcctcctcaatctttcaattaaaatccccagaaaagaaagaaaaaagggacagttggagaaaaagattctctcaatcttatgatcgttaagggtgaaacaaagattactaaaaacagaggaaaaacagagtaaagattactcaagagtcaagagctggtttgatctta

SEQ ID NO: 14863 - DNA, 3000 bp, Unknown
  misc_feature (1)..( 3000): cDNA_ID_2731064_gDNA_ID_2684231_Annot_ID_192269 3000 nt of promoter + ATG
gttttctttatttgtttaagcttgtttgatgttaaagtatgttgttttgccttttatcttatctgtgaatgttttgtttacagcttcctgattattatgagattatcaagaatccgatggatttcaccacattgcggaagaaattagaatccggggcatacaccaccttagaacaatttgaggcaagtcttgtaattgaatccctctatacatttctgcgctttgctttagctaaaatggagtgttcacctttcatagttttggttcttcatattgttaagtcttgttcaagagtttctctggtagtaacaacatcgtgtttgcctacaagcgtgtaaggttttcttagttttcctagccacaatgtgttaattctaccatgagaaggtgcagatatactgttaaaagtgaaagccttgtggggtctgaattgtttcgttttgttgcagcaagacgtatttttaatatgtacgaatgcgatggagtacaattcagcagatacagtatactaccgacaggtttgtcttggcttatataaacttgctattttacttccttttgttataatccattctctgatagtatatctatggcatgacaggcaagagctatgcttgagttggcgaaaaaggactttggaaatttgagacaagaaagtgatggagaagaaccagtgtcactgtcacaacagccgaaagtagtcaaaagaggccgtcctccaggctcaggccttaagaaacagcttgagcaatctttgattgatcgcacgacttctgatatttctgctgatgcagcagcattcacttatgctggagatagctctagattatccggttcttacaatctaagaaaaaatcctccttcatatggattccgtcatgcagaaacttcggttagaatcaaccataatagcgagaaccaaagtggcttgttgatagattgggagaaggagtttccacgtaaagatctacttttctaatactaccttcttcagaccattataccaaatacgtttttgttgacataaaccattttgtgtagcttctgttgtgaaggctgtcaataaatacgggatgaaaaatgtcgacgagaacaggcgagatacctacaaccagaactctgcttccttgcaagattcttcgatttttacactgcttgatgataatttaaaacaattaactccagtacgtgcttagcaacttaaaagttaaaatatttctccttttgttctaagcaacaaagaatctgaccattgtttcgttattttaccaggttggactgaaagctgaatatgggtatgctaggagtctagcacggtatgcagcaaatattggtcctgttgcttggacatttgccaatgtaaggattgaaaaactgttaccaactggaaccgaatttggtcccgggtgggttggagagaaccctgagaatcctcctcaacagcaaaacttaatgtcgggaaagcaaaagtgttcgaatgactatgcatctgatgatcatcatcagtcaagtagaatcatgtctccatcaacctctgtctcaagctccatcataggaaacatacattcttcccatgaaagcaaagagtctgttcaggtattgaatcaagaaaccgagataaatggtctagtccgtggttccagcggatttaaccataaaccaaaccagatgctggaaacagctggctcgcagcaaggcaacataaaacaggaatttcagcggttgccaccagatctcaatgctaggctttcctcaccaaactcaccaggctctaaccaccaggcaggttcatcgcagcatccggatttggcgttacaactctaagtaattcctactaatattgaaagccttaccgatatatgagggagaagaagaggcaaaggcatgtgattcttgctacaaggttgaatatatagggaaagtcttatgtacagattgttgcaattttctgatttttttagggtaaaaagaaaaagaaaactgatcgataagagtactctcacaagatgtatgactgtaaaaaaatttgtacaatttcctagtccatcaaactagagtgtaatgaatgtactcgggattgtatatcatgtacgtttttgtttggtcttgtgaatctgtgcataatatataatactaatatttataaatatcgaaacttaacaggataagtagaaaaaatgattacaaagaaaagtagaaaaatattttgaaaactccgtttgaaaagattatgatagctccctgtgattaatcaaaagtcaaaacacagttattaggatatgtttgggggattatgagaaaccgtgtctcttaaatagtcagtcttacattttgataatgttatatacgttacagtatataataagtagacagcttaaattagttccaacggaaaaaaaaagaaacaaacgttgaagaaacagaaggaaggaaggaagaaagaaagaaaacgacgcgcagttccaaaattaggatcatattggctcctttaatttctcttccgttgccatttcaaatattttcacagttgcttcctttcaccactctttttaatatttctctcaacatttttccattagcatataagagagtaaaaaagcctgtttcttcttcctcttttagtatatatataaacaaaccattcttcaccattcaaaatgccatttgtataattttagtttttctccacttttcagattcttccttaaggaatcattttcccatttttctggaattttaagagagaaagagaaaagctctctttcccatttataatcccaaagacacaaatcctaggttttttcttctttcttttattacaagaaaccttggttttttgtttttgtttgttctgtttcgtgtgtagggttccgggagctgcgtttgatgataatgttggacatcatctcaaaccagctccgtctctgaatccattttcttcaaccattgttgttgtctttacgttaaataatatcatctttcacgagtttattaaggaaa

SEQ ID NO: 14864 - DNA, 3000 bp, Unknown
  misc_feature (1)..( 3000): cDNA_ID_2731072_gDNA_ID_2684231_Annot_ID_192266 3000 nt of promoter + ATG
tagacttttacgtataattaattgaaattaagtttagatgctaaaacgagttctattacctgacatcatttacatacaaagatgatgtctttctttctttctttttgtgaaaacacaaagatgatgtctaaaagactaaaaagtagaatgagatgcatgaatgaatagaagataattgcaattactttcaaaaatatctttacaagttggggaattaaatttaaaagtatgtaacaaagatttgggataaaacttgtcacatctagtgcagtttaattaacaaaatttcttttgggataataaaaccaaaagcgacctcatcacttaagagctttcacatatcgccgcctctaataaaaacattattgtagatattataattaatcatacatagagatcacgtggaattttgtaaaagtcactaacaaatctaacgataaaattggtgacttgtctcagtctctttttcagtttttcttttaccatttgaaaacgatctttgatcttttcattttccctctttttgagtgatgatgatcagtaagcaaatcttgagcataccccatcttcggattctgaagatcaacactctttttaactcagattttggtactgatgttgatgttccgagcagcaccatctcaatttcaactaaaccaaaccgctctgagttagtttgtttttcgatggtccgggtttggaattggttagtgaaatcatgacgaatttcggcttgatggtttagcatgtttttaccggttaagttatgtacggttcatgatcaatggatctctgagggatctaggagtgtttaagtctacttataaagtcaaactacatattgctacgaaccctattatccgacataggaacaacgacatttcctttaagagatgatgatttggaagatctctgaatttgattaattggtagaattaaaatgtgttcatcagcagtggtatcaatacatttctcagatgatgattgaaaaaaatgcagttacaggtcataccgcaagttccattttcccttcatgttcgcgttgagagtccaattgttttctctaatctgcatataagggacctgaaaggaagaggcaaacattgttctgaagaattaaaaaaaaatggaaagcatttttcgagttttacaaatgatataaagcctgaaaacgatgacaatcgatttcaagagtgttggcttaggcaatcatataagagtcctctaagcaaatagatggattatcaatgatactatgaaatgaaaagaactttggtttcaacaaacactctgctttgtgaacttagagattaaaagagcaaattttggaagagtcaacacacttccaggtacgagagagataccttatcaaacatttcgtagccaactttgatccgtacatcctgatcttccttgaaatccattatgttccaggcaaattctgctgctcctttggggttcttctgttagcacaaaatgatgacagttccgttagggataatacacaaggaagaaacataacttcaaagaaagttcccgagaccaagaaaaaaacatcgaacctgatttaagtcctgatcaatatcacaccgccctttaatattaaaggttacacgcttatcagctcttacaggaaactctttttttccgcgtacaagacaccgaagcttttggcgcttatcataatgcaatcctaccccaaggcctgttgaagcctaagggaaatttgtaacactatattagtattagtctacagcagaaaatgtttcacggtgacaaaatagaagaaacagcagaaaatgaaatcaaacctcaggaaaaaagtgtctaatcatcgcacagaagtaactcggagccccagttccagtatctaactctccatgaagctagcaccaaacaaaaaaccatcaaggaaattaagaaatcagaaacatgtttgcaagaaacgaaacataatccggctatactgtagccaaagccaaacaactataccacaacaaccaagctgggaacatacactgacaaataataaatcaagattcccggaagcatatggatgtttctttgctaataaccattataaagaagttcaagacacaatttttttcttatgcctaacacaagaagtctagaacctagataacattctcaaaacccaaaaccctaacagcaaaaatgatgatacagaatcctacgagaattccaagcagagagcaagtgtgtaagacacaaactactcctcaatttggctcctgcaacagctcaatgctagaaatttgaacaaaacctaggtcacaatttctctcagattaggtttcataactccaagagctcctttaaagtaatcttatcttcttaatcaaaagttcaagacaacacagttcacttatgtaaaatgcacacaacattctccgaaacacccaaaataaaaccctacatatcctcaaaagcttaaactttgcaaatcccaagagacttttgggcattaaactccagagtaaagaaacttcccaagaaattgaatagagttaaagtcctccatagcaacaagaatacgaagcagacaacaaaaaacaaaattttcacctgtaaatgggtttttgagttcaccggaaccttctctttggcatgaatcttcatagacttggaattgctggtatacctcatagaagtctccattttcctcaaacgattttctcgagaaaatcgcctagaaaatcctcactgagtcaacaaaaccaaaacctcacctagtttttgcacacttcgactactgtatcatcctctgcaccaaggttcaccataatccaaccaataactcaccgccagctgtcctattagtaaaagagccaatctagtcccttaagcccatgtttagggcccaatatatatgggcttcgactagatccgacccggggaaatagccaatattttgttaaggtctctggttctctgagtgagtaagctagttcgaagactggtccgaaaaatctgacaagg

SEQ ID NO: 14865 - DNA, 3000 bp, Unknown
  misc_feature (1)..( 3000): cDNA_ID_2730534_gDNA_ID_2684231_Annot_ID_192263 3000 nt of promoter + ATG
catttattgtttctccaccttctccttcttcttcctcttcttctttccttttttttttttattgcaatttttcttataagttagtgatggagggtgacttaattagagtttgtatctagtcgaattccaaaaaaaaaaaacagtaaaaattggtgggtcaatccacttgtgttctgaaattttttaaactaaaatatctatttcgatgtgtaatatatatttttgcagtttaactttaacatttataattgatattactcattgtttttggtattttctctacaggtaaactttatttttgttgtcatttttctaaaataaaatattgtaaaagctttttaaaatggactttgatacagacattttaaatacaaacagacaaagacgagcaagagaataggggaccctctttgtcatttgattgacatatacaggtatatactataaaagaaatgtgacaaacagtcatctatattcattttagtgatttttgtttcacctaatctcttaaagtttaagtgtcacattatactgtatattactagccctgtaattctgaaacaaattggactattattttatacactagttctgtttacacagaccagtaccgtttctgctccttaactggattaactttaatttttactatatcaataaataactgaaatagtgcatgttactgaaatgacgtacgagtacaaaagatttccaaattattataccagatacacatattctgccaagtttaatgatattattatcgcagacagattagttttaaaggatgaaaaaaaatatactttgacaggggccaataatattgttttgtgacgcaggtgaacagcactataatatatatagcagaccgatggtatcacttgggcaataattaaactgaaatagaaaaaaataacaattttgaaaaggataaaaaaagagagtcacagaaatattatcagagctataaagattatagatcccctgacgaaaaataatttagattgtaaatagtacagaaactatatataataagcatttaataatggataggcttaggtaagcctatgcaagtacagcaggttttgaattattggatgaaacatttgtttcaaatattagattttaatttttataaatctatttgtgtaatacttatatatatatatatatttaaaaatgaatattatagggttgtgtaggggttagggtaaaagaatgacttgggagatttaacataagatcgtgtgggcagttaatatttagtgagatagatagatagtgtagtacgtttgcatttattatctttttacctgattcttttgtatcattctacacacacgtgccaccgccgacacctgctatctttctactgtttcattttaatttttatcttacatttttgtcaaacatttaatatcgacaatatgaattaaaagtttttgtttccaattatttttctcacaataattttttaaatagttgtgttgagacacttgacgaaactcatgctttatgtattgttggtttactataaaccgaacatgtttgcttcgttttttttttttttgaaaaaatgatagtaaaaatatgtgtcaaaaccgaaacacaaacaaccttatattccattttttattatgaggaagagtatagaatcaaccgaaccaacaaaagaaacaaagtgtaatacacagaattgagttaaccgttggagaaagtggttaaaggaaaaataaggaaacgatcgaaaggaattggtatatatctgaggggagaatgtgtataaaataaaagaaaaaaaggtctgactcatgaatgtataatgatatgcttacacccgcacgcataaacctctgccatctttttactgcacactcttttccttttctcttctttaaagtcaattttatttgctgataaccacaaaatgtagcaattttagattacattatttgtttcacatttcttgaaatctgaaaacttttaactgcgactgcaattgttttggttgagaaatcgatcgacttggagtatgagattaccttcttatcagtgtctttagtataacggttgcattgcatatatatttcctctcaaactttaatgatatcagttcaactagtctggatcaaatgtaatattgatactttccttgaaaacacattatttggtgcgtgggaagaatgatcttaaagagatgataaagggcactagagttttggttttctttgtaaaatagtgtatttatgcaaaactcaacattatatggatgtttgcattatggtatttttcaactaatatacacccaaaacagtatccttattaaacagctctctctctcgttttgttcaaactaacaagagaaaaatgtcagcttttgttgaaaaatagataaaaattatgacataaaacccaaaaccaaaacgtcaacaccatttatcataaattacatttgtagttagctaaagtacaaaaacaacactgtaaatgatccattgaccaatcgagtagtcattaacgaaagatcacaacttaacatcacccagtctaatcaaaactccaagaccataagaattttgctaaagcagcagtatagtgataaacacacaaaacgggaaaagttgttttacaatttagaatgtcatatactttaattattatttgcatagggaaaaatagaaagagactcactccccaggtgagggcaaatagaagcccctgctccctgaatttcacagcctttatcatcaatgctcctctaacctcaaacactcaaaatccacacatctatacacatacctctacatacacactccattttctctctctatctctattatatcttcgatttatgtgccattttggtatataaatatataatcttgcacacaataaggttatacttcccatcaccttttgtatcattgctatctttgttcttccttctggtgtctcttcagtgtaacaaaaagtctctttttcagttatattaagtaaaag

SEQ ID NO: 14866 - DNA, 3000 bp, Unknown
  misc_feature (1)..( 3000): cDNA_ID_2730530_gDNA_ID_2684231_Annot_ID_192261 3000 nt of promoter + ATG
atttcactgggacattgatagactttacgaaattcgatgttgttcctcgttggagctgtcaagaacagagattgccgcagaaattgatgaacatcttctggaatctggaaagaattagctccaagaatatgaattttgtaaactacgatgaatcagtgaagactgtgagagtgagagagattgagaggacctgtaatggtaacgcggggattcgaaaagctctgaggagaagataaccatggagaaatcgctgccatgtgtttcaagatatgtccgcttctctgttttcacgaaatctatcgctactttgctgtttcaacttttattattttttagtcctaaaataatgtttttattaagtgactgaggattaaaattcaatatttataattttcgaataaatgctctaacaattaaaaacatatataaaataaaattatgtaatgcatacatccaagtcgacacataatgacacaacatttacacaattctgtttttgataaaatgtagaaaattataaaataatgaatatctttgagcaattgacgaccccaaatttttaaaattatttgtattaattagaatgatgaatactgaacaatgtacaccttcctagttagttgttaaatattactgtacttggagacactttcatagtttttttcaatcccaaacaataataaaactacccaaccatcatattaaaagtatctattttcctaaataagccacatatatcttttaatttcatcatttctaacttaaaatttttagtactttatctaatacttttgtaaatatttcgagtgatattaacttttagttttaccttagtcatagaataaattatgccagcagtagttggtcatccacatcttttacctgctggcatagaatagtttaccttagttttcaactaaaaaaacataagttaccatagtcatatttcaactttagtatacagttgaaatatgacagagcatgtaaaaatgtggatgtttttggttacaaggtttctttagtcagaatggtcaacaaagtttctgacacgtgtcttattcagagtggttactttgaccagctgctagttatatttttgactcatcaaattcaccggcaaatccagtgagtaacgacggtcacgctgttccacgaagcttcgctgtcaacaccatcatcggaacttaccggagttcgttacggtaccttaaacccaaacccttctccgttttcgctttgttgattatcttcttgagtgacttcgttttgagaatttttctgggtttcggcattgtggaatcgaaattagtttttttttttctgttttgggtctcctctgtctcctttaactccattttcctacgaatctgtttctttaaccctaggaagacgaaaattatcgcttcatcgccacttattctagggttttgaatgcaaagaagaactaatttcataaacctgattgagcttagatttcaaatgatttcgactgattcgtactatgaaactcatcttccacatttagtttctcaaatcatttgagaaatctagctcaaacgattcgagtttcagaacttttgttcatcaaaattaagaatttggtcatgatctagcttagtttgtttcttcccttgtactttcaatttgatgttcttggaatcttccttcagagagattagatccttttactcataaagttttaacctttgctctgtttgtatagaaaaatcttataggtctctttgcttttacatcttcaaacttgacttgtgcttgtgatttgattgttgtcttcttcttttgctttcttaattgtgatattattaacaggtaggtttggattctatctcttgtgaaaaaaacagaaacacaaagatgaacgctgagaataatcagactactactactcactcgaaagtgatctcacatgtattctgcactggtactgctaagctaggctctgttgggccacccattggtcttgttgatattggcgtcagcgaagttgcttacatcttccgagtctctcttcctggcattgagaaaaatcaaggtaagccttcacatttcttttctccttatgtcctgttgttggataatgaaaataacaacctgttaataccggaatggattcctcatgttttgggttagataatgaccaatgacgtgaaaagaaagctgctttcttttacgctatccgtgtatgaaagcaactttgacccaaaatgctatcttctgttctgttaatagataagatcaaatgtgaaattcagagggaggggagagtttgcatccaaggagttatacctgagattgcgattccaagtgacacgggatgcttatacagaatgcaagtgcaacagctctgtccgcctggtccattctcaatcacgtttaatcttccgggacaagtggatcctcgcttgttttctcctaattttagatctgatgggatctttgaagtcgtcgtagtcaagctcggagtgcgcatcccaacttcatagttccggttttcattcaaccacgatatcctccatgcttaatcagcatttagttgcagtggccgacctgtaagtctttggtcggatttagcagaggttagagactcaagaatgttctagtttcttttgtgtagaaccatgtccaatgatccggttccttaagatgttcttagactctgaaaaaaagcaccttgatgtgaaacggaactgttttaaccaagattttggcaatcacatcttacaactaaaactctttgtaccaaagagggaaatttaaaacttataatccaaattttataaataaagttgtcaaagtcaactaaagaagtggactcgatccagggaggtgttgtgttcctcacagtcaaaccaaagcatattccatatttgtctccaataagaaaaaatctccaaaaacacattcaaatgaaaaatacaaagacttctattgttctcattctccgtatcttgaaaaaattcttaaaaaatcgacgaaacg

SEQ ID NO: 14867 - DNA, 3000 bp, Unknown
  misc_feature (1)..( 3000): cDNA_ID_2730528_gDNA_ID_2684231_Annot_ID_192260 3000 nt of promoter + ATG
atcttagagctttgttcagcagattcttcatctgtaaactgtaatacccaaaagagagtcgttgtgttagacataagatactaataagataggttattgtggcaatagactagagttacctgtcctgtgacagtgtataaacggttgtaccatccgtttgttgccattccaattgcagagtacaaatgcttgcgagcttctccagggttttgtaaggtgtactcgatgtaatagaatcctgatcatagattgtgtcaacgaaacaatgccaagatactgcagagattctcattgagttgagatttttgtatttacccttagaagctctgctatcgattagctttgcagtcactcctactggtttttgccagcttctatccaatccactgacctatacataaatgtcatgttgacatttgtaaggaaatctttttgcagagagtttgtttgtttgtttcaattgcatgtagagagactaaccaatgtttcggcgaaagcttcgacctttccgaatgattccatcctggtgaagtctggacctagtccagtgatcgctatactcactgagacgatccatatacatcacctatcggttagctcatgacttctgtctgatccagagagtaaacaaaaagaaacaaattttgataaattttaccattggaagttgaagtttcttgtgggtaaaaagctgtgattgacttgaatccattaggttctgcttgcccgacttgccaatctttatgtgaatgcagatcaaattcattcatcactcataatgatttcgccactatcataagtatctgaaaacagagtttgattagattaccttgtgggattgatatctcgaatttgttcgtttcatctgtgtacacacggaaagcttctgatgcatctgagattcaaaagaagttgttattagaaattctcaaggaatcaatatcatcaaaaacacatagaatcaacaatacttgtctctgcaaatgcaggtgaaatggccaatggaaggaagaaaacagaggaagctatctgtaacatgacgtctcttctcttcatcccaacatgatctctagacctgtttactttaacagattcagaacaaacccagataaagaaaggtagtgaatttcactgggacattgatagactttacgaaattcgatgttgttcctcgttggagctgtcaagaacagagattgccgcagaaattgatgaacatcttctggaatctggaaagaattagctccaagaatatgaattttgtaaactacgatgaatcagtgaagactgtgagagtgagagagattgagaggacctgtaatggtaacgcggggattcgaaaagctctgaggagaagataaccatggagaaatcgctgccatgtgtttcaagatatgtccgcttctctgttttcacgaaatctatcgctactttgctgtttcaacttttattattttttagtcctaaaataatgtttttattaagtgactgaggattaaaattcaatatttataattttcgaataaatgctctaacaattaaaaacatatataaaataaaattatgtaatgcatacatccaagtcgacacataatgacacaacatttacacaattctgtttttgataaaatgtagaaaattataaaataatgaatatctttgagcaattgacgaccccaaatttttaaaattatttgtattaattagaatgatgaatactgaacaatgtacaccttcctagttagttgttaaatattactgtacttggagacactttcatagtttttttcaatcccaaacaataataaaactacccaaccatcatattaaaagtatctattttcctaaataagccacatatatcttttaatttcatcatttctaacttaaaatttttagtactttatctaatacttttgtaaatatttcgagtgatattaacttttagttttaccttagtcatagaataaattatgccagcagtagttggtcatccacatcttttacctgctggcatagaatagtttaccttagttttcaactaaaaaaacataagttaccatagtcatatttcaactttagtatacagttgaaatatgacagagcatgtaaaaatgtggatgtttttggttacaaggtttctttagtcagaatggtcaacaaagtttctgacacgtgtcttattcagagtggttactttgaccagctgctagttatatttttgactcatcaaattcaccggcaaatccagtgagtaacgacggtcacgctgttccacgaagcttcgctgtcaacaccatcatcggaacttaccggagttcgttacggtaccttaaacccaaacccttctccgttttcgctttgttgattatcttcttgagtgacttcgttttgagaatttttctgggtttcggcattgtggaatcgaaattagtttttttttttctgttttgggtctcctctgtctcctttaactccattttcctacgaatctgtttctttaaccctaggaagacgaaaattatcgcttcatcgccacttattctagggttttgaatgcaaagaagaactaatttcataaacctgattgagcttagatttcaaatgatttcgactgattcgtactatgaaactcatcttccacatttagtttctcaaatcatttgagaaatctagctcaaacgattcgagtttcagaacttttgttcatcaaaattaagaatttggtcatgatctagcttagtttgtttcttcccttgtactttcaatttgatgttcttggaatcttccttcagagagattagatccttttactcataaagttttaacctttgctctgtttgtatagaaaaatcttataggtctctttgcttttacatcttcaaacttgacttgtgcttgtgatttgattgttgtcttcttcttttgctttcttaattgtgatattattaacaggtaggtttggattctatctcttgtgaaaaaaacagaaacacaaag

SEQ ID NO: 14868 - DNA, 3000 bp, Unknown; identical to SEQ ID NO: 14861
  misc_feature (1)..( 3000): cDNA_ID_3019499_gDNA_ID_2684231_Annot_ID_192258 3000 nt of promoter + ATG

SEQ ID NO: 14869 - DNA, 3000 bp, Unknown; identical to SEQ ID NO: 14860
  misc_feature (1)..( 3000): cDNA_ID_3019503_gDNA_ID_2684231_Annot_ID_192257 3000 nt of promoter + ATG

SEQ ID NO: 14870 - DNA, 3000 bp, Unknown
  misc_feature (1)..( 3000): cDNA_ID_2037860_gDNA_ID_2684231_Annot_ID_192278 3000 nt of promoter + ATG
ggacctatgaactgctcttttccttatttggtaatgtaaatgcaccatatgaagagggcaacatgttgtcccaagtagactgttgtaaaaggattaacgctatagaaatggacatgatgagaaatggttttcagcacagtcctatctcaaggctgaatgtggttagtttctgctccatatagataggtcttgacctgttttaagcagattaatcaaatgtaatattaatctggaaaatcccttttaaggcgatactatcaatctttacttcttcattgtgtatgtttgtgttatatatcagaacaatggacttatcgtttacactttcctttttctttcccagcttagagctctcggagctgaaggtatggtgaatgagatgatccgacacctgcaaaaggctgagaacctcagtgctcacagcaatatgtatctaggaacgcctacatacaacatagtgcttcattcacttctcgaggcaaacgaagtaagttttcatggtctaatagctttatcaaatttccactggaccagcatatatagcaatattgatcgctacttaaattacatgcagactgacatggtgatcaatatattcaaacgtatgaaatcatgtggctgccctgcagacgttgctacctacaatataatgattgattgttgcagccttattcactcgtataaatcagcttgtgccctagtttccatgatgatccgtgacgggttttctccaaaagctgttacatttactgctctgatgaaggtaataacaaagtatctgattacaattttaaaagtttgctgccattgtttctcaagaacttgctacaagtaagtattcagttcaggatgaaagaattctacacacagtacagacacataccaaattttcttgaaccatcgctcacgctcagaacttccaattttttttttggaatctagcagcttattgctgttcatttaattttaattaactaaagctgtgtatcctcttagattttgttgaatgatgcgaatttcgaggaggcactcaatctcttggaccaagcggcattagaagagatacatcttgatgtcttatcatacaacaccattttgcgtaaagcgtttgagaaggtaaagatatttgttgtaaaaacgcttaaagtaatgaaagtgaataaactgctttagtatacacataacttttgtctgcagggaatgattgatgtgattgagtacatagtggagcaaatgcaccgagagaaagtgaatccagatccaacgacatgtcattatgttttcagttgttatgtggagaaagggtatcatgcaacagctatagaagctttgaatgttctgagcttaaggatgctcaacgaagaagacaaggagagtcttcaggacaagaaaatagagctagaggaaaatttcgtcatgagcgaagaccctgaagctgaaacaaagataatcgaactgttcagaaaatctgaggagcatcttgctgcagcacttctgaatctaagatggtgtgcaatgctcgggggccggataatatggtcggaagaccaaagcccctgggccagagcactctccaacaagtacggttaataggtagaatgggaagtgttttcctgaataagagctggtgttgattatctgccatttcactaagctgctccgttttggttttgtatcctatacaaactagttagtgacaacacagttttggaggtcaccaatcgattcggttagatgagacggatcaacaatacggttagaagcatttttaagcggctacgaaccacctaaatacaaggcgacttgcgaaccatcaaatgcgagttttgttatttactttagattcttactgtaacttttgtttatttttacctttcaacaactgtgtatcaaagaattagccaaagatattccaattgcacctggttatacaaagttataagtatgttttctgaatatggatttaaccacttttgaaataaaggtaacaagtgcaatgcatatgatattgaaacttgatcacttgaaacaaagaagagaatatttactgagaaaacataaaggacagatggaaacgacagaaacaaacttaataatgttacaacttgctcctgtttttcttttgtagtttactcatccaaatacaaatcactgtccatagatagaggaccaatcctttacttagctgatttcaaaccatagaataccaaatttctaactaaagtatattgtacaacaatgcaaaacaaaaaataatgatactttcctaaattttaaataaataaaaagaagaagatattttctcttttaaccaaaatgatttatgtttgttacttaattacattactcactaactattatcttttacttaataactgaggccaattctcttcttctttgtcaactattagggacatttgttttttttttggccgacttggggacatatatctttgagtgttatatgtatgtgtattccattgattcatataaaggccctgataataatgtttttatcaatgtgataacaactaaagttaggcaaatatgagtttaaccgaattacgtataagctaatactcaatttaagactagtaaaaaaaatcaatgctgccgactgccgtcattaaagattttgatattaatctttgctttattttaccctaaatgtataatgtaagctaatatatatcaaataattgttagtcaaaagtcatcaaaattaacagatttttattaaacagattgtaataagatggaaacctctctataagaagtgctcaaaaacaaaggaactcaatttctctctctctctgatgattttgtttgtttgaagaaaagagaatattgttgtttgtctctcgtgatcgaaacaatgctttgtgattctcaaatacagtaacattttcaacatgctttgattccaaaaatccaaactttcattctctctctcaatctctctatatctccgagcagcgaggtagttgcacggcggccgcc

SEQ ID NO: 14871 - DNA, 3000 bp, Unknown
  misc_feature (1)..( 3000): cDNA_ID_3019521_gDNA_ID_2684231_Annot_ID_192277 3000 nt of promoter + ATG
gcctataaatactccacaatttttatatgattttagtagctcaatagagaataacaatagaaaagaaatggaaggaacaatgaggtgctcagcgaattacgtcccgctttctccgatcagctttctcgagagagctgctgtcgtcttcggctccagaacctctgtcgtgtatggtgatattcagtacacgtggcaccaaacacgtgaccgttgcgtccgccttgcatctgctctctctgaccttggtctctctcgccatgacgttgtaagtggttaaacgacttttatatattggtcatacttttttcttttgtttaaactatttcttttatcaggtggctgctttagcgccaaatgttcctgcgttatgcgagctttattttggagctccgatggctggagcagtactttgcgtgttgaacacgacattcgattctcagatgcttgcgatggcgctggagaaaacgaagccaaaagtattcttcgttgactctgagttcctctctgtcgctgaagaatctctcagtctcctctcaaacattgaagaaaaacctctcatcatcacaatcacagaaaatccaacagagcaatcaaaatatgaacaatacgaggattttctctccactggaaaccctaatttcaaaccaatacgaccagttgacgaatgtgatccaatcgccctcaacttcacatctggaaccacatcgactcccaaatgtgtcgtctatagtcatcgcggtgcctatctgaacgcaactgctgttggtgttatgaatgagatgaaaccaatgccggtttatctatgtacagttcctatgtatcattgtagcgggtggtgctatatttggacagttacggcttttggaggagtcatcgtctgtctcagggaagtcaacgacgaagttatatttgatagtatcgtgaagcacaaggtaactaactttggtggctcgcctccggttctcaacatgattgctaatgcaagagactcggtcaagaagtcgtttccatggaccgtacaggttatgagcggaggatcctctcctcctgaggtaaaactaactatcacagagttttgaattacatgtttgttcaatcaggcttatttggttgaacttccatattttgaggttatatataatcaatcccttgctttatacgttagctccgtcacagtacattaatatttaacatagaatcatagtaaagatattaatttatttggacaggtcatgttgaaactcaagaagctaggattcaaagtgatgatggcttatggatgctcggaggtgtatggactaggaacagcttgtttgtggatgcccgagtgggagactctacctgaagaggagagtttaaggctcaaggcaagagatggtctcaaccatttcgccaaggaagctgtcgatgtattggacccaaccaccatgaaatcggttccacacgacggaaagactatcagggtaattgctctccggggaaatacagtcatgagcggttacttcaaggacaaggaagccactgaagcggcttttcgaggtggatggtactggagtcgcgacatgggtgttatagatcctgatgggtaagtaaatgaatcatgcattactttgaatgtattactttgaatttatttatgcttatgatgtttccacatgcgaagctacatacaatttaaagataggtcacaagatgttataacatgcggaggagaaatcgtgggatcaaaggagatcgaagggattctctatagtcacccggcggtttatgacgcaggggtcgtgggtcgaccggacgaaactttaggagaatcgatgtgtgctttcgtgaagctcaaagaaggagctgaagcgagagaggaagagatcattgagttctgcaagagaaagcttgggaataagaacatgaagatgattccaaagacagtagtcttctcggatgttcctaagactcccactgggaagattcgaaagaatgttctgagaaagatggccaaggatatgggttatgttcaattgagagctgtggagtaaatgaaatgataatttatcaatgcatctaataaagttataaaaaaaaaaaaaagtgtaaactttaagctttagtttatatgttctgatgttctatgttattttgacatttataaaaaataatgaagtctcatttctagtagactgatcttaacataagacaaaaatatatatatcagtagatgataatgggtatgactcggcaagtattattctcttgatactattatgtagtttcattgtttaagcacactgatagtttaatactattatgtcgtttcattgtttaagcacactgatagtttgatatttttgtatcaggtgctgttgattgaattatgtttttttttgttcttgatttactttttattggggtagtattcatgatgattaatggagactatgttatgtatataatgttagaaacctggaaatatctttcacaagttttcacctttaagcaattcattttgatagaaaaataaatattatgagattaatctttcttccatggatcaaggcaagctaatagctatcatacaaacttataccagcccagatcaaattaaaccggagagaaattggaatgcccaatcagaaatgcataaatgggccaaatgtgaagaatacggcccaataattgttttttccatcagaatgataaacctgaaatgttttcttttcggcaagcttctctcctcttctaacatggtcgcatctgctagaaccagatacacataattgaaacgagtttcgataaatggaaatgttcgcttactgatttagagtttagatttttagtttgtgaagtaagttttcgccttttctaatctcgaagaacctcagaatcgagcctggaaagccatgtacagagctctgtaagttgttttggcaatttttttttttttttttgtgttgcctactatttcaataaatgttcattgacttgcttcgtgtttgtgcaatgaag

SEQ ID NO: 14872 - DNA, 3000 bp, Unknown; identical to SEQ ID NO: 14859
  misc_feature (1)..( 3000): cDNA_ID_2731082_gDNA_ID_2684231_Annot_ID_192253 3000 nt of promoter + ATG

SEQ ID NO: 14873 - DNA, 3000 bp, Unknown; identical to SEQ ID NO: 14867
  misc_feature (1)..( 3000): cDNA_ID_2730528_gDNA_ID_2684231_Annot_ID_137608 3000 nt of promoter + ATG

SEQ ID NO: 14874 - DNA, 3000 bp, Unknown; identical to SEQ ID NO: 14866
  misc_feature (1)..( 3000): cDNA_ID_2730530_gDNA_ID_2684231_Annot_ID_137609 3000 nt of promoter + ATG

SEQ ID NO: 14875 - DNA, 3000 bp, Unknown; identical to SEQ ID NO: 14865
  misc_feature (1)..( 3000): cDNA_ID_2730534_gDNA_ID_2684231_Annot_ID_137610 3000 nt of promoter + ATG

SEQ ID NO: 14876 - DNA, 3000 bp, Unknown; identical to SEQ ID NO: 14864
  misc_feature (1)..( 3000): cDNA_ID_2731072_gDNA_ID_2684231_Annot_ID_137612 3000 nt of promoter + ATG

SEQ ID NO: 14877 - DNA, 3000 bp, Unknown
  misc_feature (1)..( 3000): cDNA_ID_2781978_gDNA_ID_2684231_Annot_ID_137613 3000 nt of promoter + ATG
caaacacgatgttgttactaccagagaaactcttgaacaagacttaacaatatgaagaaccaaaactatgaaaggtgaacactccattttagctaaagcaaagcgcagaaatgtatagagggattcaattacaagacttgcctcaaattgttctaaggtggtgtatgccccggattctaatttcttccgcaatgtggtgaaatccatcggattcttgataatctcataataatcaggaagctgtaaacaaaacattcacagataagataaaaggcaaaacaacatactttaacatcaaacaagcttaaacaaataaagaaaacttcacctcctctggatcagctggatcagagtacactccataagtatccttcctgcaagtatagtaaaacaacaatcaatcaaaaatagaagaacatggtacatggagaaggaagatatgtcagaagccataaaaattgacatacttttgaactctatcaagaatgaagaacaacaactttttgtctggcaaaggtgtagactccacaagtgaccctcctgtccacaagttaaaataccacaatctatttaattaattaccacaaaacaaatcccaagtttctgccttttcataacttcaaaacaaaaaaacaagaaaaaagatatatactttgaagaagaatgtctgtcgctttcgaagccttttctccctgcagaagaaatacacaaaacagagtatcatcaacaacctcaagttaaaaagatcaaatcataacaggtgtctgtatttatgacaaaagtgagaacaagtacaattttttaaggaaacttaagaaactaaactgatagtaaaagacaaaatcagaacttgtctcagagacatatgattgtctcttcagtgcagaaaccggctttaatttttctgataactatgaattaataccagaatcagaagaatattatataatattcagacaaaaaagaagaaaagattaacaccaagattttctcgaccaagacaaaaaaaaaaaagaggaaccgaaaaataaaaataaatatacagaaaaagctgaaattatgaatttcccatttcccaccaacaaaaaaaagggaaatagtcaaaactcatcactctcactcaataaccatatttaagcttgcagacgaacctcaattaacgcgccaaaatatccaaaaaaaaaaacctaaaattaaaactttttttccccaaatgaattttcaaataaagattgaatttttatactctataactaccgtattgtcagatccgtcaattttccggcggttgcgtgcatcggagtccaaatcgccgccgccagatttggaattagaagaatcacgaccctcgtgtgaattcaatccgtgtaaaagccgatgctttttgtctctcctctcatcgtcgtcgtcttcagaatttgaattcctccggcgatttgatcggttgctgaaattagggtttctggaactggatctaagctcttcttcgttttcttcattgggatttcttctctgaagcaattgttgctgtttgagagctcgcttttggaggtcaagaagtgatggcctacctttcttcttcctcttcatcaatgtattattatcagctacctcacccattctctctcttctcttgtctctctctctctctattgttctccgcctttctcttctttctaataaacagtcgtttcgtgtttattcattttttgcttacacatgtgtgagtgagttcgtacgtgcagaccaaaattggacacgggttactcgtgcgtgactgcaatacacgtggtttacattctatggatcattttgggataacgtttttgagttgggccaattgggccttaattccatatagatgtctggattgtctgcaaatgtttattttttgggccactacataaaatctctagggtgattagatcatgattttgaagattatagattagatgtaataagaccatgtagtttaatggtttgttttgatgttgttactcactaatcactatatcattcctttttttataacatcttgttgcatacaactacagtaactagtctactttctttttttttggccagtggtgtttataaaattgcaaaacatctacattaactatttaactttattgatgagagtcatgagaccaataattagataattgactttttaaccaagaaagatcgaagaattaagcttttaatatagaaacaatgaaaccaacagcgaatgtttagtacattgaaaatacgataaagaagatttttttttttgactattaacatcatttaaaatgacacaaaaaacgttttattttgggtagtctcggtgttcacatgtgttttcccatgacgacttctcaataattgtcaaagctttttggtatatgtctattttctattttttgtcggtgtgtgttttttctttcccatcttttgcttagatgactgaaactctcttctagtttccatctttcttcctccggtctcgattcaggcacaaaaatatctctggcggattcatacttgactacaccgatgttgtgttacatggatttgactcgatttcacccgttttcttttcaaaggttttgaatttaaccagagatcgttctcaatttctcaagctagcagaagaagaagctaaagacctttgttcttggttaagacagcttcttcagggcttcttttgttttgaactggtacgtgtgttaatcttcctttttcgtgtgtttgttatatactagtactaattagtaattactatcctgagaataaacaaaattctatatttggtaatatttcctatattagggttaaacgaatgatgattgttagaagcaaattagttgcctttattattagggtatagttttgattttagctactgaatgttgttcctcataaaaggtagaagaacttagcttaatttggtatataagatctttgattacattatagtcttattatggtgtagaagaatcaattcatcagatg

SEQ ID NO: 14878 - DNA, 3000 bp, Unknown
  misc_feature (1)..( 3000): cDNA_ID_2731068_gDNA_ID_2684231_Annot_ID_137614 3000 nt of promoter + ATG
tatgaagaagcttgatagaagctaaccgcaaatcatcgttctcatgtatctcaacaaactgaaccaagcttatgatggcagctgagtttctgatggcagaaacaacattaataaccgagtttggacagctagtgagtccaacaagaaccgccaacagctttccttggatttctggaccagtgttgcttgttagttggagaaggttctccactatttcctctgaaacaagagtttggtgatgaggtccaacaggaactttgtcgaagtcgtacccaatgttcactatattggcaagaatagttgcagagacttctttaagtcggattggaagctggtttggcccaacatagaacaagtctttgataagcggtgggagaattccggtgttgattaagagtttagcactcccttcaaaggatgagatgttgttaagagctcccaaagcagcttcccgttggctcatgtcgcgagttctcataagatcgataagagaagaacccacagtctgagccacaataactttcacatcgttatttaaagcaagaaccccaagatagaaagccatggaaacttttgtttccggtgaacctgtagatgcagatcatgttacatagttatagtttcattcaaaccaatcagtgaaaatcagtttattggtaatgaaaggttagtggtttggtgaaataatcaccttcaagaagtttagcaagaagaggctgcagtctaccattgatagccatctgtcgaacattttcctctgacctctccaaatttgtcaaagttttatcagctttctcaacagttgaaacattctctgatttgctgcttgtcagaccaaccaataagatgattgctccatggattgatccaatcttctcgcataatgcttcagatttagagagctcaaacaacacggaaacagctgcttccctcccctttgatggctcttgagacaagaacttaactatagtacgcacagtgtctccttcagctactattgcctgaaacacactaaaaatcacttacaaaggaatcaaagacaaacagagagacaaacaaaaacacaaacagagagataaccttgctctcttcatctccttcaacgactacttgaagagtttgtagagccttacaccgcacttcatgactactactctttagcatatcggtaatcaaccgaacaagctgaggattgcacacacgttgcctaattttacgtatattcctacaaatctctctgacattcttcaaagccagcaaaatattagtctcagcatttcccaaataaagtgactgacgagcaatatcaagcttcaaagcatcattccttgctctccactcttcaatagtgttacgtaaagctatacttggacttagatcagtgatactcaactccttagaagttataggacaagatagaggttgaccgttttcacgacattcttgaaaccatttctcaatagcttcacgctcaaatgtctgaccattctctaaagtgacaggattatgcataacttgctttgtcaatggacagataaaagcttcgtatatgttatcaatccctggctcgaattgtgagctgttatccgattggcttccatcccaacttccacttccagccatctgatgaattgattcttctacaccataataagactataatgtaatcaaagatcttatataccaaattaagctaagttcttctaccttttatgaggaacaacattcagtagctaaaatcaaaactataccctaataataaaggcaactaatttgcttctaacaatcatcattcgtttaaccctaatataggaaatattaccaaatatagaattttgtttattctcaggatagtaattactaattagtactagtatataacaaacacacgaaaaaggaagattaacacacgtaccagttcaaaacaaaagaagccctgaagaagctgtcttaaccaagaacaaaggtctttagcttcttcttctgctagcttgagaaattgagaacgatctctggttaaattcaaaacctttgaaaagaaaacgggtgaaatcgagtcaaatccatgtaacacaacatcggtgtagtcaagtatgaatccgccagagatatttttgtgcctgaatcgagaccggaggaagaaagatggaaactagaagagagtttcagtcatctaagcaaaagatgggaaagaaaaaacacacaccgacaaaaaatagaaaatagacatataccaaaaagctttgacaattattgagaagtcgtcatgggaaaacacatgtgaacaccgagactacccaaaataaaacgttttttgtgtcattttaaatgatgttaatagtcaaaaaaaaaaatcttctttatcgtattttcaatgtactaaacattcgctgttggtttcattgtttctatattaaaagcttaattcttcgatctttcttggttaaaaagtcaattatctaattattggtctcatgactctcatcaataaagttaaatagttaatgtagatgttttgcaattttataaacaccactggccaaaaaaaaagaaagtagactagttactgtagttgtatgcaacaagatgttataaaaaaaggaatgatatagtgattagtgagtaacaacatcaaaacaaaccattaaactacatggtcttattacatctaatctataatcttcaaaatcatgatctaatcaccctagagattttatgtagtggcccaaaaaataaacatttgcagacaatccagacatctatatggaattaaggcccaattggcccaactcaaaaacgttatcccaaaatgatccatagaatgtaaaccacgtgtattgcagtcacgcacgagtaacccgtgtccaattttggtctgcacgtacgaactcactcacacatgtgtaagcaaaaaatgaataaacacgaaacgactgtttattagaaagaagagaaaggcggagaacaatagagagagagagagacaagagaagagagaga

SEQ ID NO: 14879 - DNA, 3000 bp, Unknown; identical to SEQ ID NO: 14863
  misc_feature (1)..( 3000): cDNA_ID_2731064_gDNA_ID_2684231_Annot_ID_137615 3000 nt of promoter + ATG

SEQ ID NO: 14880 - DNA, 3000 bp, Unknown
  misc_feature (1)..( 3000): cDNA_ID_3019525_gDNA_ID_2684231_Annot_ID_137616 3000 nt of promoter + ATG
atttgagtaaaccaaacggagagcagtaccttgttgcttgggtaagtaagattaacaattgtaaccagattaaaccggaacttaatctctcgtttaatttaaccgtgttttttttttcattttcgcgttaatgcaggctagaccgtatctcaaagatcctaagaaatttggacttctagttgacccgttgctacggggaaagttctcgaagaggtgtcttaactacgcgatttctataaccgagatgtgcctaaacgacgaagcgaatcaccggccaaaaataggagatgtggtggtggcatttgagtacatagcctctcagagcaaatcttatgaagatcgaagaacggctcgcaagtctacggactctaaccggttaagacgggaaacaaaacagagttattaattaaattgtatgagtcctaagtgaaacctctgctagaatcagaaggttcctgataaggccgcataattaatgtttgtactttttttccgggtgtttttgtttagtcagatttaagaatgggatttggtcggataaagaggtttttttttttggcttgaggtaaatggtgctttgtaaaaaaacttaaaaataaaaatgaactcttacgtttaaatatatattataggtatatactatatacgatgttattggtgggtcattaatacaaatacatatgcgtacactgtacacaagtgatagttttgataaataatatttcaagtgagctagttagattttaatacaaataatttcaaaatatatcttcaaattttaaacgtcgatttcagagtagatcaagattgtgacatcgtcaagggctaatcttttgattctttcttgcaaagaagaggacatgaaatcataaatgcaagtaggtgactaactgatttacgcggacgtcgaattatcgattatactatatatttatgtcaacttgcattataccacttaatccgatttacacatactatttcccatgtctacattacatagatatataatattcgcatattgcaggtttatgattgaagaagaataaaataacatctccccacgttttacatcggtctacgttatacatcggtctagtattactactataatatgcaatgtttcaaactttacgtggaccgttagtaaatgtgtttgtgaaagaaagaaagtcacacacatgtgtaatcgactgtttttttgtcttttgctacaaatgttaatattcattggaatgaaagttgaggtgctacaaaacagttagacctatgtatatttgttttttggcaaaaaaaacaaacaataaaacaatggagttgggacaaataaagttgttttcatcggagagccaaaaagccattaaagttgtaatcgactgttaaacgaaatgttttgttttaaccaaatatcaacatatcttatcttgctcagtgaattcacatatatagttgttagcaaaacaaaagatcataagataccacatacttttgaattttcttagatttatcatatatttttaaaattttctaataaagtttccatatgctgtcacgtttatatactcggacccgccattgctaaacactgttcttcttgtttgacctcttcccactgatatttttttagtttcttctaataaatgataccgtatatcatgataataaagattttcatatatttccgatactatttactgttttgtttttccacacaagataagaaagaaatttgttcactattatcttgcatcactcgatatctacatttttgtgagttctcttgttacgtcattgaggtgacgtatatgatcgttataatagtctatattgatcatgaacgaatgtgaatggtaatttggtatacgaggaaaaagaagtatggtacgaccgtacgagcacaagttgtaactttttttttgtttaaaaagaaacaatacagtagttacctacgaacataactttaatgttatgatactttttatttgtaaaaacagttaaaggaacttaaaaactatggttcatcgtatatattttcgatctgccacccaatgagtgagcacggcctttgactctggactaaaattatattgaatattcatatacttgatatccaagtaaatatgaaattatatacatgtcaagaaaattgtttatcgtttttggattatttatgttatcatctagtagttttattgaaatagtaaaactcgagatacacaaatgagaaaatgtaaataagtagtctgaatcaaggactaattgacgttgaaatttttggaaataaatgtatatttcaacatcaaccaatcaataatcacgacgatatcaaatacacatatccttttataaaattaataatgaatatttccccaaataaagagttttgcttggtctttcctctcttcttctcagcttcttcctcctcaatctttcaattaaaatccccagaaaagaaagaaaaaagggacagttggagaaaaagattctctcaatcttatgatcgttaagggtgaaacaaagattactaaaaacagaggaaaaacagagtaaagattactcaagagtcaagagctggtttgatcttaatgggaaacatctgtcctggctctggatcttccactgttaaccacgaacctgtctccaccaaacccctcccaggttcatacacacatctctctgcttttttctttttttttggggccgaatccaaatactttagatctatttaccttttttttttctttggtatttttgacgattcttgagtttctttaagttcttgcattaaccccccaaaaaaaaaaaacgctttcctggatttttttgtttgtttcattgtgccttttcaattatgaaaatgtcaatgcttgctctgttttaacttttctgttaaagtctcaatgtttttattttcattaaatcaaactttcgtgtgtatcaatctatacagtgagacgtgtgcagaccccagagaataaaaagtttcctccgccgctggtggcg

SEQ ID NO: 14881 - DNA, 3000 bp, Unknown
  misc_feature (1)..( 3000): cDNA_ID_3019521_gDNA_ID_2684231_Annot_ID_137623 3000 nt of promoter + ATG
gaaatacagtcatgagcggttacttcaaggacaaggaagccactgaagcggcttttcgaggtggatggtactggagtcgcgacatgggtgttatagatcctgatgggtaagtaaatgaatcatgcattactttgaatgtattactttgaatttatttatgcttatgatgtttccacatgcgaagctacatacaatttaaagataggtcacaagatgttataacatgcggaggagaaatcgtgggatcaaaggagatcgaagggattctctatagtcacccggcggtttatgacgcaggggtcgtgggtcgaccggacgaaactttaggagaatcgatgtgtgctttcgtgaagctcaaagaaggagctgaagcgagagaggaagagatcattgagttctgcaagagaaagcttgggaataagaacatgaagatgattccaaagacagtagtcttctcggatgttcctaagactcccactgggaagattcgaaagaatgttctgagaaagatggccaaggatatgggttatgttcaattgagagctgtggagtaaatgaaatgataatttatcaatgcatctaataaagttataaaaaaaaaaaaaagtgtaaactttaagctttagtttatatgttctgatgttctatgttattttgacatttataaaaaataatgaagtctcatttctagtagactgatcttaacataagacaaaaatatatatatcagtagatgataatgggtatgactcggcaagtattattctcttgatactattatgtagtttcattgtttaagcacactgatagtttaatactattatgtcgtttcattgtttaagcacactgatagtttgatatttttgtatcaggtgctgttgattgaattatgtttttttttgttcttgatttactttttattggggtagtattcatgatgattaatggagactatgttatgtatataatgttagaaacctggaaatatctttcacaagttttcacctttaagcaattcattttgatagaaaaataaatattatgagattaatctttcttccatggatcaaggcaagctaatagctatcatacaaacttataccagcccagatcaaattaaaccggagagaaattggaatgcccaatcagaaatgcataaatgggccaaatgtgaagaatacggcccaataattgttttttccatcagaatgataaacctgaaatgttttcttttcggcaagcttctctcctcttctaacatggtcgcatctgctagaaccagatacacataattgaaacgagtttcgataaatggaaatgttcgcttactgatttagagtttagatttttagtttgtgaagtaagttttcgccttttctaatctcgaagaacctcagaatcgagcctggaaagccatgtacagagctctgtaagttgttttggcaatttttttttttttttttgtgttgcctactatttcaataaatgttcattgacttgcttcgtgtttgtgcaatgaagatggctttctccattgcgatttattgtgagctcgtcgtcgtcaaagttaacgccttacgtatctcgagttagttatctgttccctgtgtttcttcaattaaatttgaagacttattgcaatttgattaaatgggtatttgattatagggacgaggactaagtggaattgataatggggctggttgttcttgttctcgtagtgtcacgacaatgattggtatgtctgattttagcctcttcgtatggtctatttgtctcaatatctatttgatgttacttggattatgaaagacgagatttttttgacttaagagtgcatgtttccatatgcaggtaatgaattcattcgatgccaagatgagtcaaagatcttacagttgcagattgttgatgcccttcgttcaggagagaggcaaggagcgtcagcattgctttttaagttaatacaggggaattattcacttagtgctgatgattttcatgatattctatattattgtgctcgatcaccggatcctgtggtaagtttgatatatgacaaagtctccctttggctttgtttaatcttcgtttatctttcacaagttatatttcaatgaaattttggtagggctgagatgtaaatctgtaatttgtttctcataatacagtactcttgttgtctctgacctcaaggcagtaatttgttcctgtagtttgtcatggagacttacagtgtaatgtgcaagaaggaaattagtctggacagcagatctttgttgttcatagtaaaatccctttgtaatgggggacacttagataaggtataattattccactcgaaagccagtatttccttacataatgcgactaaaagagatgagtaaatagttttgggcatacttgttcaggcatcagagtttattcacgctgtcagagaagatgatcgtatatctcctcttctgcctatctataacttttttcttggagcctgtgcacgaacgagaagcgtatatcacgctagtaaatgtttggaattgatggatcaacggagagtggggaagaatggaataacttatgtagcacttctcaaggttagttaagaacatatcatttttcagtgccttaatctttttgtttttttcaagagctggtcgtatgccaactttaaaatttggagtgtagaagatctggagaggacttatctttttgttattgtctccatttctgtcttagctttgctgtcccttaaggactttcgtttgttccttgacatggaggtttcattttcattgatctgcataattatcttctttttctttgttatctgattaatattattttcagcttgcagtttttcagcgcaatctatcaactgtcaatgatatctggaaacactatgtcaaccactataacctggatatactttctctcagaagattcatatggtcctttacaaggctaggggatttgaaatcagcatatgaattattgcaacac

SEQ ID NO: 14882 - DNA, 239 bp, Unknown
  misc_feature (1)..( 239): cDNA_ID_2993295_gDNA_ID_2684231_Annot_ID_137625 3000 nt of promoter + ATG
ttcttcaacattggaatgtgttgcttcccttgatgcacatgttggtaagattaattggtgagttcattgtttacagtttcagcagtctatctactgggtgtgcttataagtgcggtggtttaaaaagtcttagaacttgtaactttcttatcttcactttcatgaagactctctatacctcttgtggaaacagcgttctttggtgtccctctggaaattctgacaagttaatcagcatg

SEQ ID NO: 14883 - DNA, 3000 bp, Unknown
  misc_feature (1)..( 3000): cDNA_ID_2731145_gDNA_ID_2684232_Annot_ID_137626 3000 nt of promoter + ATG
actgaccgtcgtagaagagcctctgggttgtatggaaacagtttcttctgatgtagcttaacaactgaattttgtaacgaaagcagacaatctttggcgtcttcaaaagcctgggcatgtaatctccagttttgttcaacctcagaagtctcaggcaaaacttttcttctcttcggagatggagcatctgtacttccttcaaatgggaattccacaaatagagtccatgaatcacatactgcacgcaagcatctaccaggaaaaaacagcggatgtcatatgggaatcaacctataagtatttgtttggaaaattcataacgtaatttgtaaactagagaaatcattcaaagactagagtacgagctaacatggctggtctcacacaaactaacagatcatatccaatcttattactcaagatggagcagttgatatgcaaattcttaagagaaaaggattaacctcagcaggtactctgcgcagctagccccaatatctttagatataaggtaatcaagaagtacttgatgatcataatgcagctgaaaacagaagacagaggtgaatgatgaacatattaccaagcctaaatggaaaatagcacaagagattatgagaatgttatatgaaaattacctctgaaagaaatatacagaataatcttacaggattgaacaaggttgataaacggaagagagtaatttgttcctcatcttcaagcgaacccccttccacgttaggcctgtaagtaaaaaaatgcccataagaactcacagaaatctagataactgtttgcagaaaggcaagtgttttaccctacttacaattcctgtctatgcaatggtacagacagcaattgcaggaggactttaaataatagatcatcctacagtttaacatagaaaagttataacagagctctagtgtatggtgttaaactaaaacaccaaatacgaatggcaaatacagaatgataacccaaacctcatgcatgaacagccgaacgaaggatgcagaaaattcaacattcttcttgctataaattctgtgatcagaaaacatattgcctggaatctgtcgttcaatccatttaaacatctctgccatccctttctttctacaatcaaactcacatagcttgtcgttatgtctacttgagtaaatcaaagtgaaggagcaccgtaggaacagaaacacagagagtctttgcaaatgattagaatgcatctcattgacctccctatcagacaaactcacaaagaatggcgaaccctccaaacaattatcttgaacgggtttaaactttgttagggtgtgttgaagaaagccttgagaatcccgttgcaaatattgcagccatgaaagaagaatggtacatttgattttggacttatcagtaagcctgatcatcaacacctacaaaaagggggagacagtcgtgtaggatgaagttattatccgagatatatcaagaaacaaagcaaagtggttctctgaacttgtaagattagaaacagatggaaatacgtaccagtaacttgtgccctaggtatcttgacatgcaagagccactttgacttttcaactttggttggcaccaacggaggagatccggaataagcttgatggttttttggaggatcaaatatgaaggttcaaaatcatcagaatcttctacaacatgaacctgctgaaccatggaacagagaaactggacaaagctcccaagaaatacagttgcttcctcactgtttccactctgaccttggaaatttctttcaccactaccatgctgatgagaaaaaatagtatccaatcggcaccaaggaacttttgcaagtgtagagttgacagattccaagtatacatcaaaaatttcctcattgtcttcttggctcaagcgcttcaatatattacgaagaactcgaaagatatccgacaccgtggaccagttagccttttccagcttacatttaagaacatcagaaccgaagaaacattgatctagacttccaaatccagtttcagatcctacagcaggaattgggaaactgtagataactgctaaccgcaaacattcacaaagcaaacgaatgaactcatcccattgacttccctaggaaaaacaaatgagtgagtatgagagctggaagaatacaacattctaaaatcccgagtgaggcagatgtaacatacagattcaacaagacaaccggatacttccacaagtatgttgccagccaaatgtttaacatgcacattctccatacccaacaaacaaacctgccagagaaaccagatcaagctaaggatcatagacaactctacctaacagcagaatgagaaacttacaagatccgccacaagtctttctaagcataaatactctatagagtctggaccatataaagcatcagcagattcatcatgatcaacaacagtctcctctcgcgattcctattgaaaatcttagctaatcaaatagctccaatactcatcaaccaacctatacaatcttaaaatattaggaattcttaaagcaatgaactcaccaccgccttatcacatgaaatttcgctcctccaagattgaatttctctcaacacctgtaaaaaaaaaaaaaactatccaatttaagaggaccggagcttcgaggattaacacacaggaagcaaaaaaatcatcgacaatgatgaacctgagatagagaaagaagcagatctttttccgtttccttcgtcggcaaagttacttcttctctttcctacatgactccgagaaccaattgcgtttatacaattacacatagttacaataactcataacgaaacggagaacaagagctgaagaataatacttacagggaattggcgaacacaaagatcgatcaagagatgaagacgagaagccaagtttccggtagccattttacaacgacgacagttcactctcgccggggatcaataaactcttattaaaacgtagcgtttttgttatg

SEQ ID NO: 14884 - DNA, 3000 bp, Unknown
  misc_feature (1)..( 3000): cDNA_ID_2731136_gDNA_ID_2684232_Annot_ID_137630 3000 nt of promoter + ATG
tgattccatgtatagtgtcattcgacattgtgatggaagacatagcttatgatcatcggttttgaacatgacgctaaaaatttgattaagatatctaattattaaaaattaaacttcttatatggataaaagatttagcatattttggtagcgtaatgtagatttgtatgtggtaggacaaaataaattaactacctatagcaaatgagtgaaaagtttgtatatatatttctaccctaaattatgttaaatacatgttttctgtggataatgttgtctattggcaacgactgttggcattacgctaactcatcaaggaatcattattacttctctccaattcatgatcagcttttgacacaagacaaaaaaacttcttgtgtaaaaaaagctaaagagaaaaaactgatgttacaaaaactatgttaatatgattcgagaagttaaaataaggagaacaaagaaatgtaactaatagttaaacttttagaggattttctgatttaaaattagaacatggtaaaatttataaaattatggtataaaaaaaactaaagatggaaaaattcttgtaaaattggagaattatttatagtagtgaactattactttgtagtataaaacataatatcatgtcaaaaatttaaaaatttgattttgtaattagttaagggagttgcaattatgctagaaaaaattcatttcaaaattgtagtttaatatgtagtaatttcatagtttaatgactatttttctaaatatatgatatatctattaaaaaattattttagtcaaattacaattaatgataagtacacgtgtcattaaagtagtgtaccaaatgtcgcattggtaggcaaagttaaaaaatgttataaaataatttaataatatatatataaaatatttatgactaaataaacattaaaatgtttaactacattttaaataaattaatcgttttatagttggttcagaacaccttggttgtcttggtactgtgaggaaacaacttaattttgtttagtgaatatctaaataaggtttcatttaacattgtcaaacttaaaaaaaaaaaaaggaagtaaactaagatgacaaataaatacttttttctatatagtaatctttagtaatcatagtctaagaatttccctctatttcatgaaaataaggtttcaattaacattgtcaaacttaaataaataaaggaagtagaccaaaaaaacaagtaaatactcttttctatatagtaatctttaatattcatagtctaagaattttcctctatttcatgaacttcttcaaccttcttctttgtcttctttgcctagacagaaaaaacaaatggagatacacaatcacggataatgagtaggtactttcggatttgattattctagcaagaataattatgcatctcaatggactttaacaacaccagagaaaactttgcatgtatttaccaaatatttatttagctagtatatcccataattgttgtgaaattgagaatttgaattttcaaagaatatactatatacaaatataagttagtgtagagcttagatgtttactgaacttgtaagaaacacatccaaactctagaaagatatatcgatgtacaactaaaatatgcaaaaaaaaatgaaaaacggatattgtatttggagctgagcatttgagacacttgagttgccaattgcttcttctcaagccatgcttgttatatagttgcattcttaagccatttttagttatatattaagtcataaattgtactttaatgtggtgatcaaaatattgtaacttatgagatataaagggtcataaatttttggatcaaagtactcctaaatagtgtttaataccttattacggttaagcagctaagaaaatgttaagagtatgcattaatggtaatctataatagtaaatataataattttttattatcaaaaacatataaatagtgataactttgtactctaaaacataatatcatgtcaaaattttaaagatttgattttgtaattagttaagggagttgcaattatggtagaaaaaaattcattttaaaattgtagtttaatatgtagtaatttcatagtttaatgactatttttctaaatataagatatatctattaataaattattttagtcaaattataattaatgataagtacacgtatcatcaaagtagagtgtcaaatatcgcattggtaggcaaagttagaaaaaactttctcttattatagaagatttttatctaaccagacttcttgtaaatccttcttatgggtcacaaacgcacaatcaaatgcggaaacataaaatattcacttgctttaacaactactagctgtaaaccaaacttaacaaagaggtaagcgaaacatttcactataattagtaggatcaatatgaaagaaaaactttttctatatttaatctaaatttagctaaaagagtttccatatgatagtcatcataatatttcacgataatgtcaatatagaatatacaatatttctaccaatataaattagaaaaacgagaatggacagaaacgttaggagatttcagtacacgtcagtgattaatccaacgtatgtacaaattcgatcatttagaatatgattatcttccctttttttctttagtttcatatataacttgaaacaaacaaattaattttcattgagaatgcttcactgctcgctcttctcttctttaatttcatagtcacaacaagttgatcaaaatattaatatttaacagaaaaaattaatccacattgagactatttctctactcctttttctttaattccataatcacaacaagttggaaaaaatcaatccaaataagtgtttttgtcaaaagaccaattcaatattgattcattcatatactaacctcgtgcgatcgagagctaaagctaattgcaataaatctctttgtaatttaagtaatccttaaaaaaaaactatacaaa

SEQ ID NO: 14885 - DNA, 3000 bp, Unknown
  misc_feature (1)..( 3000): cDNA_ID_2731133_gDNA_ID_2684232_Annot_ID_137631 3000 nt of promoter + ATG
aaccttcttctttgtcttctttgcctagacagaaaaaacaaatggagatacacaatcacggataatgagtaggtactttcggatttgattattctagcaagaataattatgcatctcaatggactttaacaacaccagagaaaactttgcatgtatttaccaaatatttatttagctagtatatcccataattgttgtgaaattgagaatttgaattttcaaagaatatactatatacaaatataagttagtgtagagcttagatgtttactgaacttgtaagaaacacatccaaactctagaaagatatatcgatgtacaactaaaatatgcaaaaaaaaatgaaaaacggatattgtatttggagctgagcatttgagacacttgagttgccaattgcttcttctcaagccatgcttgttatatagttgcattcttaagccatttttagttatatattaagtcataaattgtactttaatgtggtgatcaaaatattgtaacttatgagatataaagggtcataaatttttggatcaaagtactcctaaatagtgtttaataccttattacggttaagcagctaagaaaatgttaagagtatgcattaatggtaatctataatagtaaatataataattttttattatcaaaaacatataaatagtgataactttgtactctaaaacataatatcatgtcaaaattttaaagatttgattttgtaattagttaagggagttgcaattatggtagaaaaaaattcattttaaaattgtagtttaatatgtagtaatttcatagtttaatgactatttttctaaatataagatatatctattaataaattattttagtcaaattataattaatgataagtacacgtatcatcaaagtagagtgtcaaatatcgcattggtaggcaaagttagaaaaaactttctcttattatagaagatttttatctaaccagacttcttgtaaatccttcttatgggtcacaaacgcacaatcaaatgcggaaacataaaatattcacttgctttaacaactactagctgtaaaccaaacttaacaaagaggtaagcgaaacatttcactataattagtaggatcaatatgaaagaaaaactttttctatatttaatctaaatttagctaaaagagtttccatatgatagtcatcataatatttcacgataatgtcaatatagaatatacaatatttctaccaatataaattagaaaaacgagaatggacagaaacgttaggagatttcagtacacgtcagtgattaatccaacgtatgtacaaattcgatcatttagaatatgattatcttccctttttttctttagtttcatatataacttgaaacaaacaaattaattttcattgagaatgcttcactgctcgctcttctcttctttaatttcatagtcacaacaagttgatcaaaatattaatatttaacagaaaaaattaatccacattgagactatttctctactcctttttctttaattccataatcacaacaagttggaaaaaatcaatccaaataagtgtttttgtcaaaagaccaattcaatattgattcattcatatactaacctcgtgcgatcgagagctaaagctaattgcaataaatctctttgtaatttaagtaatccttaaaaaaaaactatacaaaatgcctcttaccgagattatcgcaggggctgctcttggacttgctctccaaatccttcacgaggccatccaaagagcaaaagatagatccttaaccacaagttgtatcttggaccgtctcgattctacaatcttgaggatcactccactgatggctaaggtcgaaaagctcaacaaagaatccgatgaatctctgaggaaagtcttcgaagatcttaaacatcttctcgagaaagccgtggttcttgtcgaagcttatgcggagctcaaacgcagaaacttacttggaaaatataggtttgtgaatcttttggtctcgtatatatatacatgaaataatgattttttttttaatcttagatacatgaatacttctacatattacttgatctcccaacattatatagacaccaattaaacaaaaacctatcatttttttttgtttcatgtatgtatttaattacatactaaagtgtactgttgttttaggtacaagagaagaatcaaagagttagaaggttcattgaaatggatggtagatgttgacgttaaagtcaatcaatgggcagatatcaaagatcttatggccaagatgtctgaaatgaacactaaacttgaaaaaatcatgggtcaaccaatagattgtattatatctgaagataatactaatatggacatagtcgaaagagttgatccatcattggaagcaaaagctggatgctcaaatagcgattctaagccgaagatcgatatccaccttcgatggagcaagcaaagcaaagatcacggaattcgcttcgttttgaattagttttttttttgatgtggtatgtgtcatagaccagcaaaattgagaaagaaaataatcaaatgtaaaaaaaaaaaaaaaattatacttacgaatattgtgttatcaacttatcatacatataacgcctgcttgtataaacaaaaaagaagattggttccaactaatatgtaaattaagatttttggatttttttaatgcaaatgtacaagtcaacatttaatcctactgttaaagtcaatcattgagattgattctcccttcttcgtaatttaaaaatcacaacaacttgcatatagatccaattatctcctttcacctagaaagaaagagagtcgactaattctaagtctttaagtcaacgtctcttgtcttcatatagttcatcaaaaacaaaacgttttgttaaacaaaagattcttcaatggtttcatgtatatagattgctccatacaatcacgttgagagctaaagagctaatctcttgacccaaagaaaa

SEQ ID NO: 14886 - DNA, 3000 bp, Unknown
  misc_feature (1)..( 3000): cDNA_ID_2731112_gDNA_ID_2684232_Annot_ID_137637 3000 nt of promoter + ATG
aatttattcttcccttcttttaatgagaaggcacaaaattaaataaagagtaaaagtctattcaaaattcttggatcttgttacaattttgtttcttctctttattttcttctatatttctatgctataagtgatctgtttatcaaagaaacaaactataggttcataggatgttaagttcgatcgtgccactaatttagtcaccttgagtatatgatttactcacgtattacacacaaccttggcttaggattgtttttaattgctatcacaaatttagtcgattaatttcaaaactgacgttatattattaggatcactttagtaccgacgttaaagtatttcaaaactgacgtcaaaaatgtttttttttttttttttttttgtagtggatagattttatcaaccacaactttcccaacttttatacaagtttacatatcaaaaatactatatttatctacatttattcctaaataaaatcaaaatattttattcttttgccacacacttacaagatatcatggatgcaaacattatttttctgcatttatcgtatatagatgatagttaataacacagtcacaaactgaaactgaaacctctaacattgaaatattaaatatggatttatagatagtattttgacaaccaatgagttttctcttatcaatggtgttcgaatgcatgatcttgaaaatttactatttttaggtgatcatgtgaagggtttcggtttgatgagctattcaaaaaaacgaaaatatattcaaactgattacaataaaatagggaacataaaaatttcatcaacacataaaaatcttatagagagggatacataatgaatatgtttaccactatacgtgtgcatgcatttgaagtatcaataatacgaatatataagtgggtaaaaaatgatagctagctgcaaattttgaattggcttctcaatgtgtcggacgcaacaagcaacaatttaacaagtttcatattcatcatcatacgaattataaaaatacaacataatcattagtttcattcagtctcacgttgtattgcttttagtttacattaaattaattacactaaacctcaaattaaacatttgaatgaatcttttgcgcctgtaacgtaggctaagattgttttaaattgtcaaaaccgtgcaagtagcagttatttgttgtgtttaatctcacgtgagagaagttaacgtcgtttgaccaataaccattaacgaattgaattactgacgtgtcgtagtggaacttgaaaaaaaaaaaaaaatagtgatataatgacgtttttacccttgaagtgaacatagagaaggcacagctttatttgtcgaggaagcatcgaaagagagtccccaccacaaatccaaatggcaatagcgttaattaaggaaggaacaaacctacttctttactatttacactatttatttctccattatttaatttattagtaagtattaattatttatctagctggaccaccagactcttttatgggtcccacctttacccaccacgaacatcttacgtcgacctccgattattattacatcacattttctctatacttctctcttgaaacctaaaaccaatagtagagaacaaaatagtttgaatttctgtgacatgttccaagttttattgcttctgttctgtgtatatacaagttaatacgaatatcaaagttatagtcttcagagatcgcaattgataaatttgttgttatctattgttaatagtggggtaatcatgtatattattatatggaccataatgttataaggcaatattaataccgtcggacctgagagtgtccataccatttaagtttgcttttttaaacgatatcagcagaataacttgaaacttataatttagggtcccgatcatttattggttttaattagtgtcatcgtttacatttccatataaatttttttgcattggttatagatttgtaattgataagaaaccggtatcaaactatcaactaaataaaatttgaactcgttagaaactgctgaaaataacaacttctattatgttgcgatgttttatgtcctagaacaatgtaaaatacagaattaaaaattgaaaaccctacttcgcttgaataaaaatcacaaaaaaaaattataaagaaaagtaaatagtctaacaaatggaaaaaaaaaacaaaacgctagattccaattaaaatccataatatgaaattatgattggttaacttaatattagtggccttaccaaacaaaaaaaaagatgacctgaaatgaaatctaatgcacattcaagagttggcaggattataaatgcatctgtatatgtataataatacaataccctgtcaatgtctattaaattgttccaattaatttctcctcccaaaaataacttatccaaataaacaactataatcaatgaagttagttagcctttattttcatgatgattgtgataataccaaaattcttatcttcataccaaagtacacaaaataattcacactctatagtctatagtataaatttggcaaaatttcaccgaattctcctattttctagcttcggctttgtctttttatatacacgtattaactatagtcaccaataaaaaattaattaagttaaactgattaggaaaaaacactagttaattgtgtaattagtagttttgttcaatgttgttaattaaaaagcgaacgtatcgtcgtttctctttttaactcattctctttggatccaaatctttcgctttggaattcgccattgacaaagtactcaattccaaaacaaagaataagcaaacaacaacaattttcacttccttcaaaaattataaaaatccagtttttatctttgcaagattcaaaagtttgaatttttacttgttttgatttctgggttttgtttgttttttgatttcggtaatgatacaattgagattttgatttcgtgtgatgttgagagattcttaa

SEQ ID NO: 14887 - DNA, 3000 bp, Unknown
  misc_feature (1)..( 3000): cDNA_ID_2731096_gDNA_ID_2684232_Annot_ID_137643 3000 nt of promoter + ATG
aagaaaatttatcaactgaaataaaaataacgagtaaaaagaaaaagaaacattcaaatcgtaatcccattagtcttcttaatagtttccccgaatatccaacaagaagatccaactcttttgaatgaagatttttttttatatgtttaaaggttaattcaaattataatttgtaaaccgaaataacagaaagaaattaaagattgcatcaagatcgatatgaatcatatgatacaacagtttgctttcctaactatcttttcaagtccaaaaatctaattctttatacgaggtcacataaattgaatgttaattagatgggatataattcttcatcccatttactgttacatttcatagctcaaaaaaattaaaaaggaaacaaaagaggtgatttttgcaatgtaataagaaaaatttcaaataaattatatagtaactaactaaaaaatcacgaagaaaaaggaaaagaaacattcaaatcgttatatgtttcttcttgttaattagagatcacacatttctgaatgtagaattttcaaatattataaattaaaaaacgatgtaacaaaaagaatgattgcatcgaaatagacatgatatatacttccctaacgatcttttcaagtccaaacacaatatcttttgcaaataatgcgatttaacttttggtatttgatattttctttattcatttgcgaacataaaacaagcaacaaagagaatgaagagataattattcattgattaaaccttaacaaaagatccgttcatcagatatgaacggcaacaaatatcgcatgactaaacgaaccaaaacgaaaaacaaataatcaaagaaaaaaaccctaattaatcaagaacaaacaaagaagaagagaaactagcaggtgacatggcaagtgtaacgaacaagaggaacaaagaaagggtcgttgaagaatccccaagcgacgtcgtcacattcacttttcatgttgacaacaaggttgcaacaatagtcactaacttgaaacaacctcgtgtagaaactgacttccatctgcatccgacacatcccaacaggtcccatgtttatcatacatctctcgatgtgttcccatggattctgttgatgatgaggtggatttgatggagatgatgagtgatgacttggtggcggaggtggagacttcttgggtgttggaggtggaagagacggtgttgaaggagacttcttgggcgctggaggtggaagagacggtgttggaggcggagatggagacttcttgggcgttggatggggaacaaacggtgttaatgaaggcggagatggagacttctttggcgttggcggtgggggagactttttaggagctggaggaggaggagacggtgttgatggagttgacggaatcggcgttgatggagaaatagaaatggcaggagcagatccgttgctataagtacatttccagactttggaatctccatagccgaaactatggccagtgttcaaaagcatcagttcgtttctagtgatttcagacgggtttggccatccttcgatttttggccagtattttccgacggttgtggtcggaaaagccacaagacaaagaaaagctgccgctacaagcacgatggaggttttcattcttaaagggaagatttgtgagtgtatacaaagaaatggactaactcgttctttatatatagaaggatttaacttcttttttttggttggttacaaatatatcaaagatctttttaacaaccaaaaaaatatgaaaaaatccatatctcgtaactattattttttaaaatttaaactgttgtaaatattatctcttggaaactcgaaaagaatatatttttttattttttttatctaacaactttctttcaaaactcaaaacatatccttgtttacaaatgggattaaaaagtatggacaaaaatgtataaacaccacggggtcatgggcgtaggcagtgtgtaattagggggtcaattgacccctatgaattttaaaatttctactatattttattaagagtaattataatgaccccaatgcattatagtttttgatccccatatcaaactaattcaactaaaacgacaaaaaagccaaataagtttggttcattagaattttaaaccaaattgtaatgtaataaaattaaaaatccttgacttatttaaacttaagttcaactaatgatctaatgttataattatatatataaaaaaaacacaatttgtttttgcttttcttagtctttgtggaccataacaaaaagttgtaattattaatttagttgattttcagatatttttctcaggtgtagattatttctaaacaaaataataataaattttatataatatactatttttattaaaattctgatccttataacaaaattttctagctccgccactgcacgggatgttacatcgaattgaatttttggcgtagagcatctgcacaagtattctgctcacgatgtttgaaaacaaaactttggtgacttgaaacttcgcgtccatccacttatcgtagttagatagtgttgcagtcgtggtgatgatccattgttgtttttgagactaattcggttttttatatatagaaggatttaacttctgttttttgttggttaaaaatataataaagatctttttaacaaacgaataaatatgataaaattccatatctcgcaactattatctcttaaaacttaaactgttgtaaatattatttcttggaaactcgaaaatgaatattcttaacgagaaaaaaaaaacataacgaaaatatgtatattgcaattataagacttaaaaaaataaaaaatattaaatgcagattaacaaaaagaaattattagatgcagatttgtgtagatctttgaaaagacctattaaagcccatttaggcccattaaacgacaacctattaaacccatttaggcccataataacggcgtagtttcagaattagacagtgaggca

SEQ ID NO: 14888 - DNA, 3000 bp, Unknown
  misc_feature (1)..( 3000): cDNA_ID_3037080_gDNA_ID_2684232_Annot_ID_192310 3000 nt of promoter + ATG
catacacataataataaagtacaattgtccatgttatacttatatatatacatagaggaaaactttaaaatattgcaaaagcagcctccattatcacccaccaaattagttcttttcttacacaccaaattagttttactagtttatttcatcgttttgttttagaggatagaaaatgtattagttttcttgttctacaaagaagaaaaagagaagaactttgtttatttgatattgtcctgtacttatttgtttgaatattcctaacaaacgaaaaggattttgagttggtaccacatggttcaagtctttgaacatttgagtgggatccaacgtggctctcatcgatgtaggaatcaaatggtgcgagtcattttggtcgacacttggaagtttggtgatctcgtagatttgtcttattaagttgcgatcttagttaattggctaacatagttttcatttttgctaattgtcatggtcttttctatacaaaatttgtctcaaaagtgaaaaatttcaaaaaaattgttgggtttgttgagccatgtcaagtgttttgtaatttttttgcattgctgattttatcccgcataagatttgtaattttgtgagctgaacaaaaaaatgtgtttgcttttgacccaatgaaatgattatttaggcccagtaaaactaggctacaagaataaaattgtagattctaactgttggacccataaaatcaacgaagcaggcccaataagctgatatttgaaaaaacccatgtcaatttcttgattcgaacggaagttacaagctcattttgtatattaaaaataaaagcccaatactctatcacggaattttatctttatttttgaaaaaatttcattctgagaaaaaacatatacatatataattcgaaactatattccgagattatatatggtcatcagtctctccagagaaaatgtaattttagtatcatgatatttttcgtcaattttggacattttagaagaaaagcacaacatgcaaatgattttgttttgttttgtgcaatacaatatgcaaatgaaagtaaaaaagaaaaatttgaagttcacttaagaagtttgtttttctgtaattatgtattattctgaagagaacataatgataatgtccaagaaaaaaaagaaaaaaaaaaagattccaggcagagtagataagccagtcgttagaagtcaaatcaaattttcataatttatcaactctatatattttcttatatagcaagtcgaatcatatttttgtcgttatgccttgtaacaaacacatacaacataattgaatgatgagagacatatgtacaaaccaatgatactttaaaaataaatgaaatatgtgaggaagaaaaagagacacgatgtctaacaaggagacaatctatacaagctattaatctgcaaagtataagaacaagacggctaaaaacgttagaaaacaaaatggtaagagctttcagcaatgaaaaaaatggtaaaatattaagaaattgtcttttttttttttcataaacccgatcatagatccggtcagccgtagtaaaaacttaacgaagtgcttcagactggagttttctttaaaggttccgattaatgtcactagaccataactctacgggtgattaagaaaaaactaaaacatgtaaaagagaatgataagataaaaagttttatatattatattgtttttgttcgggtttagtgtggttgtaagatggtgatcaatcacaattgtcattttagaagaacaagaagattggacacgtggcagaaaataaagaacccataattaagtgtccacgtggtaacccctaatagacaacgatggaccatgaagaaaggcacacacgttaagatcacttcgactcgaagttcatttactctacccatcctaacattacgacaccatttcgttgtcctttcttctccttcccagttcccactattccactaaccaccaaaaatgcattttcctctttacttctttatcaatttattctttcttatacataatttaactatctgtttttgtgtttgtgtttgcttcatgttggtttacgcttgtgcggttcatgtttgtgatttctttataattattgtccgagtaggatttttatgttcttcgctcaaaccgctagaccgatgatcttaaattaaagaaaaaggaatagatatatcttatataatatgacaaagttttttctaacttttcctaagctaagtgatgttatatatgatagttcgaaattgtatcccataagctaagtgctcaacattttactggagttcggttataattaaattttgcatcaggcaaaaccatcgatcgatgtatgtacgaagagtcttcatgtttgatattttattctgatgtcactctcctattcattcgttttaagaaaaaataaaatcagccaagcaatttcaattgttatttagatattacaattacattaccttttttacatgcatttataaatacgtatactaattaggtagacgtaaatgtgtttgatttttggggctctagctatttgcatagcttctaacatctaaataaattgtagcttgtcctcttctgcttgtgagtgagatgtctgaagctaaggagatgggccaaacccataacaaatcaagtccaactataaagcctggtcaacaaatacagaagatgacaaagatcaaaagctgtctctcatccgtacatgtacctgcaggaaacattgaaagagaaaggaagacgctcctctaaaactaattcaatcctctttcatccttatctaataaccaaaaattacatacatctgtatagtgtcgagagtgttctagatccttctccctcaatctctataaaaagaagaatgtaatctcattgtaattattattgaaaaacagagtaatattattaaaaggttcaaattttctcttctttctcatggtatcagagccattctaaactctcacaggtccaaaa

SEQ ID NO: 14889 - DNA, 3000 bp, Unknown
  misc_feature (1)..( 3000): cDNA_ID_3019558_gDNA_ID_2684232_Annot_ID_192309 3000 nt of promoter + ATG
ctaacgactggcttatctactctgcctggaatctttttttttttcttttttttcttggacattatcattatgttctcttcagaataatacataattacagaaaaacaaacttcttaagtgaacttcaaatttttcttttttactttcatttgcatattgtattgcacaaaacaaaacaaaatcatttgcatgttgtgcttttcttctaaaatgtccaaaattgacgaaaaatatcatgatactaaaattacattttctctggagagactgatgaccatatataatctcggaatatagtttcgaattatatatgtatatgttttttctcagaatgaaattttttcaaaaataaagataaaattccgtgatagagtattgggcttttatttttaatatacaaaatgagcttgtaacttccgttcgaatcaagaaattgacatgggttttttcaaatatcagcttattgggcctgcttcgttgattttatgggtccaacagttagaatctacaattttattcttgtagcctagttttactgggcctaaataatcatttcattgggtcaaaagcaaacacatttttttgttcagctcacaaaattacaaatcttatgcgggataaaatcagcaatgcaaaaaaattacaaaacacttgacatggctcaacaaacccaacaatttttttgaaatttttcacttttgagacaaattttgtatagaaaagaccatgacaattagcaaaaatgaaaactatgttagccaattaactaagatcgcaacttaataagacaaatctacgagatcaccaaacttccaagtgtcgaccaaaatgactcgcaccatttgattcctacatcgatgagagccacgttggatcccactcaaatgttcaaagacttgaaccatgtggtaccaactcaaaatccttttcgtttgttaggaatattcaaacaaataagtacaggacaatatcaaataaacaaagttcttctctttttcttctttgtagaacaagaaaactaatacattttctatcctctaaaacaaaacgatgaaataaactagtaaaactaatttggtgtgtaagaaaagaactaatttggtgggtgataatggaggctgcttttgcaatattttaaagttttcctctatgtatatatataagtataacatggacaattgtactttattattatgtgtatgatgatgctatgcaaattatatagcatgcctaagcctaaataatgataattttttcatgcctaacaataacaatgatatattacatgataactatgtagagagtagagactagagatgtaacctgaactttatatggctttataactcacatgaaaaagttaggtatattaagtatgttttagggttaaattttgatatagatttactatttaccatgtatcatgtatgtttgcaataaatatggacgcatggaatcacactagccctcaggctaaaataaataggattgctcaaataaggcgctatcatcaatggacgaccgtctcaaactgcgacaaacctggttatacactattttgtattaacaaagcttatactccgattacgttttttagtcgttactattacatgttatctcgtaaagaccaaataaacactattgattcggtttgataagccgaccagttataagttgtaacgtacggtgtcggcagctcgaactcttatgtgtcattgtgtttctaaacgtttttttttggtcatatatgcgtttgtatttttagtggttaattatatgaaaaatgtattatcttttatatatataataatataacaaaaagattgaatattctgtgtgtgtttaggatctttaaaagaaattttttatatggcaactattctttttactatgtattttgattaacactttcaaactaacaacattattaatcaattaaaatcgtacgcgagaaacttcaaaagtctctttccttctcatcccgcttcagaaatttaagtctgtttgccaacaagattcgttcaatgaataaatatattagatcaatcataaactaaatgatcaaatatagataaattagataaatatagttagatgaaaagggacataataacttccgctaaaacaaggttagtaaataaagacaacctaatgattcgtatcaatatgtagtatattataaaagactttaatcaaatttaatacagtaactcagcatggaagaatcatttttcattattattcttagtgtaaagtatcactactattaatgtaaagctgtaaacaagagaccaacaactattcattttaagtttagagtaattacgaagcaaaaactatatatactaaacgatattattcaaaaacaaaactatatattaaacaagaaataaagtcaaaagtgtaacgtttcagaacggacggtcacgcgtgacacagtggctctctcttttaattgatattgtgtctccactttaatttaaatttcattcataaaataaatttgaaataatcaaattcataattaacctttttaactaatttatagtcaacttctaagtttctacttaaacatattaataagggaacttacgtaatgacaccaaatgagaaatagtatcaacaagtcaatttattaaaaagcttttaataatttcctaatctgaacacttttgtatcttgaatttgtggataaaattagccaaattttgtaaattaggtttgtagtaattaattactgagattaagtagcgaagaagaagaaaaaaaggacagtccccatgttttaatgacaatggctctactttccacgtttataatattacaaaatctttcttttgctcagaacacaacttgctttgaactcttttaccttcttcttcttctttagattctctgtagcttgaagtggattcatgaatctgtaatctcgtctctgtatctaaaaagcttctgcttttaacattatctctgtttcataagcttctagaagcttcaatg

SEQ ID NO: 14890 - DNA, 3000 bp, Unknown
  misc_feature (1)..( 3000): cDNA_ID_3019569_gDNA_ID_2684232_Annot_ID_192306 3000 nt of promoter + ATG
taagaaaaatttcaaataaattatatagtaactaactaaaaaatcacgaagaaaaaggaaaagaaacattcaaatcgttatatgtttcttcttgttaattagagatcacacatttctgaatgtagaattttcaaatattataaattaaaaaacgatgtaacaaaaagaatgattgcatcgaaatagacatgatatatacttccctaacgatcttttcaagtccaaacacaatatcttttgcaaataatgcgatttaacttttggtatttgatattttctttattcatttgcgaacataaaacaagcaacaaagagaatgaagagataattattcattgattaaaccttaacaaaagatccgttcatcagatatgaacggcaacaaatatcgcatgactaaacgaaccaaaacgaaaaacaaataatcaaagaaaaaaaccctaattaatcaagaacaaacaaagaagaagagaaactagcaggtgacatggcaagtgtaacgaacaagaggaacaaagaaagggtcgttgaagaatccccaagcgacgtcgtcacattcacttttcatgttgacaacaaggttgcaacaatagtcactaacttgaaacaacctcgtgtagaaactgacttccatctgcatccgacacatcccaacaggtcccatgtttatcatacatctctcgatgtgttcccatggattctgttgatgatgaggtggatttgatggagatgatgagtgatgacttggtggcggaggtggagacttcttgggtgttggaggtggaagagacggtgttgaaggagacttcttgggcgctggaggtggaagagacggtgttggaggcggagatggagacttcttgggcgttggatggggaacaaacggtgttaatgaaggcggagatggagacttctttggcgttggcggtgggggagactttttaggagctggaggaggaggagacggtgttgatggagttgacggaatcggcgttgatggagaaatagaaatggcaggagcagatccgttgctataagtacatttccagactttggaatctccatagccgaaactatggccagtgttcaaaagcatcagttcgtttctagtgatttcagacgggtttggccatccttcgatttttggccagtattttccgacggttgtggtcggaaaagccacaagacaaagaaaagctgccgctacaagcacgatggaggttttcattcttaaagggaagatttgtgagtgtatacaaagaaatggactaactcgttctttatatatagaaggatttaacttcttttttttggttggttacaaatatatcaaagatctttttaacaaccaaaaaaatatgaaaaaatccatatctcgtaactattattttttaaaatttaaactgttgtaaatattatctcttggaaactcgaaaagaatatatttttttattttttttatctaacaactttctttcaaaactcaaaacatatccttgtttacaaatgggattaaaaagtatggacaaaaatgtataaacaccacggggtcatgggcgtaggcagtgtgtaattagggggtcaattgacccctatgaattttaaaatttctactatattttattaagagtaattataatgaccccaatgcattatagtttttgatccccatatcaaactaattcaactaaaacgacaaaaaagccaaataagtttggttcattagaattttaaaccaaattgtaatgtaataaaattaaaaatccttgacttatttaaacttaagttcaactaatgatctaatgttataattatatatataaaaaaaacacaatttgtttttgcttttcttagtctttgtggaccataacaaaaagttgtaattattaatttagttgattttcagatatttttctcaggtgtagattatttctaaacaaaataataataaattttatataatatactatttttattaaaattctgatccttataacaaaattttctagctccgccactgcacgggatgttacatcgaattgaatttttggcgtagagcatctgcacaagtattctgctcacgatgtttgaaaacaaaactttggtgacttgaaacttcgcgtccatccacttatcgtagttagatagtgttgcagtcgtggtgatgatccattgttgtttttgagactaattcggttttttatatatagaaggatttaacttctgttttttgttggttaaaaatataataaagatctttttaacaaacgaataaatatgataaaattccatatctcgcaactattatctcttaaaacttaaactgttgtaaatattatttcttggaaactcgaaaatgaatattcttaacgagaaaaaaaaaacataacgaaaatatgtatattgcaattataagacttaaaaaaataaaaaatattaaatgcagattaacaaaaagaaattattagatgcagatttgtgtagatctttgaaaagacctattaaagcccatttaggcccattaaacgacaacctattaaacccatttaggcccataataacggcgtagtttcagaattagacagtgaggcaatggagcataaagtaacacccgaaagatccgacccggagaagagagatccggacaacccgacccaaatatttgacatttttggttcgatgttcttcttcttcctctattgatttttctgatcttcccgttcgatctcactctgtttcccaaaaaccttcgtgtaccttcgtattctctgcattggatttgaagcaaattgatgaactagtaatctcacacggatctaagagcaggtaaaaccaaaaatgaacactacaaagctatcaacgaattttccatttttttttgaaattttattttctttcgaagatcagatcagtaatcttattatcagcttctctcgttctcttgatcgatctgaatcgaaattgtgacaatgatcagccgtattttgtctttcagaagtt

SEQ ID NO: 14891 - DNA, 3000 bp, Unknown; identical to SEQ ID NO: 14886
  misc_feature (1)..( 3000): cDNA_ID_2731112_gDNA_ID_2684232_Annot_ID_192299 3000 nt of promoter + ATG

SEQ ID NO: 14892 - DNA, 3000 bp, Unknown; identical to SEQ ID NO: 14885
  misc_feature (1)..( 3000): cDNA_ID_2731133_gDNA_ID_2684232_Annot_ID_192292 3000 nt of promoter + ATG

SEQ ID NO: 14893 - DNA, 3000 bp, Unknown; identical to SEQ ID NO: 14884
  misc_feature (1)..( 3000): cDNA_ID_2731136_gDNA_ID_2684232_Annot_ID_192291 3000 nt of promoter + ATG

SEQ ID NO: 14894 - DNA, 3000 bp, Unknown
  misc_feature (1)..( 3000): cDNA_ID_2995053_gDNA_ID_2684232_Annot_ID_137644 3000 nt of promoter + ATG
ggaatgtaagtcattttcgttgcttttagatttctgtcagctggcatgaaattgctatcccttttttttctcgcagcaattcattcttgtttgttatattttggaactgcagaacgcaagtgggttcgcaacccatcacttcaatttcttggcttcctatgttgcgtgtacttgtcactgtgtccaaggatggatctcttcaagtgtggaagacacgagtaataattaatcccaataggccttcgacacaaacaaacttctttgagcctgctggtaagcctgatatctcttatagagaaaatatattttcctccccgacttaggaataattcccatggtttggtttggagactttgattacgcattgtagcactatccttttttttttttctttgcagctatggaatcaatagacattcctaaaattctctcccaacagggtggcgaagctgtttaccctttaccacgaatcaaaactttagaagttcacccaaagctgaacttagcagctttgatttttgcagttaagaatacttcctactggcactccttccttaggtagaagtgtggcttctgtctttgacatactgggtttcttatacagaacatggtgggtaatgagaacactcaaaatcgagcagctcagactagagaaggaaggaagcagctctttgcagttttgcaaagtgctaggggatcttcaggtgaatcttgaacactaatgttattcaaacataacaattgatactcttcttaagctgtatggatgtgtctcttgagagtaaccaatcctctgttaatagtatgggttgtgggttcgaccagagtcgttcgtatcaatatccggctttctaacatgtgagatgattaacagcttctgttctaaaggaaaagctttcgtctatgggttcctctggaattttagccgagcatcaacttcaagctctgctacaggagcacaaggggtaggtggatatttctcatgcaatcactgttggaaaattgcgcaaaaaaaagttactagcatgtgctgtgaattccgtaccaaatgactcaaatttcatctgcttcatagttcactctgttacttttctacagccagagtcagctaacaatttcagatatcgcacggaaggcgttcttgtatagtgtatgactgctttaccttcttgcttagacattatgtttgttttattatttggaactattttgagcttagtcgatgaattaatccgtacagcattttatggagggtcatgccaaaactgctccaatatcaaggttaccccttattacggtcgtggatacaaaggatcaacttaaagacattcctgtttgccaggcatgtaactgttgtttagtgtttcttttctgtagtatctgatttatgcctgactgattggattatctgacagccatttcatttggagctgaatttcttcaataagccaaatagagttcttcattatcctgtgaggtccttttatatcgagggccttaacctcatggctcacaatctctgttctggaacagacaacatctacaagaagctgtacacatcggtataatctgatatcatgtgatttcgttttagtttttggtttccttttacttacagaacttttctgtttcagatccccggaaatgttgaatatcattcgaaacacattgtttacagtcgtaaaaggcacctctttctggttgtctttgagttcagtggtgctacaaatgaagttgtgctttactgggaaaatacaggttcccagctgcctaatagcaaaggaagcactgctaaaggtttgtctaatcattggattcccttgctattctttagagaacttcctatcctgcctcataacttttagttttgaaaacattaaacggtatcatactgcatccagtcatttaaatataccaggggtacaatgtatgctataaaacagtagttactaacaatcaaggaagctgaacgtttcaacgaatgatctgtttacttgatagagatgcaagcttagaattatttaagccgttcatcctttttgttttcctatgtttccaaaggcgtaaacgaacaagagaagagtaacctcaaagctatacttttttggtatgcaggttgtgatgctgcctttatcggcccaaatgacgatcaatttgcaattcttgacgaggataagacaggactgtctatgtatatcctcccaaaacttaccacaatggaagagaatgagaagaatttgttatctgaagaaaaccaaaagaaagaggcggatccttctggaattcagggtccacaacaattcatgtttgagacagaagtcgatcgtgttttttccacaccgataggtgatgttgcatcagataatctcattcttgaagttacagataatctcattcttgaagttacttatcaattggagcatgccatcgctaactgatgcctctttaaattacagagtccactctgatgtttgcttgtaatggaacccaaattgggctggcaaagttgtttcaaggctaccgtctctcagcttcagatggtcattatatttcaacacaaggtgagggacgaaagtcaatcaagttgaagaaacatgaaatagctcttcaggtatgcaacatctattataacttcgtactgtttattagtagtttggtgggaaattttccaaccaaataaacttttgatatctagtatttgattctatgaccagctcagtaaatgcagtcgttttattccttaccctttaatgtggtttacatctggccggttctctttgaaattaaaacgatcatgttcagaaaattgactcgtcatgttggtgttagcgttctattgctgtcaaaaattggttgaatcgacaattgatattcctgaaattttggtcaatcaacttttgtattacgtagagattcttagaatatgatttagatttctaaagtagttttttccatcaattgtataaagaactaattgttgtctcaaaatgtacaggttca

SEQ ID NO: 14895 - DNA, 3000 bp, Unknown
  misc_feature (1)..( 3000): cDNA_ID_2731086_gDNA_ID_2684232_Annot_ID_137646 3000 nt of promoter + ATG
caaacacatttttttgttcagctcacaaaattacaaatcttatgcgggataaaatcagcaatgcaaaaaaattacaaaacacttgacatggctcaacaaacccaacaatttttttgaaatttttcacttttgagacaaattttgtatagaaaagaccatgacaattagcaaaaatgaaaactatgttagccaattaactaagatcgcaacttaataagacaaatctacgagatcaccaaacttccaagtgtcgaccaaaatgactcgcaccatttgattcctacatcgatgagagccacgttggatcccactcaaatgttcaaagacttgaaccatgtggtaccaactcaaaatccttttcgtttgttaggaatattcaaacaaataagtacaggacaatatcaaataaacaaagttcttctctttttcttctttgtagaacaagaaaactaatacattttctatcctctaaaacaaaacgatgaaataaactagtaaaactaatttggtgtgtaagaaaagaactaatttggtgggtgataatggaggctgcttttgcaatattttaaagttttcctctatgtatatatataagtataacatggacaattgtactttattattatgtgtatgatgatgctatgcaaattatatagcatgcctaagcctaaataatgataattttttcatgcctaacaataacaatgatatattacatgataactatgtagagagtagagactagagatgtaacctgaactttatatggctttataactcacatgaaaaagttaggtatattaagtatgttttagggttaaattttgatatagatttactatttaccatgtatcatgtatgtttgcaataaatatggacgcatggaatcacactagccctcaggctaaaataaataggattgctcaaataaggcgctatcatcaatggacgaccgtctcaaactgcgacaaacctggttatacactattttgtattaacaaagcttatactccgattacgttttttagtcgttactattacatgttatctcgtaaagaccaaataaacactattgattcggtttgataagccgaccagttataagttgtaacgtacggtgtcggcagctcgaactcttatgtgtcattgtgtttctaaacgtttttttttggtcatatatgcgtttgtatttttagtggttaattatatgaaaaatgtattatcttttatatatataataatataacaaaaagattgaatattctgtgtgtgtttaggatctttaaaagaaattttttatatggcaactattctttttactatgtattttgattaacactttcaaactaacaacattattaatcaattaaaatcgtacgcgagaaacttcaaaagtctctttccttctcatcccgcttcagaaatttaagtctgtttgccaacaagattcgttcaatgaataaatatattagatcaatcataaactaaatgatcaaatatagataaattagataaatatagttagatgaaaagggacataataacttccgctaaaacaaggttagtaaataaagacaacctaatgattcgtatcaatatgtagtatattataaaagactttaatcaaatttaatacagtaactcagcatggaagaatcatttttcattattattcttagtgtaaagtatcactactattaatgtaaagctgtaaacaagagaccaacaactattcattttaagtttagagtaattacgaagcaaaaactatatatactaaacgatattattcaaaaacaaaactatatattaaacaagaaataaagtcaaaagtgtaacgtttcagaacggacggtcacgcgtgacacagtggctctctcttttaattgatattgtgtctccactttaatttaaatttcattcataaaataaatttgaaataatcaaattcataattaacctttttaactaatttatagtcaacttctaagtttctacttaaacatattaataagggaacttacgtaatgacaccaaatgagaaatagtatcaacaagtcaatttattaaaaagcttttaataatttcctaatctgaacacttttgtatcttgaatttgtggataaaattagccaaattttgtaaattaggtttgtagtaattaattactgagattaagtagcgaagaagaagaaaaaaaggacagtccccatgttttaatgacaatggctctactttccacgtttataatattacaaaatctttcttttgctcagaacacaacttgctttgaactcttttaccttcttcttcttctttagattctctgtagcttgaagtggattcatgaatctgtaatctcgtctctgtatctaaaaagcttctgcttttaacattatctctgtttcataagcttctagaagcttcaatggcggagtatatctgtttattcggcaaggttcttctctttctttctctctctctcgtgtctctttttgtgattaagcttctgggtatctctgcatgtatgttttatcaatggaatctaccaaaaagttctgttttttgcaaagatttcataaggaaaagtcatgatttttgagtctctctgttatttctccgttgtaaatgaatgtgattggtttagggtttagcagtagattcttgtctgctctgtgttttcatattcttgattccgacttaattttgaaccaaagtgttgtttctatttgaaacaagaaaacgaagagccaacaaaagccctagagagagcaattaaggaagaagattcacttgaaatagtttgatttagggttttaaaatcaattctctaggcaactaaagactcttgatttggttgttgtttgtaacaggacagtgcagcgattgttataaagcaaccaaagaaatcaccattattcttaaggatgattgttttagtgtttgctatggtttgtggtctctacatttgcgctgtttgcttaaaacagttaagtaatg

SEQ ID NO: 14896 - DNA, 3000 bp, Unknown
  misc_feature (1)..( 3000): cDNA_ID_2731191_gDNA_ID_2684233_Annot_ID_137649 3000 nt of promoter + ATG
ctcacattttagtttgtactaatctttaataaataacagtcattatcagttgaataacacattgtcacataatattaattggactttaacagcaacacaaacaatcaatcaaacttatatgaataagatcaagaagaagaagagacaacggacatgaattcttgatctgattccaaagcttccataaactctggaagaagacatacttccaaatctatggttcctcctccttctcttcctgcatatgctgatatcttcccatcaaacttaccgccataaccgcttctaaccgcaaccgcttttcccatcccaaactcgcattcatacatcttaaacctcggagagcttccaatgtgaaccaccatcgctcccaaaagtttttctaaatggaaaacataagatgatttcaaccagtttttgattgtctccgagaccacttcactagtgtttccaatcacagcttcatgcattttcaaagcagcccatcccaaatcattttctagtagctcaccggatgtaacggtcttggactttacagcagaaagacaattaccaagatagctcaaagacaatggtggatccaattttgttccattgttagcggcaaggctacaacgaatttcatgatcataaggtaagtttcttgctcttgtaatgcatctccacataaatgcggctaacgcttgaaaagaagaaattgttgttgttctgctttcttcattagcctttgatttcaatgatgttattgtttcagacgagaaatggaatattctctccttcaagaccggtgattcgaatcggctaatgaattcatcagagtgagtgaaaggaaggttgtacacaggaccgtaccctttaggaaaccaacgtgaaaggactggaggattcttgagaagcaagttatcggtttcttgtgcattgaaaatctccgacaaagagttgaaaaaatgccacaaggaacctccatctcccacagcgtgattcaatgaaaatccaatgaacactccatctaccaattctgttacctgaaaagattcatctctttagggtattgcatgcatagttgcgtgatatacaaacaactaagactacatagatacacaatacttcgatgtatctctaaatcaaatggcaagaagttaagtaaacctagtactatatgtgtattactatcgttcagactaaacttctaggctaagtgaattatatgattttgagattacaagaataaattaatgtaccttgactgagaagagactcatggtgtgaccatcatggctcacggctttatggtggtcaaagaaagattgaacaaccaaaggaacatagttggatccaacaatatctcttacacttagatccgatttggcatggataaatccagctccgggactgtcattacaatccacaaacacagagtaggatctcggattatcggtttttaaagtcgagagacgacccgcgagcggataaaaatggacaagggtttcagctagagaatctctaagcttttgtagccaagtctccatgaaatcttttgttttggttgcatcatcagatttgagaaagagaagaccattttggaggtaatgcatagagagcatcacaagatccaacggtgataaatggtatggctctttccatttttcagggatggttttgggtttaacaaagcattgagaaacgatttttacttccgatgaagtagaatccatataaagaacaagagtgtctctactttggttctgtttctttgtttttcttcttctcctacagcatcaatcatgagattcttatataagttttatcattttgggggttgttgtaatttttagcctttgtttaaggtaatattgcaaaatgatgtgcataatgggtgaaatacattgtattatactattttctaggatgtcttttaatagtatagataaatatatagagattttattctattcttatgaatccaattatctgccaaaattagttacttccatataaaatttgaaatctaaccatattatgcaaactatgtacgataaaatagaataaaatctttttgaaattaaattagttgataaagatattagatatggtttaatctatctgggccaaattcaggccttttattgtaggcccaacagtaagaagccttgattaattaagctaatatgaggtggcaaattcgattttaaagtggatcaagtatagtaacaaacaaaaaaaaacgatatttgtctctgacacacactcacgcgcctttcttcttcttcttcttcttcttcatctggaaatcgatatacgattctcactctctacccgcgaaaaaacactaattgattcatatcctccgtcaaggataaatctgtgtttgattcaccatatctctttcttctccctccgcgctaagctacgacgcctacaggtttctatctttccccgattcaattctattacgttgtcgtcgtcttactgtgaaattgatttggtctttatgttgtttggattcatcactaagcttttattatcttagtttctttgctgctttagaattttttagatgaattttgggtggttctgaatttcagcttattttgggaattctcttagtatactgttcatttgccagagttttcgattctaaagattgggacttgttactaaagtttttattgttcgttacctaacctaaaattttgatctctgaaaatatttctggcgatctttgcagagagatttatggcttgttctgtagcacttcgcttttttttttttttttgaatgaacactttgcttatttgtattatctgaatccactaagtttttttttccatccttgtcttgttggcagatctggctggtaaaaatcacgcagatagagactctggcccgatgctctctttacccattgatccaggctttttctgatttctctttgttcctagaaaccattaagctcctacctctttctagttgatgctcgtgttctcttcactgtctatg

SEQ ID NO: 14897 - DNA, 3000 bp, Unknown; identical to SEQ ID NO: 768
  misc_feature (1)..( 3000): cDNA_ID_2125786_gDNA_ID_2684233_Annot_ID_137650 3000 nt of promoter + ATG

SEQ ID NO: 14898 - DNA, 3000 bp, Unknown; identical to SEQ ID NO: 775
  misc_feature (1)..( 3000): cDNA_ID_2125790_gDNA_ID_2684233_Annot_ID_137651 3000 nt of promoter + ATG

SEQ ID NO: 14899 - DNA, 3000 bp, Unknown; identical to SEQ ID NO: 769
  misc_feature (1)..( 3000): cDNA_ID_2125794_gDNA_ID_2684233_Annot_ID_137652 3000 nt of promoter + ATG

SEQ ID NO: 14900 - DNA, 3000 bp, Unknown
  misc_feature (1)..( 3000): cDNA_ID_2125798_gDNA_ID_2684233_Annot_ID_137653 3000 nt of promoter + ATG
ctctagttcttcatttagttgttgtaagtgtttttatagcctaatttgatttccgtggaaagataaactgaaagaaaaatctgatttgatttagggaatgaaaacttggattcgtttgaagttagttgtagaaagtgtttctataggttattggtgctaatgattcattgcctttgcagtggtgatttttgtctctaaatgtcgagtagctcggggagtttctcgggaagcagtagctcggcgtgtagttccagaagtgattgtgagaactcgtttgatgttgaagatcttttgcagattgggactacacgcagggaggtaaacacttcattgctatgctcattataaggtagtttctgactcttagattgctgaagttgatttctgttttgttttgtgctctttgatttgttattggcagctaaggaaacaaaaggacttgctgagagaatcacagccccatagtattgaactagtcagagtagtcttcttctccttgtttaatatgagcaattcagggaaagtattttctcattctgttggttgagttttcggaccttaatcttctcttcaccgcagaggttggaacttcacacgaagtcattatctgaatctcgcttagaagacacagcaagaattcagatgatggagaaagaattattgaattgctataaggaaattggtaattttctatttaagccaaccagtcttgatttttctgaactaataataatatgtttcagcatatattaatcttcgccttgtagattacttgcgggatcaactaattttcagaagcaaggaagtgaattatctcaatgaacatctgcacgatcttgagttcaaattggctgaatcaaggaatctggaagaagaagttaactctttaagagatgagttgtgtatgtctaaatccgagcatttgttgttgttgcaagaactcgagagcaaggaaatagaactacagtgttcgtctcttacattggagaaactggaagagaccatctcgtccttaacattagagtccttgtgcgaaatagaaagcatgaagcttgatataacagcgttggagcaagcactctttgacgctatgaaaatccaagaagaaagcatccaagaaaaagatcaattaaaaggaataatcgaagagtcccagtttcagtctcaaagggcaaaagagaatgtcaagtacatcgaaaagcaaaacgaagacctgagggagaaatttactgcctctgaaaagagtatcaaagatttctttcaaagtactaaagaacggttagaaagtgaagatgaacagcctctaaatgcaatgtgcttcttcgctgaactgagccatgtgcttccagtgtctaatgaagttcggtaagctccagtttaaggctaatttattaagtcatcaaattgagttatccccgtccctaataatgttggttttgtgtctcacagcaattgttttgatgctatcatgaagaaactagaactttctcagaatgtgaatttgattgataaagtggagggtatggggaaacagatacatcagcacgaagatgttgtaaagcaactcaaagtacttttgaaaaactgaagaactctatttccttcctttgttaccattacagaatccaactagttatacctgcggttgttggtttgtgcaggaagaactgaaacaggagaaactgaaggcgaaggaagaagcagaagaccttacacaagaaatggctgaattaaggtataagatgacatgtttgcttgatgaggaacgcaatcgccgtgtgtgcatagaacaagcatcattacagagaatatccgagctagaagcacaggtactacttatgtaatgcttccttgtttttggtcgaatatgtgaaaatggaatctaatctctcttttctttcctctgttgttaagatcaagagagatgtaaaaaagcctgcttccaatgaaatgctgcctcttcctgggttatgaaaagtcttgagctttgatgtttacctttacacacatttctgagtctcatccatgggttttctgttgaaactgagtgtggaaagtgctcgagtgattgaaagacggattgcaagtttggatgttgatttgtatagaaatcaaatggtagggtagtcagaagaaatccagagacttggaagaggtttggagacgcaaacaaaagaagtttgggttaagagtttagctttagagattgatgttttctttattctgagtgtacataaaaattgcttggaacaaacattagaaataaaagtcgttctaaggtaatacataattgcattttctttgatgtcttaacaagtctctaaatatttactctgcagcaaattgaaaattgatctccaaccaattcttccataccttatgttcttttcctctttataaattgaaatctcaaacatttttcttatcaagttgctttgataaaatctgtatacattttctttttctttaacgatacctgtacttttatctaaaagaaaacaaaaataattactcttggtagattttattgataaatagtttaatacaagaaagtaaataaataggaacaaaagaaaactctttttcaacaattgtgtttttttgctaaggtttctcaccagtttcctctataacggactccaatatttgaactcgttaaagcctcttcttcctatcaacctttctctctcggaacctctcaatcctacttcaatttccaggtactaattcgtttttttctttcttctcgtaatcttccaagtcgatttaggtctactttgattgttggaaaattgatcttttaggaatcgatcgttgatcaaaagagatagcagttataaatacttgttcttgctttttttcaacttcaaagttcagtatcttctggtaaatttcgaatcaaggatcaatagcaatcttagttttggatttctgcaggagaagttgttttcttagttttggattctctgatacagtagaatttcccctgaaccttctatg

SEQ ID NO: 14901 - DNA, 3000 bp, Unknown
  misc_feature (1)..( 3000): cDNA_ID_2685712_gDNA_ID_2684233_Annot_ID_192344 3000 nt of promoter + ATG
acacaaacctgaagattacgcgaatgtgctctcgcaactaaatctgttggtgtcatgagacggttattgttcacaggaacaattgtgtctttccatggaccaatcccaattacatatggtttaatgtaatccaaatatgcgtctgatgtgatctctgcgtaagtctgcattcacattcattaccttatgtataagcaattttgacataatgagaaaggaagaaagtgaatatgtaaataccttattagtgtcttcggtaagaatagtgacatcgtcgatcaaaaacaattttggtgagtctgtcatgtttgaaatgtaaactagcgaagttgctgcaaaagactgaataaatattggctgttttaaccaatcttcagacagatatgagcctttgtatccatatttcttcaaagtttccacaaatttatcttcaaattttttaccatccgcccacttcacctgcacaagtttccaaatacaatttaacatcctctccatttgttatcatcaatgactaaaagttgaagctaagatttgatggtttgcttacttgctgattcatgaaaaccggattcttgatctctggatatatcccaaccactctaggtgcatccagtgctatcgaaatatactcgtcgaaggtaataatcgggaatttaccattgtattgttgatccctgaaaggatacctctgctttgcaccaagtgttttcagctctttgagagtaaaatcaactgttcttggaatgttcaatctcatcgtcaaaatttgaaaaaaatgaaactatatcaaaacaaatgataatggaatgtttttagttaccagtgaagaagccggtcatgttcattccttggacttcataagtcctcttacggtctgcaaactccttatggtctgcaacatcggttgtatcatcgagattaacatcgtggtgacatataagaacaccgtctttggaagacaaaatatcggtttctataaaatctgcaccctcctctatggccctctgcaatcaaaaaaaccttgtgaaaccagacaaaattagtgtaaaggtaagagacttttgtatagatccaataccatatatgcaggagcagtttcttcagggagctctccgtttgatcctctgtgtgcaaggttgtaaggacgggaagtctgaagtggtttcttggttgcatgttttgcttcgcttgggagacgatacaaaggccttgaggcacaattagcaaccaacaatgacagtaaaagcaatggtagaagatctgcaaaaattataacaaaaattgctttaaacgaagaatcaacttagacatagaaacaatggagatttgacacttacacttgaaggccatgactgaatttgagctagaaaaattcctccaacgaccacactgcatgaatccaacattatatagatagacctgcaacttatctttagaagatttagccaaaaaatcgtaacaacccaatcagcattaagaatattcctctgagaaatctagtatgccaatagaagataaactccgtgttgtttgaaagtatattcttcttctattcactaggttttagttttacattttaaatgatcgcagatatcataaggcagtgtagttttagaacgaagtgaagttgcagatccagattgtattgctatgttctagtcttttgatcctttgttaattacaaaatgtacttgcttgtcgatcatgacaagccaagtttgtaaaacaatctctggttgaatgaaattgtcgatgataaaatgcaatcacgaagcggttgtgaatggaaaattaactcttttatagcatcccaagacacaaatcagaaacgagttcacaccaattctagagaagaaaatacaagagtttgagagagtgaaaactaaagagaggctcctccattcttctcaaactcccatgatcctccattcttcttctcaaactcccatgagatccccatagctacgcatgaggacgactcctcctgcaaacataccaagtgctcgcagaagtttctgcaaccaaaaggaattcgtatgagacagatttcgatccaaatacttcaaaggcatgaactataataaaccctaaatctctaagagacccaacatccccaaattcccattcgaacatccaaatacttcaaaggcatgaacttaacttgtgattgataaaccctaaacctctaagagacccaacattcccattcgaacacacaatttcataagaagaagacacagagataagataaggtcatctgatttggcctatcgaagcataggagagaaaatcaatcctacgttaaattctgaaacccaaaacgaactcattaaattcaattcccattcgaacacacaatttcataagaaagacaaaagaatcacattgtacgctcaattgaatcaatttgtaaatcctaaaccgtaattcaaaatcgctgtacaactcattaaattcagccgaaagcccagaatctaatcatgaaacatacaagagaatcgagacttcgatattcaatagacaatcaagtcggaattaaacgaaagagagaatgtatgaaggttaccatgttcaccgcccatttttgttcatcatgaacctcggagtgccagagtgctttcatcttttcgatagagacaacgttgttcaccatcttgctgctgaaaaatcgaaacttttgatcgtcgaaaaaagaagaagctagggcttttaaaacgacgaattgggatcgggaaattttagtcggttaacttattaagggtttacgttttgtttaattaccaaactaacctttactaatatactaataaccggtaaaaagtgatgtgatttggattgatttcaaccggagaagagttaaccactcgccgaacgacacgtgttcaacacaatcctattcctcctagcaatctcaaagcttgtgtgatctacaagctcttggtttctccattgaagaaaaagctttgacaaaaccagggaaagagacagagagagata

SEQ ID NO: 14902 - DNA, 3000 bp, Unknown
  misc_feature (1)..( 3000): cDNA_ID_1020790_gDNA_ID_2684233_Annot_ID_192343 3000 nt of promoter + ATG
caaaacctgattacatcagctcataatccaataatcaaatgaatccgaacacaagaaaaaaaaaactcaaatttgataatcacctgattatttctcgtagcctccaccacgcgtatccaaatcctcctcgactgtggtggtcaagtaaaccttagggaagtccgagacgtcaaaactcttcttctcgttcatcatctgaaccacgttgtccttcgtcaatacgtatcgccggatcggtgggcggtttctgcgctgatctctgccgtggtatacgatgttgtatacggtctctggatccgaggaaggcacgattgcttcttcatcaatcgtagcggggcatcggagacgatactccgtcgcctttggaacagcttcgaggtattctgggtgagcgcaaggtccggtgatctgccatggcttcttgatgtaccgcctaaggttttgcacaagcgaggaagccgccgtcgacactgatttcgccattgttgagagaccttcgcttcgatttggggagatgaaaccaaagttcgaatcgaaatcgaaggattattaaaccggtctcatatattggattggttcaatactttaaaccgataaataacctcccagtgtactgctttggttacaaaaactcggagagaagagagacgtcacgtcgtcaatgattttgagattctgtgatgatgagattattgttaaagtaggcccaatacaaaatttgaatccattatagttgggcctaaggttttatagttacacttccagtcaaatatcgttacatatcttgtcaattatagttggcccaaaataacatattattcttttgaaatatgtgtatggattcaattttagttttgggcctacttaacaatctcatcatcacagagtttgttacacatctttggttacaccggtctgagatagtggattggtcaaacatttaaaccgagatttaacatccaagtctactagtttggttacaaaaattgagattatgtggtgatgagatttttttttttttttaacaccaaatcaattatattatattataaaaatgttacagaatacatgattcatggttttataaaagccctttataaattgaaactgacatcaagttgggtgagattttgagagtatataataaactctttggctttgtggtcttattacttatgaagtcatgggatattcatagtttcatactcatacatatgttagtaatcaaacaaacgcattaacgcatgcataaattttttaattgtgagttaacaataacaatgacatagtcctccgtgagacatagctttgcagtaatcgccttttccattcccgcatccattgtgacaccaacggttacatctctgattgtcattgtttgtgttgcactttccaaatttcgggtggttattacaacacaaggaaccaccactctctacattatatccttcaacatctgccaatatcacacaaaattgaaacagttttgcctaatatgagttcatggaattttgtaattaaagtaacaagtttgtattgaaacacaaaaataagtttgttagtgttataaacactcgagaaaatacccctagttataagagagaagacgtaccaactgagaaagtgagaacaaggatcaaagcaaaagaaaaaactttcaaactggccattgttactagtccttttagatttttataagtgtttaagtttggtttgttttcagataaaaagaaagatatatgttgttcttatttatacctaatggataccacaattttagttgatctgttgatgaaaaaaacttgtttttgctaattatactgtaacgttttgtctagtctattggaaaattcaaacccttcatgttctgttgtgacagacaacttcttcttgttgcacataacaaaaacaataagtaaacgtattgaaattcaaaacgtttctcttggattctgtatatgaaaccatttacatagatagaaaatagtgaaaatgactggttgatacaatgtagatcaaatacattataaagttttcatcttaaatgcagaaaagtctcttgctacaccgggtaaatatatttgatacaaaaaaaaaacgatcgggctaatcagatttctgcaaattggagacaaaaccagaagcagcaaaagcagcagagccaccaagaacagagagtagagccacaagaacctgaatcactacttcccaagtgtaatcttcaggaaccacatatgcaaaaaccggtccaagaaggagtaaaccgaggctcaaagtgaataacgttccaggcgtttccgggtttgtggcggcagacaaaacgccgaactcctctgctttggtcagcaatccaagacgctcgatggtcgatagagagaaacctgatttctctgctaaagacaaaagtcctgctttctcggctttggtcagaagcttgagctgctcgactcttgtcagcagtttcacctgtggagtcgctgtgctctgccaaacataacaaagagattagattttgggacatataagaagataaattttgattttcaacttttaccttctttgaggttattgttcttgttgcagcagaaggtgatggcttcttatttgccattgaatgcactgttaaagacgaacagattagtttagccgccattatctctctctgtctctttccctggttttgtcaaagctttttcttcaatggagaaaccaagagcttgtagatcacacaagctttgagattgctaggaggaataggattgtgttgaacacgtgtcgttcggcgagtggttaactcttctccggttgaaatcaatccaaatcacatcactttttaccggttattagtatattagtaaaggttagtttggtaattaaacaaaacgtaaacccttaataagttaaccgactaaaatttcccgatcccaattcgtcgttttaaaagccctagcttcttcttttttcgacgatcaaaagtttcgatttttcagcagcaagatg

SEQ ID NO: 14903 - DNA, 3000 bp, Unknown
  misc_feature (1)..( 3000): cDNA_ID_3019602_gDNA_ID_2684233_Annot_ID_192338 3000 nt of promoter + ATG
aatccgtggccgagcagttcttgaaaatacacgacgccaatttcgctagccgaccaccaaactcaggagctaaacacatggcatataactatcaagatcttgtctttgcaccttacggacaccgatggagactgttgagaaagattagttctgttcatctattttcagctaaagctctcgaagatttcaaacatgttcgacaggtaaaacaattataaacggtattctcattttctaacgctatagctcactggcctgtaatcatgtcatttcaatgttttgactttttctttatatatacataattataatttataattgggatttcaaaccctatctctcactatttcaagactagaccggattggaatttgaacttttgtaatgaatattagtatctgcacataaattttatgttaaagttgggttttcttaaagtgaatttatatattaaaaatatataaacgattgggttttactcaaatgaatttacataagagctaggtataagtgcaaatatgcaatactgtcattgtcgtggatgtataaaagtatgatctaactttgatgatgccatggaaaaattggaaagttcagatccagaggaaatattgcttgaattataaaatgtatggaccacattgtttccttaaatggaaggtctcacgagtttctcaatttcagactactgataatatatgctattatagattttattttctaattattttttttggtttaatttaattagagtaaatttttaaaaagaaatatatggttttgttaaccgtgttttaaaatttgatagagcttttagatcataatcataattttttcgtattaattgtgattatgttggacgaaaatacttaattagtattcaagaaaacttttattctaaaaacagaataaaataaattttacaggaagaggttggaacgctaacgcgggagctagtgcgtgttggcacgaaacccgtgaatttaggccagttggtgaacatgtgtgtagtcaacgctctaggacgagagatgatcggacggcgattgttcggcgccgacgccgatcataaagctgacgagtttcgatcaatggtgacggaaatgatggctctcgccggagtattcaacatcggagacttcgtgccgtcacttgattggttagatttacaaggcgtcgctggtaaaatgaaacggcttcacaagagattcgacgcttttctatcgtcgattttgaaagagcacgaaatgaacggtcaagatcaaaagcatacagatatgcttagcactttaatctcccttaaaggaactgatcttgacggtgacggaggaagcttaacggatactgagattaaagccttgctattggtcagttttttgacaattaatttccttaaaaatcgtatataatgaaagttagattgttttttttggttgtaaatacagaacatgttcacagctggaactgacacgtcagcaagtacggtggactgggctatagctgaacttatccgtcacccggatataatggttaaagcccaagaagaacttgatattgttgtgggccgtgacaggcctgttaatgaatcagacatcgctcagcttccttaccttcaggtaccgttaacccaaaccggaatttggaattgttttggttagcgagctattgttgttaatccggttttggtttaaaacaggcggttatcaaagagaatttcaggcttcatccaccaacaccactctcgttaccacacatcgcgtcagagagctgtgagatcaacggctaccatatcccgaaaggatcgactctattgacgaacatatgggccatagcccgtgacccggatcaatggtccgacccgttagcatttaaacccgagagattcttacccggtggtgaaaaatccggcgttgatgtgaaaggaagcgatttcgagctaataccgttcggagctgggaggagaatctgtgccggtttaagtttagggttacgtacgattcagtttcttacggcgacgttggttcaaggatttgattgggaattagctggaggagttacgccggagaagctgaatatggaggagagttatgggcttacactgcaaagagcggttcctttggtggtacatcctaagccaaggttggctccgaacgtttatggactcgggtcgggttaaaatttaactttgcttcttggacaaggtatatggcttgcacgaaaataaagttttaaaacagcgtagtttgatccggagttagctttatgtaagaacgtgtaacgccaaatcaagtcattattaaatattgtgagttgtttgtaacctatatataaatcttgaagaggaagatttcagaaatcttgaatatgttttaggaaaaacattgttttttttacagtagcgcaagttgaattaaaacctattccttacagaaccaaatgcattaataattctagatatttttggccaagacaatcagatttttcaatatttcatatatactaggtggaacaccaccacctgcaactctgcaacacatgttacgttacacaatcacttttggcggttttcaattatttatataaaattgtaaatgtttgtacacagtagaaaattagtaatagtgaattttgtttctccgaatatgtatagcaatatatatggcatggatcaaactagccgacatcctaacttgttcacagctttcctttttacttatctagtcgattaagcatcagaaagtatgttttaatttttaaatttgaaaaaggtgtacttacaagttcgggtgttcacacggaggagagctacaataatgaaaaagctgactcaagaagggctatagaagaaacaagagtcacggaacaagttgtcactctcaatctccagtacactagcttccataactctctctctttcttctctctctaaaagttatcagaatagaaatctctctctctcaacaagtctaacagtgccatttgtatctctgaactccaacc

SEQ ID NO: 14904 - DNA, 3000 bp, Unknown
  misc_feature (1)..( 3000): cDNA_ID_2731167_gDNA_ID_2684233_Annot_ID_192336 3000 nt of promoter + ATG
ttgttttgttttccataacgaaaagagggcccccaaaaaggtactcaaggagctgacaaaaacaataaatatgcatatatatattaatgtaattaaattgtcttaagaaaatatcaaaatagcaaggataatatatatgaattgcaggcttgcagcttcgtgtaagcaggaggctcgcagatgagtttgaaagttgagtaataggatggttaggtaaagatgaccaatgatgacagtatactaggagatggaaatatcttcatggactaataaatgtatcatgtgacatgtcaatatattaattcctattacaaattaaaagtatctctaaaaattaaaataatttgcatgtgggaagatgtggaatcaaactaatacgtcagagaaaaacaagaagaatgacttgccatatttgtcgaggtaccgtaagtaaatgggttaaaccagaacaagaaggtaaagtttggttttctttttcggttcggtttcaggttttaggcaaatcacataaattttagttttatagaaactcaaacctctggatttactgctatagacaacgactatcaatattgaacaacacggaaacaacgtcattcaatgattcaagaattcgtaattctcaaaactctgcagttcatttcaattaacttgattacgtacaaaggggaagacaaaatatcaggttaaagaaagctaccacaaaagtcaaaacacaaactaatgaggctcaagatttaccacaaagatgtcaattgtttgagcaaaactacctaccaaggagccaaaaaatgtacgtcgagatagcctttttttaggaccgacagttaccagttggttcatatgaaatttcttttagcataatcgaatatttacgaagatttttaataatatcagacgagttctttctcatatcatggagacttatatacgaagcttgatcgtcatcatcatccacgaaacgtctaagctatcatataaaccctatgtaataaccacgaaaccctatgatcctgaaccttattctcatttgacaattgaaaattgttgtttctcgatgccttttgtagacctcgaacatggttatatgtagaagaataaaacaagcactattaacaaccaattgtcggttaaactaaagttccaaatctatatcatggaaatcgaaccaagcaaatcttgtaaaaatacttttcgctcaaaataaataaacatagtgctaagatatcaaaatgtgactgtcggatacttttgcatgtaaataaatttcaccttcttatagaaaatatacaaaacgttcataaaaaaactgttgcaactaatgtcatgactcgtcactcatgaacaaacgatgttgaaaacaatatgagatatctcattatgcgtaaaccaccaaaagaatacaaagtttaagggaaactctctccatacttgatacttcaaacgctggaagatgaatgagcagccgagcaggaccgttataaacccaagaaacagaaacggttgcaattaggcttataaagcaaaatctttcggatgaaagtaattatattctacttttcagttttttttggatgaaagtagttatattctaatttatattaaaaagtatttatattatactatgataagagagtgttgacctgaaatttacagtttatcagcaacaatattcggtttattagtttccaagaaagacaaatttcccttataacaattcaaaagtatgtgataatgtggcagtaagttataaaagatgccataatcttacttaaagttagtcaaagagtatctataatttgactaggaaagtcttatgaaaagattataaaaatcggatctaccttttttaataatgtaatgaaaagattgtcatgtggaaacacatcaatacgatgctgttttaacatcttaggtggttccctagttaattaaatggtccgtcacttgccccaaaaccaactagtctaaccttctgtctttgaaagagagttctgatctacgacccatctccttcgtacccgagcctgaaatttatcttccggacccgagcctcggatttgctcctgcgtccgccgttgaaaattttcgtactcccttcgatcacttatctctctttctctcttctcctggtttcgttaattatcggattcgaaaaccctaacttattcttagaaattgaggtcggagaagaaagcttgtcaggctttccaattgttgtcgacgcgacagaacaagtgtaagtctgcatacatctctcttactcttagtagaaaccctagttttgtgtaatgtcccaataggaaaatgatgtgtgaattcccaattctttggagcgtgttggtaaaattgaagtaagataggttctcgtttgaggttgaattctaggttatggtaatgttcgtgttagccagagcttcgattttgggtgaaattgtgttgcggcaattttgatctcagagtaggttctcgagatttccgataaagtctagaaattggtcgaaattagcttatttttcagctgccatagagtgtttatagctgtgaaatgcgagagttccactgtttattttttgtataaggatcttgatgatatttactgcaaatgaatactcgagattactggattaggtgcatttgagtttgttatagtttcagaagttgagttggagtttaggctttggcttagtggaccttggatgtcaatgtacggttttcatttaaggaaacaatgctgattcagctttccttatcacctggtcggcgttgtctcgcttcgttggtctgagggttttcctgcgtgaagatttaaactttcttgtcttaaactgaatcagggttgaggatcttgtccgatgattttcatttgactcacttttgtttcctaatttgcagaaaacaacgattgttttagatcaaaggagacacaagattgaaatatttttcgtttcttttcgaggtccagatatttaaaaataatttctagaagctgaatctatg

SEQ ID NO: 14905 - DNA, 3000 bp, Unknown
  misc_feature (1)..( 3000): cDNA_ID_2731171_gDNA_ID_2684233_Annot_ID_192335 3000 nt of promoter + ATG
atcctcaaaaggtagctcccaaaggggagcaacagtcaccttcaaaatctgatagtttagttagagatggattgaatcacagggaatcagtgaaccacatgccgtattttggccaaaatgtaactcagagtttctcgactaagaatcattcagcctcggttggagcagatcatcaacaaatcagtcctcagatggccccatcctggtatagtcaatatgggacttttaagaatggactggtgcaacccgtgaatgatactgggagattcacccccttaaagataggagaacaatcgtctaatgttggaagttcagttgatggcacacactctgttcaattgtcacagcactttaaaatgcagcaaatgtcaggctccacactaggagcagagattccctcatctgagtcattgcctcatggtgcaaccgaacaacttctgaaggttaataaaccaaagaagcgcaaaaccgccacatcagaacttataccttggaataaagaagtcatgcaggggcaccagaggcttaagactctcgggtatgtggcattagcactaatagtccctttttttctttcaatatcctttaccgtaattaactttctacattattttcagtgaggccgaagttgattgggccagagcaaccaatcgatttgctgaaaaagtaagtttcctcattacatgttttctcacgagtctctttgtacaatcttgttaatacgttgatggcttttgttctcccaggtggaatttgagactttacttgaggatagcccaccaattaaatcaaagagaaggcttgtatatacaacacaactcatgcaacaactatgtagcccgcctccggctagggtgatatctttggttgctagctcaaattatgagtttgttgcatatactgccgcaagaggtgcactaggagatgcatgtagctccagtagtaccgacaggagtgagggcttttggccccccaacatttcaaacccgtaaggatattttcagtttatccttgaagtgttgtagattttctagagtttgtggttctctattgacacgaagagacgcactcttgtgtaggttgtctgagagaacgaaaactgaaaaaatcagtgaccaatacatctccaaagcagctgaagatttcattagtagaacacggaaactagagactgactttgcaaggtattaaccgtagctaactgattccattttggcatggccactcatctgtgctggtttgacctcattcatgaacatctctggttcttcttgcaggctagaaaatggaactacaattccagacttgagagtcgaagtccaggatctagagaagtttgcagtgatcaatcgttttgcgaaattccacccaccatctatggacaggaccttgaattcagttaggataaacccacaaagatatgttacggtagctccaatgcctcagaatattccagacagggtacaatgtctctcgctctaaccaatgatgaatccccatagaattcagtttttggccaatcttccccattcattgctttcatataatctcttgccccaaatctttcattttttttttgggtgggcacgagttagttggtcggaaccctgagatcagtgaaggcctccatttgttgaaaagccggagattttcctctaaatatgtagcattatcgtatgcatcaccataacattgtaagttaaacccatctgtaaacagtactttagtaaagaaaagttgtttagtacaaaaaccctgatggcctgatagtattacatcatcacctctggtatcctactttcggttaacaaagcgtatctgacttttgtaatgcattatattatgcatatgcccaaccctagtttatgtaaagaagataatattgaaatgcaaaacatgaattcgttgaaaaaatgtgaatccatatcttaatctgactatctaaataacaatgattcatgaattattgcaatttaatcgtatggtgaaacgtatcgatacggcgtcgtatttgtttagttataattgtcttatcactggcccacactacaacaactctcatctaaatcctccgtctctactagagagttttggatctacgagccatctgctgtggacccgaacctctcggacccgaacctggagtttcgatcactttatctctctcttcccctgatttcgttaattcttggattcagaaaaaaccctaacttgttcttagaaattgaggtcggagaagcaaatttccagttgttttacggccaaacgttatacaagtgtaagttcacatctctctttcccattgttgaaaccctatcttttttttctttaaattccccaattggtggagcctgtcggtaggattaaagtctggaacgttctcctgtgtggttgaattctaggttatggtaatgttcattttaaccagagcttcgatttggggtgaaattgtattgcagcagttttgatctcaagtaggttcacgagatttccaataaattctgtaaatttctaatatatgagcttaatttcagctggtttattgcggagaaatgggaattttagctggtattttttgttaattgatttcatttactgcaaatgagctctcgagtttactagatcaggtggatattgagtgtgatatagtttcagaagctgattggagcgtagactttgtctgagtgtttcttagacgtaggggttttagctttcttgtgaaccaatagtatctactgtttttgtttcactttgtgtgttcaactttaaatgtacagtatctgctttgcttgtttaacaggaaaatcttgagcattcggatttcggagcatcttagttggaagtagctcatgaattctcgggggaaaaaggtgttaaaaatgttcctttttgttttttttacattcgaatataagatcgaaggagagacaatattgaactcttttctgtttcttctcgaggtccagatatttataataatttatcggagctgaatctatg

SEQ ID NO: 14906 - DNA, 3000 bp, Unknown; identical to SEQ ID NO: 771
  misc_feature (1)..( 3000): cDNA_ID_1013016_gDNA_ID_2684233_Annot_ID_192333 3000 nt of promoter + ATG

SEQ ID NO: 14907 - DNA, 3000 bp, Unknown; identical to SEQ ID NO: 773
  misc_feature (1)..( 3000): cDNA_ID_2125817_gDNA_ID_2684233_Annot_ID_192332 3000 nt of promoter + ATG

SEQ ID NO: 14908 - DNA, 3000 bp, Unknown; identical to SEQ ID NO: 770
  misc_feature (1)..( 3000): cDNA_ID_2125806_gDNA_ID_2684233_Annot_ID_192329 3000 nt of promoter + ATG

SEQ ID NO: 14909 - DNA, 3000 bp, Unknown; identical to SEQ ID NO: 774
  misc_feature (1)..( 3000): cDNA_ID_2125798_gDNA_ID_2684233_Annot_ID_192326 3000 nt of promoter + ATG

SEQ ID NO: 14910 - DNA, 3000 bp, Unknown; identical to SEQ ID NO: 769
  misc_feature (1)..( 3000): cDNA_ID_2125794_gDNA_ID_2684233_Annot_ID_192325 3000 nt of promoter + ATG

SEQ ID NO: 14911 - DNA, 3000 bp, Unknown; identical to SEQ ID NO: 775
  misc_feature (1)..( 3000): cDNA_ID_2125790_gDNA_ID_2684233_Annot_ID_192324 3000 nt of promoter + ATG

SEQ ID NO: 14912 - DNA, 3000 bp, Unknown; identical to SEQ ID NO: 774
  misc_feature (1)..( 3000): cDNA_ID_2731187_gDNA_ID_2684233_Annot_ID_137654 3000 nt of promoter + ATG

SEQ ID NO: 14913 - DNA, 3000 bp, Unknown
  misc_feature (1)..( 3000): cDNA_ID_2731183_gDNA_ID_2684233_Annot_ID_137656 3000 nt of promoter + ATG
ccaaaatatatgaacaattatataggtcagttaaattcaaaacctctaggtgaaaaccttcacagctttgctttcgatataatttcaattatatgtgaggttgctaatcgtcgaagtagtggggcagtttcatttgtatccagagtcctttagttctgtttgcaacttttgtcccgtatatattactcttatcaagacttatctcggggttaaaattatttacaatttaacacggcagtttgcatttaaagtctatataaattaaaattgtataatgatagattctttaaataaattcatgaagaatggtttgaaccattcccgttgtgtatattacccttgtaaatgatatgactgctatcttgaacccatagcctataaattgttgctaactttgctaatcttaacaggggttgggtgtgatgctaaggttgcccttgagattcacaatctacgggaggagaatccagagagattttatagccaggtaaccaaatgaacattaattgataaaattttgatataacctcaggaaaactgtatttctatatttcacaatcatgatataactggcatatattgtagagaagctgtatggttaatcctttagtccatgaaactgatatttgaatggtctccatgtgcagtttatgaacaaagtcctctatgccagagaaggtgcaaggagtataatggacagaacattcgaagatttcccttggcaagttcgagttgaggtggatggtgttgacatcgaggttcctgaggtgagtcacagataccttacagatacgacccgcatgataattaatgctctaacttctctatgctaaatctctgaaggatgcggaaggaatactggttgcaaacattggaagttacatgggaggggtggatttatggcagaatgaagatgaaacatatgaaaactttgatccgcaatcgatgcacgacaagatagttgaagttgtgagtatatctgggacatggcaccttgggaaacttcaggttatatttgtactcttatgtcttatttgtatacatttgactggtaacctaaaaactaacataaattgatttttgttttgttttcacatcttcaggtcgggttgtctcgtgcgagaaggctagctcaagggtcagcagtcaagatacaactttgtgcgcctttaccagtgcaaattgatggagagccttggaatcagcaaccatgtaccttaaccatatcgcaccatggccaggttcttctctccatttccctaacttagattctggattcaaatcaagttttctactgagaaaaagttgcactagattgtaaaagtttgtggtcttctgttttttcttaactcctctaaaagctcgaaccattttttgtgaaactgtttttagttttctcacttaccttcacttgcaccaggctttcatgctaaagagagccgcggaagagccactgggtcacgcagcagctataatcacagatgttctagagaatgcagaaaccaatcaagtgataaacgcttctcagaaacgaacgctgcttcaagaaatggctctacggctaacttaaaacaggggaaaaaaaaagaaaagacagaagacaaaaccttccctcttcaacaaccaatcaatcatcactggttagttacaaatatttacaaatgcgtgtattttacatatcttgtacctctgcctaatgaagggaatgttaaaaagtcttgaagatcgaaatccgctgattgacaaagcgggttctgtgtggaagtaggaaaaaggaaccaaaaattggaatctggttcctagatttttggctgttctcatagtgaatgaaagcaaaacgtgtttaattatctctgtctttctcatattttattattatgggttccttttctatatcaaatagaattttgagaagaatcatgtatgtacatatagatgaaccatgttcttaatttgtgattattttctagaaatagtattattaggcttcttacttcctgttctttttgctgcgtgtttgttcctaatgtttaccattcataaaacttttgaaattatgggctgagttctttgatattcagtatataatacaaacgatatcaagtcaaaagacttcacattttggcttttcacatcaacttcataacttggttgactggtcggtttcgaatttgagttattagtgtttttggtttgaaatttaacgagatgggtatgagaataaaataaatggaaaagaaaaaaaaaaattagtccgaccatgctgttgcttgaggaaggggctatatatcaaaagaaacctcgttttcttgtaataaaacaagccatttttctggttaatatcatatatacgttggtttaacaacactatcattagttagaagtttagaaccaagaaaaagacgtttaacaacgaaagttttaaaaatagaaccactaaaagaaagattttgcaaacaaaatgtttaggtatgattgaaaggtaagaggttatgtaagaaacaagacaggtaatgtggtcagaagacaagtttaagtacttcaaaaatgagtctttggtaacatagatatctgaaatttccctcgatttgattagtgggatcaccaataccaagataaaatctgaagtttagttcattgactcaatagtatttgagtcttggggctcgaaatgattttgattttgatttcttaccgatcttcgagtttccaaagctaagcacttttatcaaatttagggtctttttacttttccaaattatatttttctgtttttggggacgaatttggctttctttctatataacccgcgagcgagacagagaccttgaccctcacctaaacctcaaaaaccaaattttgaccccaaaagccatctcttttagcaatcagattactttgaaactttctctgggtatctgagatttcttcattatttatataaatcatctaatcgaaatctactgcgacgatcggcgaagaatcggaaacacaaaaatg

SEQ ID NO: 14914 - DNA, 3000 bp, Unknown; identical to SEQ ID NO: 770
  misc_feature (1)..( 3000): cDNA_ID_2125806_gDNA_ID_2684233_Annot_ID_137657 3000 nt of promoter + ATG

SEQ ID NO: 14915 - DNA, 3000 bp, Unknown; identical to SEQ ID NO: 773
  misc_feature (1)..( 3000): cDNA_ID_2731179_gDNA_ID_2684233_Annot_ID_137659 3000 nt of promoter + ATG

SEQ ID NO: 14916 - DNA, 3000 bp, Unknown; identical to SEQ ID NO: 771
  misc_feature (1)..( 3000): cDNA_ID_2731175_gDNA_ID_2684233_Annot_ID_137660 3000 nt of promoter + ATG

SEQ ID NO: 14917 - DNA, 3000 bp, Unknown; identical to SEQ ID NO: 14905
  misc_feature (1)..( 3000): cDNA_ID_2731171_gDNA_ID_2684233_Annot_ID_137662 3000 nt of promoter + ATG

SEQ ID NO: 14918 - DNA, 3000 bp, Unknown; identical to SEQ ID NO: 14904
  misc_feature (1)..( 3000): cDNA_ID_2731167_gDNA_ID_2684233_Annot_ID_137663 3000 nt of promoter + ATG

SEQ ID NO: 14919 - DNA, 3000 bp, Unknown; identical to SEQ ID NO: 14903
  misc_feature (1)..( 3000): cDNA_ID_3019602_gDNA_ID_2684233_Annot_ID_137665 3000 nt of promoter + ATG

SEQ ID NO: 14920 - DNA, 3000 bp, Unknown; identical to SEQ ID NO: 768
  misc_feature (1)..( 3000): cDNA_ID_2125786_gDNA_ID_2684233_Annot_ID_192323 3000 nt of promoter + ATG

SEQ ID NO: 14921 - DNA, 3000 bp, Unknown
  misc_feature (1)..( 3000): cDNA_ID_2731156_gDNA_ID_2684233_Annot_ID_137667 3000 nt of promoter + ATG
aaattccggtaacctttggtagctcgtacggcttcttcacaaaattgccggcctatgaagatcatttccttcatttaaccctccaagctccagattatccattgctgtactcacaaagctccaaagtcttgttcttttcttctttgtttctttaattactgctcatgactatctctctgatggaaaaagtcgaagcctttttctgtgtttctctaacgggtattgattgctaagtacttcgatttccgcgtagtatggtacatagttgaagtttgagaatttgggttttgttctctgatattttaactttggtgggtagcttttatatgcttattatagcttctttcttcgaaattgaaagcttgagcctttgattctaaagcttggagtgagttcgtttggattgatgcagatgttgtcaatgagggttagtgtttatgtagttggattggagaggatccaattactcttttgattgttgaggacgaagagagaagaaatggatctatggttaatcgcagctactgctgctacaggatatataaccaagcatttgcgaaatgtatccaaaggtaaatcttcttctgaagatttgactaatgtgaagctagagtcaccgagatgcttggctagtaatgtagtaagagttaaaaaaccaaaagaagaaaactttgaggattgcttaaatggggaaactcttgatctatatgaatgtggcaatgcatatggagtggaagtagcttcgaataatgaggaggatttgggatatgatgatgagattcgttcaggttcttttgggaacagagcgtttcttaggagaaatcagtgtcctatcaagcctttttctttggagaaaagcattatgtctcggttacatagagagaaaatatccatggaggaatatatgcgtagtccgtttccatcaccttgtggttcagtttcgaggcccttgcttgttactgatggtacaaatgtaattagcaagaatactggagattctgttagccagcaagtttcggaatgcgggattcctcagcttaggaagttgaaatcttcacttctttacgctaaaaggggagttggagatgcgaagagcgtgagtagaagatctgataatgggactggtaaaattcttgctctctttttaaaatgttacatttgtttatattgacaaaggagaagacttaacatgttatctttcttttcaggatcaaatgatccagtgttagtgctatgcgttgggatttcaattgggataatgtcatcatttgtagctaaccaaaccgaactaaacaaagtcagagcagagtcaaagcagacagagaatttgggaaaagagttagaagatgacatacacgatggtgaaaaacagtgtgatgaaaagacagcagagaattcagaatctataagtaaaattgaagcagaacttgaagctgaacttgaaaggctggagatcaacatgatttcctccaacattgagacaaaactctcagatgtctttgaggtgagctttatactctagcttttgctttttcctttcctttcactgaatcattgtctcattttggtcgatcatgtctgttcattctggaagttatcccgcagcactaatgatcctgttttctccatatatgaaaattgagcaaaacagatatttgatcataagactagccattgtttaatcatctatagaagttcagcttgtaaattgtttctcaattctgcagctggagccagatttcgaagtagaatttgcgcagggtgagctgagagatgatcaggttgaaagacagcgttttgatgaaaccgtgtccaaccaggaacggagtagcaattccacacctgaatcaggaaactacatagtctcacctcgtgagttaagcttgcgtctgcttggagttatcaattcatgctatgaaaaacggataaaagaacttgagaatgccttacaagagagtcagaggaaagtggagcagctggtcatagaatcagaggaaaagaagaaaccattgtcaaggatttgggaaacccatgaagagatgaaatataagaggggctcaaatcctccagtttctgtagctcatatagagaagaaacataatcctgcagagatccaacctctggttatgactttagaaggggaagcacttgacgcattcaatgaatcttacgaggaactgatggatattaacgactattcagaagaagacgatttacaatgtgtgatgcaggagaatgagcggcaagaagaattgtctttgacgagcaaaagctcaccttggagccataaagattacataaaggattcttcaagaacttcagaggatgtgaatttgtccatgctgcaagatctacttggtctgagcgacgaagaagaagaagaagaagatgagatggagaagcatctgataaagcagattgttgagaaaacaaagcaagggtcttctgctgtgttaaatgcccagaaaatgctattcctcatggaagaaatacaaccaaatctataaaaagcatttactcaaattctcatcattttttgatgaaagtattacacgtctctagttagtgtgtgtgtagatatgcaaagattggtgtaacttatcttgtcatatgcaaagaaactgaagagagaagaagatgtgttgtcaaattcaatgtatatatcttaagaccagtgtcaaagcttaagatgtgataatctttaagaccatctccaaaactccgatggagatgctctaagtttttctggcagaaagaagagtcttttgaaacctgctggttgggtcagagagtttgagagaaggcgccaaataaaccaaaagctagacaagaagaagcggtgaagttttgaaaacgagaataaaattcggcgggaataattaacgaaaaatctaatagctcccgcgcaaatctttcttttacaaaacaaaaccattttgcttcccatttcctgtgaattctaaagagaaagaagagatagagctagagattaagatagag

SEQ ID NO: 14922 - DNA, 3000 bp, Unknown; identical to SEQ ID NO: 14902
  misc_feature (1)..( 3000): cDNA_ID_1020790_gDNA_ID_2684233_Annot_ID_137669 3000 nt of promoter + ATG

SEQ ID NO: 14923 - DNA, 3000 bp, Unknown; identical to SEQ ID NO: 14901
  misc_feature (1)..( 3000): cDNA_ID_2685712_gDNA_ID_2684233_Annot_ID_137670 3000 nt of promoter + ATG

SEQ ID NO: 14924 - DNA, 1118 bp, Unknown
  misc_feature (1)..( 1118): cDNA_ID_2731254_gDNA_ID_2684234_Annot_ID_137672 3000 nt of promoter + ATG
gaattctttgatgaacaactgatgtatgttggtcaaaaatttgagacaagaatactgataatatcatgtatgttcctcagtcctgaacatttggtcatttggatcatgtgttgtgtgttactgtgtttgacaatctgtattgttgttatggtaaataacggttgtgttgtatcacacactataacaggtttacgtttacctaaacatattaagttataattaatgggccacaggcccatattatataatgtagttgggttttgttgacttgaacggctccagtaaattaccggtctgatgattgattgacgaataaagcgaataaaccatcggttatacaatttaaccgggtttatgacaacttcagagaccttatatcagatttcaaatcttcttcttcttctccgcgacgacgacgagcttcttcgattgatgactgtaataatctttcaagtttaattgcatcgcataaagataaagcccaatcctttattcttctaaaaccctaatttagcgtttcgagaagccgcaaaattgagttttgttatttcaaaaaatcgaaacctaaaacctcaattctctgggaatttcaaattctcttttcagtgtaatcgtcgtctcttctcaattcgacctaccgagtaagtttatcttcttccatttaagttaaattttgactctttccagcatccatggtctcactgtgcttctctttccttcacctcttcattgggagctttgaatagcgttttaatctatgtttaatatagtaatgtcattgacactgtgaatgatgctgatggttgttcttgtatgtgcacatgaattgtatttctgcgtatcacttgcattactgacgttaatctagtttatcaatcaaattctaattcagtgattttattgacttgcaattctttgccaatgtattgttgaccattttctttcttgatccattcatgtgcacgtttaagaacatccttgtaaggtcatgctttgtgatttacctttcttctgttatgccttgtaagtaagtatagttttttttggtacttttgttcacaggctgtagtacgtttgctgctatcagaaagagataatcaagaagcagaaataaaatg

SEQ ID NO: 14925 - DNA, 3000 bp, Unknown; identical to SEQ ID NO: 5813
  misc_feature (1)..( 3000): cDNA_ID_2041439_gDNA_ID_2684234_Annot_ID_137673 3000 nt of promoter + ATG

SEQ ID NO: 14926 - DNA, 3000 bp, Unknown
  misc_feature (1)..( 3000): cDNA_ID_2731250_gDNA_ID_2684234_Annot_ID_137674 3000 nt of promoter + ATG
cactgattaaaaaccgtggaacagggagattgcaagcacacgattgtgattcgagacatgaggatgagtcatccagaggacgttcagaacagagcagcttacccgatcatgttctggccgaaacgtaggattcagaaatgcggtgtttgtaagataaagagagcttcaaaggttgcagtggatgacaagtgggcaagcgagaacagtagctatttctgtgatgtttgttttgagcttctacactcagaggaaggcccacttaactgtgacttcccagtgtttgattatgtgcatgagtaaagatgatcttctttgttgcataatatatagataggaagaatacgaagaaatagttggcattgcaagaagaagacatgatgagtcttgtcttggtaaatttgttgcataattggatatatataaaagattttcttgaaatgatgacatgacaactatttctgaatttagccattgtcaaaagctctcttcgttttgaagcggtagaaaattagaaatgtttatgtttagccaaattcaaaagtagaggagattccttgaatttctgttttctctcgctgtcttctcaatattcaaaactcaaattggtgtcttctccaatttagaaaacgttaaaaacaagagaaaataaaactaaactttttagaaccaaaaaaaataaaaataaaacgcatttgggatttctcattgtcatcccaagttcttggaacagccaaatactttttcattattagtttataatcgtctcataaaggcaaaaaggtttatttcggaaataagatgggagcatatagagcagaagacgattatgattacctcttcaaggtggtcttaaccggagattccggcgtcgggaaatctaatttgttatctcgtttcaccagaaatgatttcagccacgactcacgtgcaaccatcggtgtcgaattcgccacacgaagcatccaatgcgatgataagatcgtcaaggctcaaatatgggataccgccggccaagaaaggtacttacactctaaaattactctcaaaagttatttaacgtttgcatgatgaccaaataaaattttaaaaaattaggtaccgagccatcacgagcgcttattaccgaggagctgttggtgcattgcttgtttatgacgtgacgcgccacgtgacattcgagaatgttgagagatggctaaaggagcttagggaccacacggacgcaaacattgtgatcatgctcgttggcaacaaagctgatcttcgtcaccttcgagccatctcaaccgaagaagctaaagcttttgcagagagggagaatacctttttcatggagacttctgcacttgaagctgtgaatgttgataatgctttcactgaagttctcactcagatttacagagttgttagcaagaaggctcttgaagctggagatgatccaaccactgctttgcctaaaggacagatgattaatgttggaggccgagatgatatctcagccgttaaaaaacctggttgctgctctgcatagacacacttctcacttttttcttgtacttttattactaaacactaacatttttcaatattttcctgcaaatttgtatacattcttggaattatcagacaaacaaagttcacactcaaaagtttttttagtttcggttccactctttacaatcgcttgcttcgtgctctctctgcttctaccgatcgatgtacttctgaatgttcatgaagatgttccattgttgacgcgctcctttttccccatctgcaaatagaggttaaaacagcctaatcagtttatatcatatgagcgtgaaatcttaaaaattgtacttcaaaatgtttctttcaactgtgagttttgtctagtaatgaaaaagctaaagccaacatggaagcagaagaagaagaattgcagattttgagtgcaacacaaacttaggaattatccaaacatacttggtacttgagaaatggaccttccatattctgatatttcatgctaatgtactgaaaccaattgcgaaaacagaggactatggaactcatttataatatcactttgtatggattctatatatgtgagtagcaaaatgaacctaaccatgaaccgtcttcgcttttttttctgcataaagttggataatattcagctcaaagaaaactagattctgatcttaatcatctataagtaaacaaaacagagtccatacagatttcgatatcttaggatcaagcaaagagtagttcaataagaaccaaggatctacataaagttataacaatcctaaaatgtcaatggcatactagagcaaattcaacaattttcttaatatcagttacactagaacaaagacgaacttcgttccaattccctaatcctaaactctcataatcaagaacaaatatcaaaccataacaattgagttactcagtttgaaaaaaacgaatctcaccagagaaaaaacgcagatacggaatcatttttcttcatcgcgaggcttagaactcgattgaagagaaggaagaggattagagcccttgatgatccaaccgagtccgaagaaaaaacctccagctagaatcgcagttccccaagcgtgtgagtaccatttactgtattgccgaatcgcgaatttccattgctcccttaacgtcgcctgatccggattcaccgactcaggcgggttataataccttttacccgaacccgatccgatctccggcgtcggttttttcgccgacgaagaagtattgttgttgttatcagggatttggctcttctccgccattgtcgtcgtctagattcttttcttcagatgttgaaaatcattttcagaaaatgtgtatttaactctaaagccactgacacgtgcaagataatgccacgtggcagtttctcgtactaaaacgattccgtttcattgtttcgtctacctctaaccccaccttagggttttagtactctctgtgatttttatctgttcgtca

SEQ ID NO: 14927 - DNA, 3000 bp, Unknown
  misc_feature (1)..( 3000): cDNA_ID_1441974_gDNA_ID_2684234_Annot_ID_137676 3000 nt of promoter + ATG
taaaatccaaaaagtaaggtacaacaatcaattgaattagttgataaacaattgacggtttgagcggaggtgggaagatctttctttaattctttagtgtgactgtttgatgcaataaaaaaagagacatgaatggatttattttgttttgtatgtgaatgaatgaaattgtgtgtgtaggaacaaactctctcatcaaccttttatttgcaaaagcaaaacatatctacactaaaatgagcattcatggagacgtgaattaagtgttatattaatggtcattaccgaaaagatcagagccggctcaaactttttgaagaccttgtgctgatttataaaaattggctttagttaatactgtttttaattacagagactagattttaacccgcggtataccgcggaaacaatttattttttaaattaatatatataaaagtttgtaaattgtatctatttataaaatgtttttattgtatagtttacaatttttattaagtaacgtcctgccaaacccgtctcgccaacccgtcctctaaaaaagactcatttattttattaatgttgatcttatttatgatatgtttataaattattgtctaaatattttgtaattttgtagtaattaaatgctatcaaatatctatacggtttgatgattataatcatgcagaaaaaatatcaaaaatgataattttgtagtaattaaatgatattaaatattttagaaattttattttagtaattaatagtgtagttaaggtagagagattttggaaagattgttaaatgtcaaatatttaattagaatattttctttctaattatcaaaaacaattattaaatgtcaatggcagccgctgtaaataaatctcaactctaggatttatttcacaaagtggctgcaaaaatgtatatatagatttttggacctaaaatcttaagtaaaattggaataaaattgatgactctgtgctttagctcctctggcaccccctagagccggcactggatatttgtttgttgctttgactaaatcaattaaaagtttcaaaacaaatacgagctaaaaagataaactactccattaagcatccagcccattactcaaactcaaatcagaacctaacctagttgagtatggatatgctttctttctttacaacattttggtctcaagtctttgagcctagacacaaacatttctccatgttttcaatatgagacttttttccatgtgttcaatgtatgttttttcaaacaaatcaactttggacattcatttctcattcaaatgaactttaatttgaaaaattactagaaaaagtagttcaacataacttgtcaaaataaattctagcattggagtacaaatggttgtctcaaaataagaagttgaaagagtggaaatgatcattcatctttttttttttttttttttgtcatttaacatgaacaagttagaaaactcattcaatctattcaaccaaattgttttttaaaaataaataaattatacagaaaatttggtcaacctttttatctactatttcgcagatatttttttcttctaattattcatgtatatatcgaagatcaaaaatatcatattccctaatttgttgtcatagtttcttgctaagtcttttttgtcgtcaacgtatgcgcctccaaatcttgctctcatttgtgaatttcttagaagtaaaagtttactcaaatcaattttaattagaaattcttgattcttgttttttttgtacattttttgaaaatatatatcttatttgttgttgtttttaagacatcaatgcaccatgcataaaacccccaataagtctgattcacttaatctcatttcacaagattggaagaaaatattcaacaatatgaatacataacgagaaatgtgttcatttgcttgtggatgtaccaaaacttcgagaagcacgctaaattaatctagaaggtccctttatttaaatcttatatataaataagcatttgttataagttcatcatcaattatgtcaagactcactatgactacagagtgatatcctacgaaaatagggttaggaatccgtgattcggcgagattatagtaaataaattttccttgttcacccattcattagtaatgaagtatgtcggcttctatcagatgtaactcttgcaaaactttttctattgtgttgattcttcggacatgttttagaattcttttcttcatgaaaggatcctcagcgcatccagacttgtgatctctgcaatcaaacaccctaaccaattctctgggaattccatatgttttggtatggagtaaagccttttcgatcgttaatccataacagtgatgcatgttcttagtttctgcacatttttgaagctcttctaaatcactaggagggtagataccaagtgcatagtggcggataaaactttttttttcaaattgtgcaatgctagtttgttgggatgtttcttcattttcaatggtgctcgatgctctcggtcactttgacttttgtttaggtgttatctttttctcgtatccttttgctctctctttcacttgttccatttctttttgattaaactcataatatttgttgctctttgtttgttacatgtaataatctattctatatatctaagaaaaatacttacaaaaagaacattattatcacatatgcacagaaaccgccaaaattgggtcttttaaattagattaaagaaattgaacttgacaaagaagaacaaacaaaatagaggggtctattccacaaataaaataaagttgtaaaaagacgacccaaacaaaacgactcaacttctctctttcttcttcctcttcaccaatcggatccacgaaaaattcgataaacctcgattgatcccaaattcccaatggaggtttctgttctcacctaatttagctccatatccctcgcagtccgattcaagtgagattcttctaagttttttggaagaataatg

SEQ ID NO: 14928 - DNA, 3000 bp, Unknown
  misc_feature (1)..( 3000): cDNA_ID_3019687_gDNA_ID_2684234_Annot_ID_192374 3000 nt of promoter + ATG
tgccacaaaagttgctcaatctcagcaggattaacaaaaaaataccaaagaataacaactgggcagagttttccaaacttaccctttcattttctctctgtaagaatttttctcttctttctacttcacgacgctgctcacgctgtaacctttcctcttcttttattctttcacgcatcaacctctcttcttccttacgcctctcacgctcgttcctttccatctcttttctcatgcgttcttcattctgaggacacaagcatcaactcatcaatatatctgttacagtgatactaacaaaagacaataagacacctttccaaataatcagtaaggaggataataaatgtagagcaaatacctttttcctctgaatttctagcttctcaagatcttttggtccatgattctctcgggtttcactccctcttccaagtctaccatcgttaatctgtgagagtaaacatagaaaaatgacattacaacaaagacacatcttgtcaacaaaaacggatgaaataaaagttggtacaatgaagctacctttccctttctatgcacatcactactcttacgcactccatcaggtaacaaatatggatcttctgtaccaaggactgatgagtccttctccagcaggaatctatcaccatgatgcgctgattcaatggggcttggcatgtcttgttgagatgtcgaacagttacgagacgcatgtccaggggtaacataggaccttggtacaggtccattcgcgtgcataaatgatgaaattctagaacgtgcaacttcatagtccataccacgtgcatgattttcagagtatcgttcatacatattaggtgtaaaagaagacggatcatccagagattgttgctcatggaaagaacgggcagcagcatgagactataatcaacaaaagcaaatatgttaagcaaagtagtaaaaagaaaatattataaaactgtgaatacatgaatggacaagaaagagaatagaaacagcagagcggaattcatctttctaacaatgatcagagactaaaaactgccataagactaatgtcagccttcatgtaatgagaactctaaaaattactcctaccatataattcatagaccatcagtttatggtaacctcttcaactagtcaatttgagatatctaggtgcattataaagaaactaaatagagcatatctgtttagtcagaaaactaactcttcgaggtcggggatcatgtcgctcatacagatcgctctcatagggatgaagtaggtgtttctgcatcgctgaaatgccaatgaaaacaaagttagagagttacttatcacaagaagtgtaatactaacactgacattggttacacaagtcataaaacagggcaaacatagaaagtaatgtatacctataggtgttccaaacgcaccaggaggcaaaggatcaaactccatgccaagaataggtccatcatctctcaatggctcacctaactgagcctcaatacagacaatagctctatgcaccattgtcgacaaccgcgactcataactcggctttcccattgtctcatattcatccaattcagctcgagaactactactaccactagcaaaattcctcctagagttggaataaggactgcaaccagactcagaacccgaatcagatctggaatcttgctcaggtaccgatccagcagcagccggtaactcgttaaccgaagccgattgaaccgcagcaaccgatgatttcaccggtttattagactgaccatccttcttgtcctttaaccgtctatgacaaaaccacatctgtaattgtcgatctgacaaatccaatttctcagataactcagccctcgtcgcctccgacggatacttctcctctgaatcaaaaattcaacatcaatacttaaaaaaacaaagagaacgaagattgaatcaaattaattgagatgaataagaacctgaataaactttctccaaggtttcaagctgaaacggagttttcatctgacgtttaggcttgacacgaccatccttagaggaggaattattatcaatcttcttcttcttattattaagattagcatcaccaacgacgctcctgatcttctgatcttcaccgtcagaacccatctccatggaaagagaagaagaagaagaaacccagaaacggccgcaagaagaatcaaagaacacaaaaacaaaaactagggctttctattgaacaaacaaaccctgatccaaaaacgtaaaaaaataaaaataaaaagaagtagaatatataagagtaagaataagaagaagaggaagaacaaacaataataatagtaaaatcgataaaaaccaaaaaggaagaaaaacaacaacagggcttctagtagtagtagtagtagtaccactcatctcaatttcaacctccttcatattcctttctttttttttgcctttcttcttaattaaaatcttgtttttttttgttgtaaatgaaaagaaaaaaaaaatcgaaacttgaggattctacagcgaatcgcgtgcttatgtgtgtttctgccgttgatgtgtttatcaaagctttttttctttttattatataaatcaagttaatttaaaactaaattaatacaacaactcttgaagggctttaacgtgcttttggtctcgtgttcgtgttgttgtctttcagatccgcaggctggttgcatgattatcatatcccccagattttttttttgaggaaccacttgtgttgagagtaaacatcttgccctttattgttttcaagtgtacagtccttgtcgtttttaaaaccggttcaatacttcaattcagattttttaatcccggtttactcgccgtccctatgaatcacagaggaatcgaaagaacctttacgaggaagctttgactcgaaatctctctgaagaagaagaggagagacgaaactgttggcttagtttccgacgccgggaacgtcggaactccggtgaacagaga

SEQ ID NO: 14929 - DNA, 3000 bp, Unknown
  misc_feature (1)..( 3000): cDNA_ID_3019691_gDNA_ID_2684234_Annot_ID_192373 3000 nt of promoter + ATG
tggagatttcatttttaatcagatgtgattaaggatcagacaaatcaaacattgatttaaaccatctacaagctctgaaaaatatgaactgacataccatgaaaaacaccacttctctgtttgcgagagccgctgtgatctcggttctttccatctcatgctcgatgaagccttgcaactataaagaatcaaagcaaagcgcggttacagattcattcgatctaaatactggagattgtgaaatgtgattatctgaaacaaaacctggtggtgatatttggtaacagctgcccagaggctttttaactgtgacagggcttttgtgagatacggttgcacagagagaaccttctttcccttccagtgaatgtcaaatgcttcatcaactttgggcagatgttttctttggatatcgctcatgagctaaatacagatacacaaaggagaaatgagaggctatgagattattaaacgacggtttaattgtctattcctcagatttcatatcactgggagtccacagctggatttgaaatttaccttcacgaacgggcatctgctaggtgtgtgatgccttcggttattgaattctctcatcttcaagatgcaataggaacaatcatcagtgacgtgaatttataccccacttggtcacaactcacaagattcaactgcattaagcgaaagaaacttaaaggcaaaaattaaaaacctgctcaagatgttgaacctgaatccactgctccgtaacaacttctgtcatctaaaaatgataaaggaagtaggtcagtgccaaaagagcttgaagcatttggtgacagcaacaatctaaaactcattttcatacaaacatatcagaaacagacagatttcatttgctaccacatcaaagggacaaacaaaaacaagacaaggacaaaaccaaacaaaagtggggtaatttggtactacacataacaaatttagttacatagattaatagatgcttaaatacctaacaacaacaagttttatgccgatttatgttggttctctgagatccaaacatatatattcaaagtttaaaggaatctatcaaaatttttgtagaaattaaactgaagtgaacttagagatgattctgaactaccaagaatagttaataatttctgctttggatagaagattaaaggaatgggtgaagtaagaaaagccaataatcacctgttcaacttccaaagccttagctttaagtttattcttagcttctcttgctttatcctctaaaacgtgtagctcgaagttggttgttctcaaggcagcccatagaagtttcacctaccattgccaaccctgttctttagattagtggagttgaagaataagtagctccagcattggcagaacacaatttgggaaataaaccaatagaaaaaaacattttgagaactagtctaaagaatagaatagccacatgactgaacagacctcttcttctaactcgcttatcctcttttgaaccaaaggtaagccgctctgagatcaaataacaagtgttagcaatgcaactaccatgataaagtgatggcacaatatacatttcagataagaaactagctccaaacagaagaaacaaagaccctacttcaagagcagcaacataatcaaactcagtacaatcttctaagggtttataaactgattcaaatacaactagaagagggataaaacattacgagccgagtacttatcatacaaccaggcaagttttcgtatcaccaatacttagacatcctacaacaaaggtgtggcaactatacagaagtggcagctacaactataatgattaagctcaatagggcattgagttttctcaagtaaacattattcagaaagggggtatcataggagagcctcagactagcacatacgatctaatgagtgtcctaccacattcattccctcatcagcagaggaaatttttaaagccttttagctaattctacttaacataactaaatgttcaatacattctccttagagaaccaaaccaaccttgtcaatgtatgaagcagactgcaaatcaaggatctgagtttcagcaacttggatcaacttctcacgctctttcaagtaaagggtcttaccatccaacttctgtattgtcgcctcaagaacagcttctacacgatcagagccaatcgattcccagcaaacaaaacaatacaattagcaaaaagaaaaagaaaaaagagaagccttggtggttcaacccaaaaccaccacgaacaaaaagaaacaaactttacccaattgagatattctgagcttagctgagtccagatcattgatcaagttctgattagaaccgatctgctgctggacttgagaggagaaaacgaagagtggtgaaatgatgaaaaacagagcagccaaatgcagccccattctctgttcaccggagttccgacgttcccggcgtcggaaactaagccaacagtttcgtctctcctcttcttcttcagagagatttcgagtcaaagcttcctcgtaaaggttctttcgattcctctgtgattcatagggacggcgagtaaaccgggattaaaaaatctgaattgaagtattgaaccggttttaaaaacgacaaggactgtacacttgaaaacaataaagggcaagatgtttactctcaacacaagtggttcctcaaaaaaaaaatctgggggatatgataatcatgcaaccagcctgcggatctgaaagacaacaacacgaacacgagaccaaaagcacgttaaagcccttcaagagttgttgtattaatttagttttaaattaacttgatttatataataaaaagaaaaaaagctttgataaacacatcaacggcagaaacacacataagcacgcgattcgctgtagaatcctcaagtttcgattttttttttcttttcatttacaacaaaaaaaaacaagattttaattaagaagaaaggcaaaaaaaaagaaaggaatatg

SEQ ID NO: 14930 - DNA, 3000 bp, Unknown
  misc_feature (1)..( 3000): cDNA_ID_2731231_gDNA_ID_2684234_Annot_ID_192372 3000 nt of promoter + ATG
acctacaaggtcgttgagcgcaaggtctaaatcaacgagtttactgagttgacccagcgagtcagggatctgtccgactaaatgacactcagtgagccacataacctcgagattcgtcaagttcccgaactccggcgggatccgactcggactaaaggggttatacgaaagattcagcatcttcaacgtgctgatgttgccgagaaacggaggaatcgtaccgtctaagagattgtaaacaagagaaagaacctctaggttttcgaatttgccgaaactcgccggaatgtcaccggaaaagttgttaccggtcaaatctaagtgaaccaaagtcggaatatcggcaagagtttgtggaagctcaccggtgagtagattctgagagagatcgagagtttgaagactcttacaagcagcgatgttgagaggaagagtagagttgatggagttattgtacaaagagagatgagccagattagagagacgacaaatgactgaaggaaaaggtccggcgagattagcgctggagaggtctacggaagtgacggaggagaaatcaccggcgcaggaaacgccggaccaccgacaaggagaagcatcgttggagttccaggaagagagatatgagtctgggtcgtctaacgagagcttgacttgttgaagaatgaaaccgtcttggttaagagagaagacggtggggaaaagtaagaagagaaagagaagatacatgtttcttcgtcttccccggtatctatgacggtggttgaagaaagagagagagataagagagtatgaagaagagagtgtttgtgagagagtgctttgaaggaagagaagaagagagtctataaaaagcgttgaccggagacaggtgaattatcgtgactctgactgtgaatgctataaaaatcatttgtttttctactatcatttattttgtttttgttttctataacgattctctctaattatttgtttgcaattattagtatctatgtcgagtttccaacattgtataattatcctgtgtttatctgattataaaagagaatgttactaataatgatgatctagctaaatagccatatggaaggaaacattctttttttgtactttgttgtttaagagaatgcaactgtttttaaattagttatgtaggagacgataagattgtaaattttcaattaaataattttagctttataatatatatggaatttgcatacaaatttgatttcattatatatgtttttaatgtaaatgaaaagttagttagtagagtaaatgtgcattttaaaaaaattgcaaggtgaaaagaaggtacggtaaacattaattttgaaatgtagatatctgatttttttttttttttttttttggagatggaatgagatatattccgacagttttatttattatcggcgtttgtaaagtagtaaagtacaaatattgttagaacatatcaaaaaaaaaaaaaacagaatgtgttggaagtttacttggaacgtagtctaaagtcgatgtgaattaaattaattatcattcaattttaaaaagtttatgcacgtcttaaagagtattaggaatattgtatcaactattaagagaataaactagcatgcatgtagaaacatgaaaatattttattttgttgaaatgtgaaattcatttttgaagataataatatgtagttatttacaaaaaatgcaaagaaaatatggaagataggataagatatcaaaatattgagatatttatgaaattaaacattctctaatgaaatttgttatactaattagtattgcaaagggaaagagggggacaaacttgtatggttaaacgttaggaaacatattgcctaatggtgtagtcaatatgagaatgcacttctcaagcgagagtcatgagtattgcttatcttagagatgtcatagtcttaaaaaagtattcgagtcgaataagagttctttatggtttttaaattttaggttgatatgcaacaaaattggaagacgtaaaataatgtattgtgaaaaacaaactgtgtgtacactttgttcttattctcacaacttggttttcataagttgttacggctaaacgaaatcgtaaattattttgtaggatgtgaaaaagagttgcactaactgtacttgtgttcaagaattttgtttttgaggacgtgaatacattgttgaatccagttaaaaaaaattgttatctatttttgtttttattttcttacgatttggatttcatgcccgttacattatgagaattgttacgtttactatcataatctcaatcttagtttatcagttggaatttgattttattttagttaatcttaatttaacaaaataataaactcataaaagaacaacacaaattttgcctacatatatgttagttagaaaacgtatgttctaacatatgtatcggttgagaaaagcatcactttaatcaacataccatttgaatgatatttaaagagatagatgagtgaaattttggagatagattgattccaagcagtcttctcttcttcgtgtttctaatagtttctgtgaaacacacaatacaagttgtcaaaaaaaaattagggtacactaaacggagttcgacacttgtatcctataagatagacatttaagaaattacgtacactacaatagctacaaatctctgtcttatgagattgttataagcaaagtctctttcatcctacaaattgttgctagctagttgattgaaagaaaccgtcaaattagttttgtttatatttttaatttcattacttagttaatcaagtttccattacgtgtgattgatgtcctcttatagtttcataacattgtcactttggaattatttaatagaactattaatttgttacgagtattgtgtacaagcaagcaacctttgatctatattttgagagttcaagttcttatataaatggtttgaaggcattacgctcctcaatgcttattagcaaca

SEQ ID NO: 14931 - DNA, 3000 bp, Unknown
  misc_feature (1)..( 3000): cDNA_ID_2686404_gDNA_ID_2684234_Annot_ID_192371 3000 nt of promoter + ATG
aagagagatccctagcttctcaagcggcttatgaaatatttgtgccacacaaaacatttgagacaaatcagctaacttgatagaatattctgaaacttttgtcccatcattgttctctattgaaaaactacttcctaggctcatttttccgagggtgttgttaacgagtatccttgcttcttcaccgatcttaaggctttgttttttcatagccttatcgagtaattttctatgaaacctctctagctcagctgcacgaacaccacgtgtccgctctagcgcttggggtccgagtgccctggccatgatgagctttctcatgaatttccagtaatcttcacatggagctcggaaatatccaaaagaaccaaacacaatgcattcatcgattgcaacatcaccacgataagagacattaatgtcgtttgtcttgaagatatcgtaagccgttgaggcagaggatacaagaacaatggggacatggaaaatgcgaagatggagaaaaggtccgtatttggatgagattttttgaaaacacttgtggattgaagcaaagaggagaagatgaagatgaccaatgatgggaagagaaggagggcttggaggtacatcaaatccatcgtttggtttcttatagaataaaacaaagagaaagagagttgagatgaggaatatgagggtaaagatgaaacaatttagaagatcaaagctgaccattactgtcattgttgctaataagcattgaggagcgtaatgccttcaaaccatttatataagaacttgaactctcaaaatatagatcaaaggttgcttgcttgtacacaatactcgtaacaaattaatagttctattaaataattccaaagtgacaatgttatgaaactataagaggacatcaatcacacgtaatggaaacttgattaactaagtaatgaaattaaaaatataaacaaaactaatttgacggtttctttcaatcaactagctagcaacaatttgtaggatgaaagagactttgcttataacaatctcataagacagagatttgtagctattgtagtgtacgtaatttcttaaatgtctatcttataggatacaagtgtcgaactccgtttagtgtaccctaatttttttttgacaacttgtattgtgtgtttcacagaaactattagaaacacgaagaagagaagactgcttggaatcaatctatctccaaaatttcactcatctatctctttaaatatcattcaaatggtatgttgattaaagtgatgcttttctcaaccgatacatatgttagaacatacgttttctaactaacatatatgtaggcaaaatttgtgttgttcttttatgagtttattattttgttaaattaagattaactaaaataaaatcaaattccaactgataaactaagattgagattatgatagtaaacgtaacaattctcataatgtaacgggcatgaaatccaaatcgtaagaaaataaaaacaaaaatagataacaattttttttaactggattcaacaatgtattcacgtcctcaaaaacaaaattcttgaacacaagtacagttagtgcaactctttttcacatcctacaaaataatttacgatttcgtttagccgtaacaacttatgaaaaccaagttgtgagaataagaacaaagtgtacacacagtttgtttttcacaatacattattttacgtcttccaattttgttgcatatcaacctaaaatttaaaaaccataaagaactcttattcgactcgaatacttttttaagactatgacatctctaagataagcaatactcatgactctcgcttgagaagtgcattctcatattgactacaccattaggcaatatgtttcctaacgtttaaccatacaagtttgtccccctctttccctttgcaatactaattagtataacaaatttcattagagaatgtttaatttcataaatatctcaatattttgatatcttatcctatcttccatattttctttgcattttttgtaaataactacatattattatcttcaaaaatgaatttcacatttcaacaaaataaaatattttcatgtttctacatgcatgctagtttattctcttaatagttgatacaatattcctaatactctttaagacgtgcataaactttttaaaattgaatgataattaatttaattcacatcgactttagactacgttccaagtaaacttccaacacattctgttttttttttttttgatatgttctaacaatatttgtactttactactttacaaacgccgataataaataaaactgtcggaatatatctcattccatctccaaaaaaaaaaaaaaaaaaaaatcagatatctacatttcaaaattaatgtttaccgtaccttcttttcaccttgcaatttttttaaaatgcacatttactctactaactaacttttcatttacattaaaaacatatataatgaaatcaaatttgtatgcaaattccatatatattataaagctaaaattatttaattgaaaatttacaatcttatcgtctcctacataactaatttaaaaacagttgcattctcttaaacaacaaagtacaaaaaaagaatgtttccttccatatggctatttagctagatcatcattattagtaacattctcttttataatcagataaacacaggataattatacaatgttggaaactcgacatagatactaataattgcaaacaaataattagagagaatcgttatagaaaacaaaaacaaaataaatgatagtagaaaaacaaatgatttttatagcattcacagtcagagtcacgataattcacctgtctccggtcaacgctttttatagactctcttcttctcttccttcaaagcactctctcacaaacactctcttcttcatactctcttatctctctctctttcttcaaccaccgtcatagataccggggaagacgaagaaacatg

SEQ ID NO: 14932 - DNA, 3000 bp, Unknown
  misc_feature (1)..( 3000): cDNA_ID_2990990_gDNA_ID_2684234_Annot_ID_192366 3000 nt of promoter + ATG
ctatcaaaacagagcacaatgaatgctataaaattattgggtacaatctctagcaaatttcaacttgagacttttcttttatttatttctttatatacatatatatgaaacgattcaattataaaccgtaaacaacaattaccaatcaagattcttaattaaaagaaaaaaaaataattttaaattattaatttacaatcacaaccacagagccccaacttccttaagaattggaactaactcaccggagatatgagtagccataaccctatctaaccctccaaacaacctccctcctacataaaccgccggtaacttcaccgtacctccgccgccttgaactccaatattctccaactcactcaaaacttcatcttccctctcctcatcaatctcaaggaccgccggattcactccaagtccaagaagcagcctcctcaccacatgacacatgcaacatcctctccgtccaatcacaatcaccgcgttctcctccaccaccatccgaactctctcgccgtttccctgcgttttaagcgatagcggccgcagagattccccgacggttgtcgtcatgttataatttcttgcacaagaaatcgttccttgcattttcaagtatgtttttaaagatagataccaattaggaaaggaaggttttgttatatatacatgaagaaagagagatcagagaggaaagtctagcgtcaacgatggttacgtaaggatgtgcgtcacaggaagctatgggtgatggtgctgtttacgtcactggattggagtggacttagtcataggaccgtgtcgttatatcgtatcacatgtttcacgctgactttttggatcccactttattcttttaataaatctgcacgttttaattttggttcctctctactttacataatattttactgcttttttcatatcaataaaaaataggagaattctcagaatttattactattatatttgggttgtttcgaaactttcgatagatggttgtatacttagaaatattcgcatgtgacgaccacatagtggatgcttgcttctttcgatctcgaccatcaaaacggaatcaccagactatatacaacaattttggtaatctaatactaaaattgtagaaaacacaattttgttttgggattgctaaataaatacactagagatgctagagagacctagcctaaactttcgatattttccgttttatcattcaagtaattaatataacatttaggtgtaaaggttaataatatatatgacattatattcttagtgatcaaaaatctaaacataaacttttaggaaaaagacatatactactttccaaattaatgtaacacgatcatgtcatatagtaatgaccatgtttggatgaaagtggtaattatgagacgtgattaagtactcttgttgaatccttcttttaaaccaatactaagaataagtttgacattattgtcatattatttgtactcggactttccgagtagtagtggagccttattaactaataataataatacgcatgacaggaaaaaactgagaaggtcatttagaaagaaccatcgtcgaaggatggacggtggaaaagtcggtagacgtcagcaccaagccaccaactaatttggtttgttttaatggaatcatgacgtctttcttctttaaaactcatgtcacccatttcttcctaaatttggactattatatgattatgggaattgcatttctttattaaagtcacgtgtcatcctttaactttataagttcttcaggttccaaactccaaagcctttccaattttatcgttccaccaaatcctgaaatgaaagttcaacatccatcatggtcccaaaacgttaaaaatattttaaaaaatagagtgtgggggatttaaaaattcatgaccgctagtaaaatatacaaattttcaacaaaacaaattgcatgaccgctttgttggagatattatatttacagttgcctaacgtgagaagtttgcataacaaaactaatcacaaactcacaatatataccattcttctgtgcaccggaaatctataacacttaaaatcttaaatgtgtaaaccctaaaattttaccatacaatttttgaattgagaaaacaattatttgtttttggtttctaggattagtaaacaatcatttatagtagcatcggatttttcatggactatgaatcttctcaatagacagacttaggtcacgctttaaccaacaaaaactcagcaagagtggtttctttcttctataacaaatgccaaatatgcgtttcaatataaccattttctataacagttaataatcaaaattttgtaacgtagaaaatggtctttattaatactgtcgtagatttgtaataacttattgggctctgtggtctcttattgggctttataagattctccagtagcccaaaaataaactttcagcgaatctcaaagccaaccgcaggtgatgcgttttgctatgtaagagagacgaatctcacgccggaatctcttttacttcaccgtcgtttgttctccgtcgcgtcacctttcgattaattccttcacaggtaaggaagcttcttcaattttcctcttacatcaattctcctttcgcattgatccttgtcgttatcgtctctaaacgcaagctttttctccaatgtttgtgtcgatcttaaagcacatagattgataaagccgttccggttctattgaataaaattctaaccctagattagccaggatttaatcggaatttctctggatctaatagttttgtcgagtttgatcattgtgacttaggaactctaattttgcaatcgtagaatttgcgcatctccagaacaatccctgccaatgagatgaaatttcaaaattctgtttctgtaactaactttgcataagaacttgtttctatagcttaatcagctgtgttatttggtgtatagggtagcaaaattttgttgatttcgggatg

SEQ ID NO: 14933 - DNA, 3000 bp, Unknown
  misc_feature (1)..( 3000): cDNA_ID_2731247_gDNA_ID_2684234_Annot_ID_192365 3000 nt of promoter + ATG
gcaagagtggtttctttcttctataacaaatgccaaatatgcgtttcaatataaccattttctataacagttaataatcaaaattttgtaacgtagaaaatggtctttattaatactgtcgtagatttgtaataacttattgggctctgtggtctcttattgggctttataagattctccagtagcccaaaaataaactttcagcgaatctcaaagccaaccgcaggtgatgcgttttgctatgtaagagagacgaatctcacgccggaatctcttttacttcaccgtcgtttgttctccgtcgcgtcacctttcgattaattccttcacaggtaaggaagcttcttcaattttcctcttacatcaattctcctttcgcattgatccttgtcgttatcgtctctaaacgcaagctttttctccaatgtttgtgtcgatcttaaagcacatagattgataaagccgttccggttctattgaataaaattctaaccctagattagccaggatttaatcggaatttctctggatctaatagttttgtcgagtttgatcattgtgacttaggaactctaattttgcaatcgtagaatttgcgcatctccagaacaatccctgccaatgagatgaaatttcaaaattctgtttctgtaactaactttgcataagaacttgtttctatagcttaatcagctgtgttatttggtgtatagggtagcaaaattttgttgatttcgggatgtcttcagctcaagatccattctacattgttaaagaagagattcaggattctgtaagttgttcagaaattgccagagatgtttttttgtttagattttgaagtacagtgattgatggatgatgctttgttagattgataagttgcaatctacattccacaaatgggagcgtatctctcccgacatgggtgatcaagcacatgtggcgaaggagcttgttgctacttgtggaagcattgagtggcaggtactcgtatttagtcacggttctattaatctcgtctttatatataatttagctggtgtggaataggatttgtgtttgtaaatggatcttgtaggaatgtattggcccttatttacatgattagaaattccaattgaatatattcgagtcctttcatggctattgaagctgtttttactgataggaaggtagatgagctggaaaaagcgattactgttgcagcaaaagatccttcatggtatggcattgatgaagctgagcttgaaaaacggaggagatggactagtaatgctaggacacaggtatgttctctaagtttgttatgaatactgctttacatagtggcataaatttgttgttagttgacttgtgcaagacgattacgattttttttataggtgcggaatgtgaagtctggtgttttagctggaaaggttagttctggagcaggtcatgcaagtgaagtgcgtagagaactaatgagaatgccaaactcgggtgaagcaagtagatatgatcagtatggagggagagacgatgatggttttgtacagtcagaatcagataggcaaatgctgttgataaagtaaagctctctctgtgtgttctacattgttttgcagtcttttctttgcttctgagtttataacgattttagactgaagattgtagcatagtgttgttcaaaaacagagtagtgccataacttaacatcatttttttcacttcaggcaacaagacgaagaattggatgagcttagtaaaagtgtacagagaattggaggagtggggctcactatacacgacgaactcgttgcacaggttagtaatatgggaagatgatttaacagtaggacgtatcagtagagatcagaaacatcaagtttttgttattgtgtgtgttcaggagagaataatagatgaattggatacggagatggacagcacaaagaaccgtcttgaatttgttcaggtaaaccccttaaaggtcttgttgctggtttgattgcagaaagtaaaaactgaaagaatgaaaatggtattgtgacagaaaaaagtgggaatggtaatgaagaaagctggagcaaaaggtcaaatgatgatgatatgtttcttgctcgtcttgttcatcatcctattcgttcttgtcttcttgacctaaagaacagagccgcgggatcttatagatgggagtttaatgtcttacattatcatgtttgtggtgaaacaaatggaatatttacataaggttgtctgttttttcttctcctatccaatcccacatataattttgaactttggctgtgtgatctctagagaacctgaaattaaatactttcatagcttgatcccatggctaagttccttaaacaatacaaatcagtctcatcaaaagtaagccgtcaaaaacttccctatagaatacacctttattatgccttctttaagtttccgcaatgtctcctttgcttcttcagttctgtaacgaaaaaaaaattccgaaagcagactccataagaaacatctaaagacaacaaaatgactccaaaaataaagaaccggcaaaaatctaacaatttgtggcaacaaacccggctactgctcaaaagaccacccttaatagttcataattgaaggcaaatgcttcaactgatcgatcatcaacgaatccaaaggactcactcactataagcatgatctccggaagaatcattgccggatataattagttgaataactgatttattgttgaatctttctgatactatcgttaaactcttatgacaacgctttttttttttttttgtgtgcaaaatgacaacgctttagattgtaaaatgaataatgagtcattgtatcattaataagaagagatttgggctgataaggcccaacgtaagcccataaaagaatccgtcggctgggatataagggctggatcgatttcaatcgatttcaaaaaagaaaaaaacgcacaggtcagatacacacaaggaggcgcaggagaatatg

SEQ ID NO: 14934 - DNA, 3000 bp, Unknown; identical to SEQ ID NO: 14927
  misc_feature (1)..( 3000): cDNA_ID_1441974_gDNA_ID_2684234_Annot_ID_192364 3000 nt of promoter + ATG

SEQ ID NO: 14935 - DNA, 3000 bp, Unknown; identical to SEQ ID NO: 5813
  misc_feature (1)..( 3000): cDNA_ID_2041439_gDNA_ID_2684234_Annot_ID_192359 3000 nt of promoter + ATG

SEQ ID NO: 14936 - DNA, 3000 bp, Unknown
  misc_feature (1)..( 3000): cDNA_ID_3019674_gDNA_ID_2684234_Annot_ID_192383 3000 nt of promoter + ATG
gtgcctcttgtcgtcagctgtctttctactgttgtagaatggtatttggtttatatgtaatgtgtgattcaagtaaatcttattcgtatttgtgctaatctaagtaggaatacagttctgatgttggagaaaacttgtcactcatggtttattcttctaatagctaagctggttgattgctttctgtatcactagattattataattgtacataatgttgcttgttgttttctgtttcagtcagtgcgttacagaaaatgaaaaaagctttaggacttccttctaggtttggatggaatggtgatccatgtgttcccccacaacatccatggagcggggctaattgtcagttggacaagaacaccagcagatggttcattgatggactgtatagctcgtttctcttctttttgtgtatactcataaataacagattcattaaccctttcttttgcttaggcatctcattagttagagtcttagagtcaaaggatctctctttgagtttctggtcttttatcaggttttctaataaacaaactttgtttttcgttgcagtgatcttgataaccaaggtctgaaaggtttcctaccaaacgatatatcaaagctaaaacatcttcagagcatgtaagtcaatacattatgcacatcctgcaaatgtttatccaagtgtctacgaatattgtatgtaaacgaacaattttgttatcttctccaagaaaatgacttgtctaatgaagaaattgtgtccatttttcttgtgtgtcattagtttttcttccctcatttgtgtaatcccccttacagtgaaagcttcttgatccatatcttgtccatatttcagaaacttgagtgaaaacaacattcgtggaggaatacctgcatcgcttggaagcgttacgagcttggaagtattgtaagtaatcagtttgtttattaattgagtactttatgtgttaacttttcaattctgaaccctgaaactgaatttttatgcatctttgcagggacctctcctacaattccttcaatggatctatccctgaaaccttaggagagttaacatccctgcggattctgtaagattatcaactttctgtttgtctccatgtcaatttcagtggccagtggagttcacatggtcggcaacatgaaaccttttattgtattacaggaatctcaacggaaactctttgtctggaaaagtaccagcggctgtaggtggaaggctgttgcacagagcaagcttcaagtaagatgattgaatcagagacaaagtttttaaagaaatatttggacttggcatgtgaagaatgatgtttggcaaatagcactcactaccctgtaactgttttctctatctctgcagcttcacagataatgcaggtctttgcggaatcccggggctaccagcttgcgggcctcacctttcttctggagccaagattggcattgcattcggtgttagtctagcattcttattgatcgttgcatgtgcaatgatatggtggaaacgacgacagaatattcttcgggcacagcagattgcaggtaaacattcatttccgtcactaggaagttgtatttagtcttttaaaacaaacctttatgagcctgcactgtgaaaatattgcagcaagaggagctccttatgcgaaaaagagaacacacgtatctcatgacatccaaatgtcacggcacgggcacaataaccatggccaagctcgtaccgctgtggaaaatggaccgagcttgttgtcttgagtcacttctttcaatcttctttgggttttttcagcaacacgaatcccaaacccccacaaggtcaaaatgttcatatcatgtctaccacattgctcgccacaggaagaagaccaagaggaaatacatttgtaaatggtcttgggttcttttaattatccagttcatagaataggattcgatttttcttgttcagtttttatgggattagtcctttggtacttttgtctggtgggagtttagaggataactagaacataaaaattacgtttcaatatattacacatgttagttgaaaacaaccgaatgtggagttgttatactcaatggatacatctcctagaagctagaaccaaatcaattgatcacaaaacaggactttgtcctcaagaagcatgcttctgatgtggttcttgaatctcgctaacaagctcgccttcagcttcagcttcaacttccataaaactctaactctacaccaagtatattaaaaataactacatagaactttcttcaagatcttcgagaaagccttgaatatatggaaatgaacaaagggaaccagaataaagatgtttggggatgacaaaaatgtagcagaaaatcatataagagagctccaagtcatgtgtcttatacaataactttgtcccatgtttctgcacgttttctactctcatttctttctcccatttttgtagtgaaccgaattaaaccggttctgatttcattttcttccaaatctgagtcaaagcctctaaagggtttcttcttctctgtttcttctatcttcagggttcagacttttcacggagtgaacacaaacgcctacgataaaccaatctcagaggtcagctcgatttctgtctttgttaggttgtatttggaggtttttcaataggagttctcaattttaggagccaatgtcagtttctagattgaaatcgatctcaatactcaaagcttagatcgaattatatgctaaagctaccaactttgcataaccgattatgtgttggtgacaatgagaacaagtgtgagtttgtaagtaaaagaaaaaagccaagagcttggaaaccaaacaatatagatagagagagatacagagagaggagatgatagaatataggataaggtgttacttcactctgacttctttctgcataaagtttcaaaattaagtcattttttttgtgtgtgttttgattttcagaaacagcttcatcgtcagagatg

SEQ ID NO: 14937 - DNA, 3000 bp, Unknown
  misc_feature (1)..( 3000): cDNA_ID_2685931_gDNA_ID_2684234_Annot_ID_192378 3000 nt of promoter + ATG
ttgatttgttatgaaatgataataataatttggaatctctgttaaatttgatttcactatgttaaatttgatttgttatgaaatcaaatgatggtatcattgtaaactatagtttcaatattgtgtgaaaacaaaccatgccccaagtcagcataatatttgggccttaccatactactgggccttgatctatttttgagaatcaatagccaactgatttcgtttcctagtgtataaacaaccaagtacatgcaaccctcatgatctttatcattcataagacgtgtgataaacaaacaactattgaatcctcaaaggcattatcttaattacattatacgtttgatataaaacaagctagtttcataattatacaaaaacattaatttaacaagatatgagctgtaatcctttatgtaatctgtttttaaatagctcaaaataagtaggagcatcatgcagatcgtaagagttttggagattatgcgtcttcatgtttctaacatgtctatggttctcataactaccttcgttatcgtcattttctcgaccgtaatggcaagaccttctatctctacgaacaaatctccatctctagatttagatccttcgtttagggtgaaatccaagagctttttaccaaagttgtatggcgattatgggttttggaacccaagcccggtttacggaggaggttttccttatcccgggccagttcctcatggcagtctaggtccaatacagagacataagaagccgaaatgaaaccggaagatatgttggattggatgttcttcaactttgctacttacaggtaaaacttttgacatatgggtgttgtataaataaggtagtgctgattaaagcttgtgtaggtacttactgcatatgaataatgtcattgtttatgttttgtagtagatacaaatagttatatatatacacatcttgttccactctctagataaaccatgtatgtgtagtatatatataatctttacaacattggcatgtattcagttatgagaaaagattgagttcatgaaatatttttatgaaaaaacatggagcataaagtagctatgactaaaactaacaaaggatttgttatcttccttagcattttccgaaacataaatttgaacacgagtcaaaaggaaacgcttcataaccaaaaattcttgggtaatttgaacacgagacatagaattcaaaagatcaacttggtatggtgacttttcttcaagtcttacacatgcttttcgggttcaaccacacgttaggaattttattgaaatatattttaggtgattttcttaacaaaatgtttcatagcatcgtagagtattttttccttgttaatattaaatacaaaaattcaaattgcattgatatctctagatgtatctataaaactgatataatttctttaaattcatccaattaacatcgtttaaatacttatcaatactcaaataattactttagtaaacgtttgattatatacatcttctaactataagttgttgaataagggtatgtatgtatacattgttttgatgtgaagccaaatttctcagatccactattcatccgatgacaagttacatttgtttacagtaaatattgaagaagccaaagattgataactcttaatcacaacaaacttaactagtagaaattcatgtgtttttatattgttttcaaccacatttttcagtcgaatttgagatccaaactttatagaaatatatgtaaaatcctactatatttggtccgacgccgcaactttgtcaatcacacagtaacatgcgacgaacaacgtgtaagaagtctcgttgctatatataccaactgtagtgtggttgacacccaattacacaaacaaaacgaacatatgaagggttatatgacaaaatcttacatggaaataaatattaaagtcgatgatgtaacgtctcacagccttacattatgagaaaagtctaccaaagaaagtttcatgttacatgttttggtatcaagtcttcatgacatccgccagaagtttatattagggaaaatcatatttgcagatcttgattcaaattatatatcattttggtggtgggcacatctaaatttcctaagaaaataggttaaatctaaataagacttcattttaacaactcagtctagactgtctagtgattgaaggattaataagaatgagtttaattcgagtttttttatataaaaaaaattgtggtgagcattgagtatacattaaatgacaactcgaaattaatccagatctctcagttcttaaaagataaaagacataaaactaaatttagagttcattcaaaaataaataaatagagtttgataatgatttagataattgaacacattagtatgaggttaaataaaacactaatatgagtgacacaagctgattttttcaaagaaattgtactagatgatataattgataaaatcataactaagaaaattataattaattagaacagtagacatcacactagacaataaccataaacttcgttagtgttagaaattggacaaaaaactacaaaacaaatctgctgattttacatagtcctagtcaaatatcatcagcctaattaactgcctaagtgtcctctaacaaacttaaaaaaaaaatcagtaatctacttgctactaaaacaacattaagacaaattaggtaataaaatattataattccttttgtcacattaaaatcattcacattcacactatataattccatatccgaaattcaaacataattttagccgtaaagtcaaagtaatggcgtgttgactaaataatgttttaacgattttctttccaaaactattcttaaagtatttcactttgagccatacaccgttgaccacttcaataccttcgcgcttctcttcttcttcaccaccacacacagccacaatcttttgaattttcctcctcatcatcgtctctctccgatccatg

SEQ ID NO: 14938 - DNA, 3000 bp, Unknown; identical to SEQ ID NO: 14933
  misc_feature (1)..( 3000): cDNA_ID_2731247_gDNA_ID_2684234_Annot_ID_137677 3000 nt of promoter + ATG

SEQ ID NO: 14939 - DNA, 3000 bp, Unknown; identical to SEQ ID NO: 14932
  misc_feature (1)..( 3000): cDNA_ID_2731244_gDNA_ID_2684234_Annot_ID_137678 3000 nt of promoter + ATG

SEQ ID NO: 14940 - DNA, 3000 bp, Unknown; identical to SEQ ID NO: 14931
  misc_feature (1)..( 3000): cDNA_ID_2686404_gDNA_ID_2684234_Annot_ID_137683 3000 nt of promoter + ATG

SEQ ID NO: 14941 - DNA, 3000 bp, Unknown; identical to SEQ ID NO: 14930
  misc_feature (1)..( 3000): cDNA_ID_2731231_gDNA_ID_2684234_Annot_ID_137684 3000 nt of promoter + ATG

SEQ ID NO: 14942 - DNA, 3000 bp, Unknown; identical to SEQ ID NO: 14929
  misc_feature (1)..( 3000): cDNA_ID_2731227_gDNA_ID_2684234_Annot_ID_137685 3000 nt of promoter + ATG

SEQ ID NO: 14943 - DNA, 3000 bp, Unknown; identical to SEQ ID NO: 14937
  misc_feature (1)..( 3000): cDNA_ID_2685931_gDNA_ID_2684234_Annot_ID_137689 3000 nt of promoter + ATG

SEQ ID NO: 14944 - DNA, 3000 bp, Unknown; identical to SEQ ID NO: 14936
  misc_feature (1)..( 3000): cDNA_ID_2995061_gDNA_ID_2684234_Annot_ID_137693 3000 nt of promoter + ATG

SEQ ID NO: 14945 - DNA, 2479 bp, Unknown
  misc_feature (1)..( 2479): cDNA_ID_2731203_gDNA_ID_2684234_Annot_ID_137694 3000 nt of promoter + ATG
ttcttaccaaattctagtaaagaataaattttggtaatttgcgtttatatatcgtaattttttttaatctttcatctaattaaagtttggatatgaggtataatgcataaacaactaaacggaccttatatcaacatctcgtttccacatattcaaagagttaacgtgagaagaaagaaaagatgaagattcttccttacaccagaaaaagctatatcatcatcattcacaaatgtgcaaaaccatgggaaaagctagcgatatcagcaacacatgggccgctagatctagccgttacatgactcttttacagttttacttttacccatagatacacattcccctctttacaaaagtcaaaactaatataagatatcgttggagcatcaagaaaagataaaagaaggatggagtcttccacatcgtgtgatcaaagatagttaggcttacactcttgaagctacccgttgacttagaaagctaatgctttaaatgatgaaggccaaactatccatgcgcatcaccaagcccaagtattattatattcacaatagcccatttgttgttacattattttgttgattgaataatacctaaatagtttaactaatcttctattcgagttttagttatttacatgtttatgtaaagattaggaagttttgagttttgagtaaatactattgaatacaatgacaacaacaaggttagacatagaacagtaaaaccaataagaaaaacatatcacacctttgcagcaggaagaaaagacgatctcgcaaactcttcataagttgcgttatggcacttgtgtatctttagtctacaatttcgctctttgttactattagtggaaatcttgttagatatctcctaataatactagcaatttaaatcaatgatagatgttgtggaggatggagacgatagagcaatttgtagtgtctgatgataaactataatttcatatttatgaaaaaaaaaacaaaaaaaaaacttttacaaatggtttcaattgtagactttgtagtagagaattttatatgtaatagagagatttatagccaacgacttcttattttggttcaacgactcgagtggggaaatgcttttgatgtgtttaccaaagattgcgcatcaatcaatggttacaaaagtcaacaaagtcaaagctatatagattacgaccattctcagccgtccgataaataaagggtattctgtctttttgaatgacaactagcatttctggtgaccacgagaccgggaatgttcgtcacgggacgttttcattgtcgttcgttcccaccaacatttatcgttattaatttacaaacaaaaccgtttttagcaactagtaatatttaattaatcactaaagcactgatttattgttctaacaactaattgattgcaaaaactacaaaaactactccaccgactccacaattccgcaaaatcagttttgtagtttttttttttgtatcaaatccacaatccgtaaatcagtacatttttcagtcattatacatacattaaattatttttgtcaattgaaacaaaagttaaatctaagtttttcaactatgacttacggtaaaacctatcacaatcatatacaaatacaaatatttgtttacctagttgatgttcgtttctccattaagatcatttatctgaatggatttgaatattgatgttcgttttaaccaacttaatagagcaatgagataaatcagttaaatgaattttaataaactcatccaaaaatgatcgaaatctggctgattctgatcagaacagttaactggaagtgattcagtttaaaatactaaatgttataaatacaaaaaaaaaactaaatactataaataccaaaaaaataaaaacgaacatcattcagataaattaatgagatggatcatttgaataaactatttggatgcatatcctaaataagcaaactaacaagaccctaaaaggattagatattgttttgaccttttttcctaatcttgttctacatcaaatttgtaaccactttcgtgactagaagtttattttatacccttactagaagtttaacgagacctctctcatttgagctttcttattcgatatacgcatacatggattttgtggtcgacatttccaaagcctataagatcatcaatccaatggttaaagataaatgacattgagcttgactacgataacttaagtgcgcatcaaaacatttgattattcctcatccaaattaaaaaaaaaaagaacggtgggagcatttaataagatatttatttacctgcactcacgtcctctctcttcttctttcactcttacacgaaaggaaaacaaacaaaaacgaaccaaataaagttattttagtgctctctaatggcgatatgagagattcgtgagagaagatacagaaaaaagcttcataatttgagattctttctagaaaaatcaatcaatg

SEQ ID NO: 14946 - DNA, 3000 bp, Unknown
  misc_feature (1)..( 3000): cDNA_ID_2731312_gDNA_ID_2684236_Annot_ID_137698 3000 nt of promoter + ATG
accagtcctaaccagacaaaaaagaaaggtgttggttttaaacaagctctggtgttacaatgtgacattaaaacacgaatcttttctcttgagaatcatcaatagagagagagagtgagtggtcatattagggttcataacttgcttgaggttttgtaaaaagcagagaaagagagagagaggggcctagaaagaaagaaagaaaagcagtaagagactattaaatgttgcaggcaggtccagccagtgtcccctctcttctgcgagattccctcaaaatttattacaaagcatcttcatcgatgttcttttaattcttcctcaaaatcttttctctttttttggttatatatatttgaattttgatttatgaacctcctcaagaaggaaagacagaggaggagacaaagaagtataggttcacattgcatagccagtttagttttgaaggatggatatatgaaaaaaatatgaagagagagaagagagaagaagaggaggattaaagagggtgaggccagcttttgtgctttggtagtagatgaggtttaaatgctccataccttccatttccttctctcttaccctaatttaattcttcctctcctttataactccccacagacattctcacttctcctcctcacacttcacatcaacacttctttcttgttttttcattttacaatgtttcctttgatatccgcactttaagcatgagagagtccctttgatattggcctggttcactcagatcttacctgaccacacacgtagatatacattattctctctagattatctgattgagccgcgccaatatctcagtactctctcgtctctattttggactttgtggtcttgtagatcgatttgtatgtgtgtgttgaaatggagacaagtacttgtaacttctttgttgttatattgtttacctataggctgatgtcataaactcttttgatcttgtttctaacttccagattcttgaaaaatcaagtcgtgtgtgtgtctccatggaagccttttccatttcttcttttccaaggtatccccttaatcagcttccttgccaagtataaatctgttgtagggttttgcttcaaataatctatatggatccttttagaatgcatattgtgttgataccaattttgagacagaatgtgtcagcgaaactgatcttgtttattagtacaaatgcaggatgttagagagttagctaataacatatacaacaaaatcacaaaaccggtgaagcaatgtaaaatgtcacaatcacaagatgtttttttcaaaaacaggggaaaaagcagagttaatgagagagaagctgacgagcacgaaccctaacctgcaagcgagcaagagcatgcatacaatgtaaagcaattcgtgcttgtctcctcacaagcactcctctagccaccgcctgtaacttcaccagactcttcaatgctttaaacgctcttcttgcctgcaaaacactttaatggttttaccaattttgttttttcaggttttcaaaatctacagagatagaaaatgtaaattaccaggtgccctctgaaaaaggcttggattttaacggcggcaatctcttctcgagttgtttctggagctgaagagcgaatgattgtgattctgctttgagatcgtcggagaagtttccttcttacaacaccaaacaaacgtttggagttggccatgtttatgggtggatcttgtcttcttttggttttggttttggttttaaaagaggacgtctaaggaaacgtaaaatgtgaataaaaagtgaagacggtggctttaagggatatatggaacatgatgtgctctcctcatttctaactaacgaacgtgctcgcatgctcctctctttacacttggtttcgttttgtttattagtagttttcaagacacacgagtctttggtcttttttacatttagttattgaattatagttatgttatgcctaactcaataaaaagaagcttattgagattttgaaaaggttattataaagggtgattgttgcatttcaatgctcaaaattaccatgttatgatatatcttataatcacatgtgaaatctacactatttttaaaatttatgatttagacaattttttcgaaaatgtcactctatttttcaacaagaaaataaaattaggtcattggtattgtggtttgtaatatactaatgacccccactacaatcctaccgacaaagcgtccactctttgtaatgaagttctttgatcatttctctattcaatcttgacactatgaatgtaatcgcgcagcggaagaatggttcatcatactcttacactgttacacaggtccagccctgaactaaagtgtttgtgtttttgtatcggatatgattagcaattgtgcatcaagttagttacggtctcttctcaaatccagtaaaccaaaaaatatataaaaaaatcatactctataataaacttacatcaaatgtcctttttttaacgtttatgttgggagtacgtagtgagatttttcagatatgataaatgtttatgtttgaagttctattttgagtatcatcattttacacgtctcctatcttttcttcaatcaataaagcctttgagcccacaacttcgtaataccgttaaacccaattgttattgggcatgaaaacaaggcccaactcaagtctatctcccccacttgttcatcttctattgtcttgttgcgagtttgcgacttaaacagtaattaaattactaattacgcaataatggcggattaatcgaacctactctctctctctctctctctctctctctctctctctctctctctctctctctctctctctctcgtgcatctccataaactatcttcaaagattaaattttgaagatcttctttttggcttattacccgattctgtcactgtctcttcttcttctccaatcccaatgtttgcttgagagaaagagagagagtcaaaccaaaac

SEQ ID NO: 14947 - DNA, 3000 bp, Unknown
  misc_feature (1)..( 3000): cDNA_ID_1014464_gDNA_ID_2684236_Annot_ID_137701 3000 nt of promoter + ATG
ttggtggtatcaaaactcaattagaaaaataataatgtgcacgagggatgggacttttaccaatgctaggctgacatgtaagagtacggacacaaatcttacaaagttcttattgtaccttccctaactttgctctgttgagataagtttctttggtaattaagaagtgtttgaattatgtagctataatttgctgatttatattaaattcttcactacaagaatctgtatctataactataatatgttttgtgtacaattagagactaactaaactaagagtgtgttgtaagaatgttaagcaaataaactctatattggacaagtgacttgaaaagagaatcaagtgcagtctcaagttcctctgttctttcctctaatctctctaacatcttcttaatttccttggagttatccccatctgaacgtagaactgcatccaagttctgcaactcgctcattatcgacgatgacgatcggtgaccaccactgatcagcctggagacgaatttgagagaacatgtctttgtcttcattgttgatgttgtggacaggaacatgaaaagagagcggaagatggagacagagagctcggttgtctcagagtcatccaacttcttcttgaggccaagaagaagcttgttagtctctttcttgatcttcttcctaaaggaaaagtactctttgatctgaacttccatggatttgtcttttcttctcaatgcagactgaagattaaggagatgctctctgagagtgagaactaggtttctcgctgcgtcgcaagagtctagtaacgtggctgacacgtcaagagaatgttcagcttgagctgtgggaagagagtgattgagttggtgaagggaatggtaaagctcagagaggttgagtaacgaggcgtgaagagattgagaatcagatgagttttggaagagatgaatctgagagagagcagcttgaaacttagcagaaggatggtggattcttgatggaagacttatagatctaactggcatttggagtttggtttctggaaatgccatgtttcttaattctgctgaagaaaaagaaagaagagaggtttggtatatatatgatgaagccaaggcatgtgcaggaaacatgggatattatatttgttaaaaataaacagtgattgtttagtcaagccacgatgcacatggaggtggtgaaggaagctttgaatgctctgttttatgctctgtttttgaacgtgaaaccaattttagaggaccaaagatagatagagccattactagatgttgcctttgtgattcccatttagttagccggagagagtgggcttgtcagagtaaggagacatggaaacatttgtcgcagaccattttcagatttcaactctttcttgtttcatccaattgtcaattttttttttcttcctattaacttattcaccattggttcccaagacggtcgtgaagagaaaaaagatgtcacaacactacaaagttgttgtaaaacaaaaaaaataaatactatatacacgaaagatgttacaaaaaaagtattattttgcattttcaatgcaataattaaaatgaattccaagtttattctttttttttttttttttttttttggtgcaccttccaagtttattcttataaactgattcttattatgtaaaaagtagagaaaatgcagagagttacatggaaaaaaattcaatgtagtcttaatttgtgagattttttttttatagaatgacacttagtataaaatcgggaaatattatattaagaataatcctaatcaggattatacaactgtacctactttaaataatgttgattagaatttaggagggcggttcaatgttttgtgccctaataatagaacgttgtattataagtttttgattgagtgcttcaaggctgtcattggattcatgatcaattggaaacattgttaagtgagagggacaaacttatgaattaagatattggccctttgtctccgttacaagagctatgcttatatgataaaatttgtttattaaagaaagaagggatcattgtagatcgcatataaatgatatgatgcaaaattacgggacgatgtaatgtacggggaatcttaaaagtggtacgtttcagacagaagatcttcatggaatttgatacattgaacctcttctcaaagtgttaatcaactcatctttatctgtcagaacccaaacttaaaactcagtcgaaatgtattctcaaaatatagttaataggcaacaaacttcgactatcaataataaccacataatttggtcggaaactagaagacgtcgcaacattatcaaacttaaactatgtagaaaatttccaaaactataagctactttaatgttgattaaaatgtaggagctagggctagtagctgttcaatgggttgtcccctgattcaccatatccattttagtataagtttttctttaatttgattgagtgattcaagactgccattggattcatattgatcattatcaattggacgcattgttgaattagagagacaagattatgaatcaagatcatggcttgtccccgtttaaaaatggtttaaactatatgataagtttatttagaaagaaaaaaagatcatgtacggggaatcttagagaagtggtacgttacagacaaaagatcttcacaaaatttgatacattgaacctcatctcaacgtcaatctacaactacgccttcaatagtaacagaaacaaaacacaaaaagtccataagttaaacactgggcctgacaatttaggcccatatactgaaggaaaacgagtctataaataattgggcctaatgaaatataaaagcccacgatactagattatcgaatggtggtccctattagttacgtaacgtacgaagatttatctacaagtttgaatcactccaaaaatttaaaattcagtgttcaccattttttatttttctccacaaacccaatctttctaca

SEQ ID NO: 14948 - DNA, 3000 bp, Unknown
  misc_feature (1)..( 3000): cDNA_ID_2731303_gDNA_ID_2684236_Annot_ID_137702 3000 nt of promoter + ATG
tttaatttgattgagtgattcaagactgccattggattcatattgatcattatcaattggacgcattgttgaattagagagacaagattatgaatcaagatcatggcttgtccccgtttaaaaatggtttaaactatatgataagtttatttagaaagaaaaaaagatcatgtacggggaatcttagagaagtggtacgttacagacaaaagatcttcacaaaatttgatacattgaacctcatctcaacgtcaatctacaactacgccttcaatagtaacagaaacaaaacacaaaaagtccataagttaaacactgggcctgacaatttaggcccatatactgaaggaaaacgagtctataaataattgggcctaatgaaatataaaagcccacgatactagattatcgaatggtggtccctattagttacgtaacgtacgaagatttatctacaagtttgaatcactccaaaaatttaaaattcagtgttcaccattttttatttttctccacaaacccaatctttctacaatggttctcttcttctccactcgttttctcttcttctccatcttcttcccttgcctcatctctatcactctctaccaactcgactcattcgagccagcttcacttcccgcggactcactcatcacctctcccacttcaatcccgccacttctcaacgacagatttctcaccggagctgagtttatcggcgtcggtcttctcaataaccccgaggatatcgcctaccataaggactctaatctcatctatactggttgtgttgatggatgggtgaaacgagtcagtgttcacgactcagctaatgactcaatcgtagaggattgggtcaataccggtggtagacctctcggtatcgcttttggacttcacggcgaagtcattgtcgccgacgcaaacaaggtttagacgattctttattttttgaaatcgaattttgaaaatcttatcttaggtttgatattgttggtgtgtgtagggattgttgagtataagcgatggcgggaagaagacggaattgttgacggatgaagcagacggtgttagatttaagctgacggatgcagttaccgttgctgataacggcgttttgtatttcacagatgcttcttcgaaatacgatttctatcaatttatctttgatttcttggaaggcaaaccacacggtcgtgtcatgagctttgatcctaccacacgtgccacacgtgttcttctcaaagacctctacttcgctaatggcatatcaatgtcccctgatcaaacacatttcgtcttctgcgaaaccatcatgtatgtgcattacatttgttatgtttctaactcaaaaccaattggtaattagtttttatttatagattttgtatattactttaggagaagatgcagtaagtattatattagtgaggagcgtgttgaggtatttattcagggcttaccaggttatccagataacattcggtacgacggagatggacattactggattgcattgatttcggtatttatactataattgaaatcttttcattaaagtttatgatgagattattatatcatctttaatcttttatttgatcattgtgttgtgaaaacaggaagtaacaacgtcatggaaactctcgatgaaataccttttcttgaggaaactcatatacatggcggctaagtatggcgtggaactactgtctataaagaatgcagccgttttgcaagtggatttggatgggaatcctatcgcaatgtaccatgatcatccattctctcacataacaagcggagtcaagattgggaaccatctctattttgggagcctcttgcattcctacattactagactcgatcttttaaagtatcccgcacaaaagaagctttaaacatcaagtttaggagtattcactgtcacaaaatgtaaagtcttcgtccctggcacatcatcatgtccttttgtcttcgtccctggcacatcatgtacggttgttgtaaggtcgagttttggtgttaaggtgttgttagtttataatctttgtgaatatggttagcttcttggtgcattgcaaggttaggtgaggtgaatagaggtggcgaataggttttagtggtttcacttttcgttgagctagtgtattagtccatgtttgctcgttcgttttgcgttagttttcggagaagctataagcttctatctggaggttttgtggacggtgttgttctcggaaaactaaagtatagcagaagattgcaaaatacttcgatggtttattgatatgaattgcatgcctttaaatagccatgactacaaagactacgtcgttcacaactaaacaatgagaaacttgcggaagtaagctaaagactaggaccactataacaactactactcgactcttaaagaccatgagtttattcaaacatgagaacaacttaacgacttattcaaaacccaacagacggagagtaatgcttgtgacaactcagatgaggattccagtgcttcggtattgcggcaacagcgtacttttccgagcttcgcggattcggtgtttctcctcctaacttggtcttgatcactcagccgcgatcttttgtacttagagttatagtgttgttctttaattttctgtagattgcttctctctccttctattcttctttgtcaaaaataaaaatggtataaaacttcatcttttacccaaaaaaaataaatgtaaagtcgtgtacagtgaatattactctgttttcaactccagaaaacataattgggcctattgggaatataattaaagcccacgagattcgactagcgagagttgttgttggttacgtaatttagcgcactacggaacaaagaagaccaaatttatacgagtcaacactcaacagcgatttgatctgcgatttgatcatcaacaacaatcactccaaattttgtctgctcaccatttttccacaaagccaattctcttgtatcca

SEQ ID NO: 14949 - DNA, 3000 bp, Unknown
  misc_feature (1)..( 3000): cDNA_ID_2731301_gDNA_ID_2684236_Annot_ID_137703 3000 nt of promoter + ATG
ggtgtttctcctcctaacttggtcttgatcactcagccgcgatcttttgtacttagagttatagtgttgttctttaattttctgtagattgcttctctctccttctattcttctttgtcaaaaataaaaatggtataaaacttcatcttttacccaaaaaaaataaatgtaaagtcgtgtacagtgaatattactctgttttcaactccagaaaacataattgggcctattgggaatataattaaagcccacgagattcgactagcgagagttgttgttggttacgtaatttagcgcactacggaacaaagaagaccaaatttatacgagtcaacactcaacagcgatttgatctgcgatttgatcatcaacaacaatcactccaaattttgtctgctcaccatttttccacaaagccaattctcttgtatccaatgcctatgttctactcctctcgttttctcttcttcttcaccatcgtccccttactcgtctctatcgctctctaccaactcgacacatttgacccagctccggttccttccgaggcatacgcctcctctactacttcaatcccgccgcttatcagcgacaaatatctcaccggagctgagtttattggcgtcggtcttctcgataaacccgaagatatcgcctatcatcaagactctaatctcatatatactggctgcatagatggatgggtgaaacgagtcagtgtccacgactcagctaatgactcagtcgttgaggattgggtcaataccggtggtagaccgctcggaatcgctttcggagtccacggcgaagtcattgtggcagacgcatacaaggtttggattcgtgaactttttagaaatcgaattttgaaaatctcgatcttaggttgattagtgtgtgtgtcggtagggactgttgaacataagtggtgacgggaagaagacggaattattgacggatcaagcggaaggcgttaaatttaagctgactgatgtagtcgccgttgcagataacggcgttttgtatttcactgatgcttcttacaagtacactctgcatcaagtcaagtttgacattttggaaggtaaaccacatggccgtctcatgagctttgatcccaccacacgtgttacacgtgtacttctcaaagacctttacttcgctaatggcgtctccatgtctcctgatcaaacgcatctcatcttctgtgaaactcccatgtaagtccactgactctgttggattttactaatatccgactcataccagttagcaatgtgttaattcatcgatatactatatctaggagacgatgcagcaagtattacattaatgaagagcgtgtagaggtgtttattcaaggcttaccaggttatccagataacattcggtacgacggagatggccattactggattgctatggtttcggtatgtaaaccagttgaaatattttctttaaggtttatgatgatgagcttttgtatagttttgctcatagtgttgtgaaaacagggagcatcaacgttgtggaggctctcgatgaaataccctttcttgaggaaaatcacagccatagcggctaagtatggcgtggaacttatgttcatgaagaatgcaggtgttctgcaggtggatttggatgggaatcccatcgcttactaccatgatcagagactctctcacattaccaccggtatcaagattgggaactatctctattgtggaaatatcttgcattcgtacattatccgactcgatctcctgaagtatcctgcacagaagaagaagctttgaaacatcaaagtttatacaagcactaaaaatttccactttaggagtatgcactttcacaaaaatgtaaacgtatcgtcccttagaataaatgtatgataatgtctcttaaggagtacatagtagcctgaaacaatgaatacaaaaccaatcaaccatacaagccattccaatgtgtcataaaacttaacaaagtttagtgcgcatgttctttatatattaatgattagaagacgtcccctgactacggttacggttattacgtttacggtttattaaccaccggttacggttataaatttttgttaatcttaaccttaaccgttacatgtacggttaaaacggttacggttaaatacggttacggttaaatacggttatggttaaatacgattacggttatttgataattatgatatagttaatatacgaagtaaaatattatattttttaaccttcataataaaaaaataaataaatagtaatatatcaaataatatttattttacgcgattatgtgcttcaaatatctatagtgaatcatctatctattttcttaagtaaatcaacgaataaacaaattaatggtcataattataataatttaattacattttcgaaacaaaaataattctaaagagaagatgttgtgaacattaaaaaacaattttaagagtataaataataataatatgaactacttataatttaatttatggtcaaaagagtagtggagtaacttcgattgtagtagtgacatattaaacgatttaaggtgatgttttagtaaaataattattcatttaaaattatacacaattacaactatattttaaaagttttaactatacggttaaccgacggttttgatacggttacggttaattaacggttacagttagtatatttttttaaccgtaactaatctattttcacggttaacggttacggtcaggttacggtcagttaattaacggtccggttacgatccgaaatacggttacgattagattttggtcatgcgccttgagctcctctagaaaaatattgggcctactgggaatatggttaaagcccataagattccgtaacataacgtactacggaaaagaagaagtcaacgatttgatctgtgattgtttttctctcaatcaacttcaaaatttgttgattcaccatttttttccacagaaccaatccttctaca

SEQ ID NO: 14950 - DNA, 3000 bp, Unknown
  misc_feature (1)..( 3000): cDNA_ID_2731295_gDNA_ID_2684236_Annot_ID_137705 3000 nt of promoter + ATG
tacatcaatggagggcgcgtggagttatttattcaaggcttaccaggctatccagataacatccggtatgatggagatggacattactggattgcaatgccttcggtaactataaaaattgaaacccttcttagagtttattgagttggtttaggtctcggtcatattcagtatgtgtgtcatcttttatatcatcttttattgatcactattgtatcatcttttattgatcactatagttgaaaacagggagtaacaacgttgtggaagctttcaatgaaatacccattcttgaggaaaatcacagctatggcggctaagtacggctatgaacctatgtttatggagaatgcaggagttttgcaggtggatttggatgggaaccccatcgcatactaccatgatcaggcgctctctcacataaccaccggtgtcaagattgggaactatctctattgtggaagtctctggcattcacacattctccgacttgatctcctaaaataccctgcacaaaacaagaagctttgaaacttcatgtttataaaaaaaaaagacttttacattttaggagtattcactgtcacaaaatgtaaactcattgtcctgagaatgaatcatgatgtttctctatctctaaggatattagtaacctgaaacaatgaataccaaacgaaaaaaatacaatgaagacaaaccaaatcatacttaagatgcacaattcctaaacaaagcagatatttttctttgtttagaactcaaggcaacccattgtccatacaatattggccctactggtaacatagtaaaaccccacgagatttcgactaatagttggttacaacttacaagggactagagtcaaagattattatgagtcaacgatgatttgcgatttcatcattaaatacacgtgtttaatttagttgtttttctcttcaatcacaagttcacaactacaaaattggcatgttcaccatttttccacaaactcaaatttgctccaatgcctgtacttttctcctctcgttctctcatactctccattattgtccccttacttatatctatcgctctctacaaactcgacacattcgaccccgctattgttccttccgatgcattcacatcctctgctacttcactcccgccgcttataaacgacgaatttctcaccggagctgagtttatcggtgtcggtcttctcaatatacccgaagatatcgcctaccataaggaatctaatctcatctacactggttgtgttgatggatgggtgaaacgagtcaaggtcgccgactcggttaatgactcagtcgttgaggattgggtcaatactggtggtagaccgctcggaatcgcgttcggaatccacggcgaagtcattgtcgcagacgtacacaaggttggggttttgaaatcgaattttgaaaaatcacaatcttaggtttgactttgttgttatgtatagggactgttgaatataagcggtgacggaaagaagacggaattgttgacggacgaagcggacggtgtgaagtttaagctgacggatgcagttaccgttgcagataacggcgttttgtatttcacagatgcttcttacaagtacactctcaatcaattgagtttagacatgttagaagggaaaccttttggacgactcttgagctttgatcccaccacacgtgttacaaaagtacttctcaaagacctctacttcgctaatggcatcaccatctctcctgatcaaactcatctcatcttctgtgaaactccaatgtatgtgcattggatcagttaaattttttataaatttccgactcagtttgatttggcaataagttaatttatctatatctgttatatactactttaggaaaaggtgcagcaagtattacatcagtgaggagcgtgtggaggtattcactcaaagcttaccaggttatccagataacattcgttacgatggagatggacattactggattgcattgccttcggtaacgttacaaattgaatttcttttcttttctttgaggtcatgttattaactcattacatgctaataaaggatcatctttgtgttgtggttgtgcaaacagggagtcacgacattgtggaatatctcgttgaaataccctttcttgaggaaactcacagcaatggtggctaagtacggcgtggatcttatgtttatggagaatgcaggcgttttacaggtggatttggatggaaatcccatcgcgtactaccatgatccaaaactctctcacatagccacatgtgacaagattgggaaatatctctattgtggaagtctctcgcaatcacatatcctccgacttgatctcctgaaatatcctgcacagaacaagaaactttgaaatattatgttttcacaaataaggaaagtttccattttaggaaggagcattcactgtcacaaaaaatgtaaactcatttcctgagaatgaatgatgattgtatctcttttttttttttttttttgtctctctcgtagatttgtatcattgattccaaaagcatatactatctagcatgatgtgagtgttattgttcctttaattagactcgatacattcctttaattagacttggtcataattaaaggaataataacactctgtgatatatgaaaagcatataaatggtattaagtaagaatcgaacctgtgacctttaagaagttaagctggcttggaaaggtgtatgaggtggtcgtccactaattagattcagagagtcaggacttgatccaacgattaacgcaaaatcatttgcacgttctacgcaactccataatttcaattcctctcgacgtttcacggcgaagcttcagatctacttttccccagctcaggtgatcttttccatcttccatcatcttcgttcgctgttagagattatcttcttcttcgtcttcgtcttttcctttacgatttctgaatcttcttttgtctcttgtttgattttagt

SEQ ID NO: 14951 - DNA, 3000 bp, Unknown
  misc_feature (1)..( 3000): cDNA_ID_2731287_gDNA_ID_2684236_Annot_ID_137707 3000 nt of promoter + ATG
actgcccatggtgtccttaaagatggttggagctccctcagacgctattacctgaataactttgctgatggaactaagcaggtcagtgaattttcattctcagtaactctagttgtatcatctaataatgttcagttgcaactgtgtgcgactacttttggtgtcacttacccctgtaactggaatgtgtcctgacgcaagttaatatggctatgtgcaataggatgcaattgatctcttgcaagggcactacatagttgctgtgagccgagacatggctcctgtacctcaaaagggaggccttgaggctgtagccgtaagcatttatcaattaagattagaactaatttccactatattagcatacaaagaattctagtcttataacaatgtaaatttcatgtctcagaacttcccagtggcattgttcgtggttctgatgagtttctggtttgcaacaatgtctctaaaacaaagtaagtatggtatttcttttgctggatagttaagattttctttcaaacttaatctgaaactgtgtaaaatttgctgagcagctgggagtgattataagcataagcacttgttcttctcattgttgtggacgggaatttgcgtgggcatggctgcactggtgagggccaatggcaggatcttctgtaaccgacctcgtctgcacaagcccagaggctgattcatttcgtgagatcaattaattaaagacatggaactcaagtcggagacaaaagttttctcccttcgattgttttattttattgtatcaaaattggaccttgtgacaccatctagaggcaattgtctcaggtttggatccctcatgatttaatactcccacagccatcaaatgactcgatacagttacacatctttcttcatgttcattctatgattactcggtccgacaaatggctttctaaatccctacttcttgttgagtgattccattgtagaattcatcatgaggcatgatagaccaatggcagacaaaggaagtgcatgttctaggttgtttagccataacctatgcgcatctttgttattcaggctcagtccctagatggtcaatcgttatattagtgttaggatccattattttgtggcagatgcacatctaccctctgttaaatcttttctacggttgtttctgagagattgtgctccattgttgcttgatcattttttggatatttggtaaggattcaaacaaaccaaaaagaggcctcacaagttcaagaagcagttcaatgaggcatttttaaattatgaaaccaaatattaatcatttaaatatggttaagatctacagtacaaaaaatggaatcaatcaaaacttggaaaaaccagagaaaaaagcacacaaccttgaatatctctctgactttcctatcaaaagaggaaacaaaaaaagaataaagtaactcttcttacctttttccaacttgctctcagttccttcacaactcgttcaaaacacctttgaggagatccaatccctctgcagagatgctcctcctcttatgcgacttgggaatctcaatccgaggaggcgcttcgggcgagaaacagacaaccactacagtaagattgtcacagctgtttcgttgaagagcctccttaaccaaagcttgagagcatctctcaggatcattatgctgcatcagctccctcctcaccatcgtcactgcacactggctactcatcacatcccagagtccatcacagcccattataagatactcatcctcttccgtcagcacaatctcttccagctcaggctcgcagctgagcgggcagagtgaacctttagttcccttaatgtgccaatctcctaaggctcgagccacagatagctgcccgttaaggtaaccatcgtagatcacacctccaagcttctcaatacgtagccgctcggaagtacagttaggtttgtggtcctttgataactcaatggctctgcctcgtttcccaagcaccgctctggagtcaccagcgtttgcaatcaacatagtcttgtccaaaatgagagcagtgagtgcagtagtgccagaggatctatcaagagaagaagcatcagccaaagcatgatcagtcttcacaaaagcactccttgttgccttctttgtgctggttgggaaatgtttgtcttccattacaagcttcataatgttcttttttgtgaatgatgcagcatcaacacctccgtgtccatcaaacaccttcataaacaaacaatcattttaaaaaagagaacttttttgaaatattcgatgaagcaaatcttatataccccatagaaagctccagtggatgatccaatatactcagtgagatcatcaacacaaatgaattcatcttccattgattgttttggtcctttatcagaccaacttccagatctaaacacaggctggaatgttgaatttactccttccggagattttgcaccaaatctctcatctccttcctgcaaacaaatcattttcacattgtaagtttcaaactttggattgtttttgagtcacgagatccgatctaagctacattatcttatctgttcgtgaccgtgcaattacaatcacaagcatttgaatttaaaaaaaaaaaaaagcaaagaagagatgaaccaacgtaatcggtcaaccaggcagtgctgttgcaatggcgcattgcagagatgtttcttggaggtttcccagaggaactgagattcgtcattttgtcatctgcgacttccaatgtgttgatcatcggagaaacttcagtcaccggtgccatttccagattccgatcaaaagctttctttttttgtcagagtcatctcttttaaattataaaaatagcttctttcttcttcttcctccttattttactcaccaatcagctctctggatgccacgtgtgcttccaatctccatattttttttttagtttgaatataaaagagaattaaatcttttattagtttcccattagcgaaag

SEQ ID NO: 14952 - DNA, 3000 bp, Unknown
  misc_feature (1)..( 3000): cDNA_ID_2731283_gDNA_ID_2684236_Annot_ID_137708 3000 nt of promoter + ATG
cccgacaaggttcattctttgtcatttgacccgtaataattattgcctaactggagttttcaaaaggttaagcctttgttaaagctaatattgggccaaaggacattgatttatctgtatgtaagtgcttttaacagtttttgcttaccaattagatatcttccttccaaaggtatcacttctggctgctaaattgagcctagagctcgacttatattcaactgaaaatacattcatagacaaaccaattaaacacatgattttgtatgtgatcattccccggaaacagcctctgctcaagcacaatcttcaagcgccaaggaattaactttcaactgatattttgactccaatctcctaccaacaaatgaaagcaggcaatgtctttccagaacaaattgttgatctgaatatcaactcattgaacaaatggtgacattaccatcagcttcagacattcaaaccgcaggatggcatatcgaattctttgtggattcatatctttcacaggggcaaataaaagagaggacagctgatcatcgaatttcaggcacttactcgttggaacatggcatattgttgaaattacaaacaaaatctagcgggtgataaacagtgaacagaagcaagctcctttgtaaatgcagaattatattcaaagtatatgtggagacaacaatcatcactgtatgagttgcagaatcacacaaaaggattttaaagaaagccatctcttttatcttgttcttgagcttccttattagcagcttcaacggatttgaaccataggaacacctgaacgcaaaaaaaccattttttcagctgatacagatcaaatggataaaaacgaaaagagagagacaaggaactcacagaagtggggattccagtaagagcaaagaatccaagcacaggagtataaaagatgctgtcagattccaagatcccgaaaactggattcttgcttgtgtactcgaaaacagaaccaatctacagtgaccaaacgatgcataattaagataacatctttgatatgagaatcagcaatgcaaacaacaaaaggagtgaaagagagagaagaagaagcatacagcagcaatggcagtaatcgcggaagctagcagataaacaaagaaaggaacctcaaagctctcttgggacgtagaagaacgaccttcgtttctagcccaaggaggtggctcatctgagtcaggattcgcccaagacggttcactttctttagattttttagatccctccgtcgccgccgtcacaaccaatctcctcactgtactacgttcgtaatggagcaagtgacccttcctcctcccagccagaggatgatggcctggaaatggtgatttggtaggtgaacggttgcaacattcatcaccatggctaagacaaaaaccggtcggaagagatgttagagacgcggccatagatgcttaagaagaagatgaaagcactcactcgactttggtctaaaacagagtctgaagcggtgaatcgatttgcagccacacgttatagtttttgaatagaaatatctaatccatcatcattctgttgtggatgaaggacacgtggtgcaaataaacgacatttggtcacagttttggttaaatttagcactagaatctagtaaaaactgtagcaagtttaagtctttactcccaaaccattgtattaactcgaaagacacaacaagtgaacacaacagttttctttaccatctccaattctctcaacacacaacaaaagcttataagttatataagcagaaacaatgttactagataaggcgattttttacatatgaatgtggcaaataaaacaagtgctaagctatagaatcaaggatcaactaaaccttccataacaacgagtttgtccaagagctcaagtttctcatcttcaagtgctttaacctcatcctctgcttcctttaactctctctccaacgcgaaactatcttcctctagcagcaaatacttgcgtctcagtgctctgtactcgtttcctggagatgaatctgaatttggagacatctcaagttgatgtgaaatcgcatgaacctggttcgatttgctccgatttgaaacttttttcccgatacgtggtggtagttgagtcaagggttgttttggagtaggaatcttcattctttttgcttcagagaaaggtggaatctttgaatcttgcatctctgctcaaagatcatcaaaattaacaattttgtgagattaaaaaagcatcagagaaacaatggaattcgatggtctcaattcaaaagcagagaatagaacataaattgagatatcagtgtgtatttctacagtcgaacttacctgcgatttgtctagggtttcacaggaccttcgccgacgagagagaattgggaaagcagattatgaagttgcgggaagaagattgagttcggtttggcttttatgatttttagtgtagaaccgacattgacttcaaaccgtaaaaccccgttaaaggggcttagacattataccggttttaatgtccggtctgattttaaagattgcaataattggctgaccaaaggtccaaaagcgtaagacactctggaccgactagaggtttccaaactcaactgtatttagacatttgtgtgattaagaagaaatgtgatcctcatatggttaagtagttgttgtaatatttcctttttgttttgtttatcaggtaattccattatataaaagacttaagaatcggtcaaaataacaatgtcactttctccttatatctctctgcttgaccaactctttttcactctcctaccgttattaccacttctcaaactgctacatgctttgattaatcactaaaatatctttaacaactcgtttttttggtttgtgaaatgaatctgggacattgcagaagggaaagaaacatatgatgttctatcaacagaattattgattcgtggaaagtaaaatcactgtaaaagagaaaaagatg

SEQ ID NO: 14953 - DNA, 3000 bp, Unknown
  misc_feature (1)..( 3000): cDNA_ID_1440790_gDNA_ID_2684236_Annot_ID_137710 3000 nt of promoter + ATG
attctctgtaaccctccattgactctcttaccatctgcaccaaccttgtcattatacttccacgccaattgccatccaccgcctatgcttgtagccgtcgctgtctcacccacgtttgccataaacaagctgctctgtcgcctatgcatggtaccaacggtccgctggtggtagtcatccggctcagtggtttgcggagaaagcagaggactgtttaagttttcatcttggtcagaactatcttcattgtttctctctggatcccactgggactcctgccttcccatcattcccagtatacttcccatattggggaagagcatgctgcgggatgatgcgttcatgttctcggaagggagattctcatgaatgctaccaaagagagtgacaagtgggtccatgagggatccgccacgcggtaacatgctgccttgtcgggaagccaatgcgagagaactctgtcctttcactggcttagccatccatgactgtccatcctctggaccatatagttttatctgatctttcctcggcagttcatttccaccctcgttttcctcgttgtctggtccaatcacatattcttctatcgacgtgtcttttcccaccccaagcccttcaaccagcagagcaagctcgcctaaatcataccccgagttagtataagttcaaagatcgataatctagaggtcttagtgttcatcaagacaaacctgaaacatcttctctgccacggagtctctgcagaacctgtctagcttcatccatacggcctttgctgacaagccaccttggagattcaggcaagaagaaagccgcaagtacaaagtaggcaatggacggaattgacaaaacaccaagcatcagcctccagcttggtgattcttgaagcgacatcccaaacacaagacaatacgacaaaaacatcccaccggatccacaaaactgcgggaaagtgttgagtaatcctctgatctcagaaggtgcggtctcagagatgtagattgggacgagagtgacagctaaaccgatcccaaaaccatcaagaagccttgcgaaaaggagaacgtagacattgggagaccaaaacataacaatgctactcagaaaatagagaacagaggagagtataagcattgatcgccttcctactttgtcagagacaggaccagagaaagttgtgatcaaagtggctccaatgagagacattgccacgatcagtccttctatctttggttctttctccaaatgaaattctttcttaatgtaaattacagctcctgccaccaagaatcaacatcaaatcatagtgagatttcgttagtatgcaaaggaaaaagaaagagaaatatagaaagagagatacctgcaatggtggcattgtcccagccctgcaacatattccctatcgcagcggctaaagcaacaagcactacactcctcatctttttctcttttacagtgattttactttccacgaatcaataattctgttgatagaacatcatatgtttctttcccttctgcaatgtcccagattcatttcacaaaccaaaaaaacgagttgttaaagatattttagtgattaatcaaagcatgtagcagtttgagaagtggtaataacggtaggagagtgaaaaagagttggtcaagcagagagatataaggagaaagtgacattgttattttgaccgattcttaagtcttttatataatggaattacctgataaacaaaacaaaaaggaaatattacaacaactacttaaccatatgaggatcacatttcttcttaatcacacaaatgtctaaatacagttgagtttggaaacctctagtcggtccagagtgtcttacgcttttggacctttggtcagccaattattgcaatctttaaaatcagaccggacattaaaaccggtataatgtctaagcccctttaacggggttttacggtttgaagtcaatgtcggttctacactaaaaatcataaaagccaaaccgaactcaatcttcttcccgcaacttcataatctgctttcccaattctctctcgtcggcgaaggtcctgtgaaaccctagacaaatcgcaggtaagttcgactgtagaaatacacactgatatctcaatttatgttctattctctgcttttgaattgagaccatcgaattccattgtttctctgatgcttttttaatctcacaaaattgttaattttgatgatctttgagcagagatgcaagattcaaagattccacctttctctgaagcaaaaagaatgaagattcctactccaaaacaacccttgactcaactaccaccacgtatcgggaaaaaagtttcaaatcggagcaaatcgaaccaggttcatgcgatttcacatcaacttgagatgtctccaaattcagattcatctccaggaaacgagtacagagcactgagacgcaagtatttgctgctagaggaagatagtttcgcgttggagagagagttaaaggaagcagaggatgaggttaaagcacttgaagatgagaaacttgagctcttggacaaactcgttgttatggaaggtttagttgatccttgattctatagcttagcacttgttttatttgccacattcatatgtaaaaaatcgccttatctagtaacattgtttctgcttatataacttataagcttttgttgtgtgttgagagaattggagatggtaaagaaaactgttgtgttcacttgttgtgtctttcgagttaatacaatggtttgggagtaaagacttaaacttgctacagtttttactagattctagtgctaaatttaaccaaaactgtgaccaaatgtcgtttatttgcaccacgtgtccttcatccacaacagaatgatgatggattagatatttctattcaaaaactataacgtgtggctgcaaatcgattcaccgcttcagactctgttttagaccaaagtcgagtgagtgctttcatcttcttcttaagcatct

SEQ ID NO: 14954 - DNA, 3000 bp, Unknown
  misc_feature (1)..( 3000): cDNA_ID_2731279_gDNA_ID_2684236_Annot_ID_137711 3000 nt of promoter + ATG
aacggtaggagagtgaaaaagagttggtcaagcagagagatataaggagaaagtgacattgttattttgaccgattcttaagtcttttatataatggaattacctgataaacaaaacaaaaaggaaatattacaacaactacttaaccatatgaggatcacatttcttcttaatcacacaaatgtctaaatacagttgagtttggaaacctctagtcggtccagagtgtcttacgcttttggacctttggtcagccaattattgcaatctttaaaatcagaccggacattaaaaccggtataatgtctaagcccctttaacggggttttacggtttgaagtcaatgtcggttctacactaaaaatcataaaagccaaaccgaactcaatcttcttcccgcaacttcataatctgctttcccaattctctctcgtcggcgaaggtcctgtgaaaccctagacaaatcgcaggtaagttcgactgtagaaatacacactgatatctcaatttatgttctattctctgcttttgaattgagaccatcgaattccattgtttctctgatgcttttttaatctcacaaaattgttaattttgatgatctttgagcagagatgcaagattcaaagattccacctttctctgaagcaaaaagaatgaagattcctactccaaaacaacccttgactcaactaccaccacgtatcgggaaaaaagtttcaaatcggagcaaatcgaaccaggttcatgcgatttcacatcaacttgagatgtctccaaattcagattcatctccaggaaacgagtacagagcactgagacgcaagtatttgctgctagaggaagatagtttcgcgttggagagagagttaaaggaagcagaggatgaggttaaagcacttgaagatgagaaacttgagctcttggacaaactcgttgttatggaaggtttagttgatccttgattctatagcttagcacttgttttatttgccacattcatatgtaaaaaatcgccttatctagtaacattgtttctgcttatataacttataagcttttgttgtgtgttgagagaattggagatggtaaagaaaactgttgtgttcacttgttgtgtctttcgagttaatacaatggtttgggagtaaagacttaaacttgctacagtttttactagattctagtgctaaatttaaccaaaactgtgaccaaatgtcgtttatttgcaccacgtgtccttcatccacaacagaatgatgatggattagatatttctattcaaaaactataacgtgtggctgcaaatcgattcaccgcttcagactctgttttagaccaaagtcgagtgagtgctttcatcttcttcttaagcatctatggccgcgtctctaacatctcttccgaccggtttttgtcttagccatggtgatgaatgttgcaaccgttcacctaccaaatcaccatttccaggccatcatcctctggctgggaggaggaagggtcacttgctccattacgaacgtagtacagtgaggagattggttgtgacggcggcgacggagggatctaaaaaatctaaagaaagtgaaccgtcttgggcgaatcctgactcagatgagccacctccttgggctagaaacgaaggtcgttcttctacgtcccaagagagctttgaggttcctttctttgtttatctgctagcttccgcgattactgccattgctgctgtatgcttcttcttctctctctttcactccttttgttgtttgcattgctgattctcatatcaaagatgttatcttaattatgcatcgtttggtcactgtagattggttctgttttcgagtacacaagcaagaatccagttttcgggatcttggaatctgacagcatcttttatactcctgtgcttggattctttgctcttactggaatccccacttctgtgagttccttgtctctctcttttcgtttttatccatttgatctgtatcagctgaaaaaatggtttttttgcgttcaggtgttcctatggttcaaatccgttgaagctgctaataaggaagctcaagaacaagataaaagagatggctttctttaaaatccttttgtgtgattctgcaactcatacagtgatgattgttgtctccacatatactttgaatataattctgcatttacaaaggagcttgcttctgttcactgtttatcacccgctagattttgtttgtaatttcaacaatatgccatgttccaacgagtaagtgcctgaaattcgatgatcagctgtcctctcttttatttgcccctgtgaaagatatgaatccacaaagaattcgatatgccatcctgcggtttgaatgtctgaagctgatggtaatgtcaccatttgttcaatgagttgatattcagatcaacaatttgttctggaaagacattgcctgctttcatttgttggtaggagattggagtcaaaatatcagttgaaagttaattccttggcgcttgaagattgtgcttgagcagaggctgtttccggggaatgatcacatacaaaatcatgtgtttaattggtttgtctatgaatgtattttcagttgaatataagtcgagctctaggctcaatttagcagccagaagtgatacctttggaaggaagatatctaattggtaagcaaaaactgttaaaagcacttacatacagataaatcaatgtcctttggcccaatattagctttaacaaaggcttaaccttttgaaaactccagttaggcaataattattacgggtcaaatgacaaagaatgaaccttgtcgggctctttaaagatgggttgttgtataaaaagttgggtagttaaaagattggttatttgggctctgcactcaagtgagagagaagatagatagatctgagtagaatcttcgattcattattcgttgtcgtcgttcatctgtgagaagcggacaaaccaaagaatccaccggagctagtgat

SEQ ID NO: 14955 - DNA, 3000 bp, Unknown
  misc_feature (1)..( 3000): cDNA_ID_2731276_gDNA_ID_2684236_Annot_ID_137712 3000 nt of promoter + ATG
tcagagaggagagaatagatcaggaggagagtcaaaagcattgtcgaagatgagagattgaggagattcatcatcaatgttaagtagccagtttgtatccttgacatctttaacattcaagagtgcgtcgtaacgagcactatcgttcttgttctctgtgttgttcccttctttcgttaagcttcttccatcttcctcttcatggttgctgctgctgcagctgccttcactactaccacacggttttcttagacccgaagaagaagatctgatgctgtgtggatacaacattgggcttgaaaacgtatgtgtactaactttaccatttcgtgccaagtcctgcatttgaagtgacactattatcgtcaagcaaaacctcataaaaaacgttactatactattgaccacgataaacgttataaatgacaaaaatatttagctataatcaaataatgacaagagaacgttattaccaagtgattgatagccatttgaacagaagctcttgacaacttccttcctggcctagttgaatcggcaacagtggcagatggctttatagacttgggagttgttgttgtatgtgaggtgcctgaaaaagtcggaatcagagaaggagaagcagagcgtcctttaggcctcgttcttgtaacatccggtgaggtgtttcgttttggcgagttaacatgacccactggtctaccaaacgctagagtgactgtttcttttagtcttggcggtgtccgaggtgttgctgaaactgttgtgcttctatcaggacgtgatgttacagacgaagaacgcacattggtcctactacttgcatttgctgcaatctgaggctttgctcttggagtcaacgatcttgatctttgagcatctccagctgttttgaaggaaggagtggttgaagtagttgtactgattcttgaaggagttgaggttggtgatggtgttttgcgtgatgagggagtcaaagatcgagagacagttctttttggagaagaaaccgaagctgaagcttgaatttgtgttgttgttgtcttcttggggaccgaagaggatctgatagtgggaatgttggagggacgaattgttgaaccgcttctcgttggtcttgaagatggatcactctcgctctacatgaaaaaatataaaaatattacatgagcatatatgatacatgaaattatagcgagcttgttgcatcatacccttaaaggaacccttgtagtggttatggactgaagcttggaagttgtgtttctagcttctagaaccaatctagaaagatctcctaatggaacttctgcaatggtataaagcctaaggaacaaagattataaattataataacttgtttgcattgtctatttcaggtttattattgcgtataaattcaaatgagggattacataaattcttacggttcatttgcatgtatattgtgattattgtcatcatcaggtccatgcttagcaactttagcttgttggaaagaatgtcttcctggtttaatcaaaactgcataccatatagatcaacatgctagatcacattaatatggatgacttattggaagacgaattattgtatacaaagattggcaaaaaaaactagcaaattgaaatgagaatagcatgaaagcgatcttagaatgcaaaacgtgatagcaatctaaacacaactggaagaacaataacaatgtgtgttggtgtagaaaagcaaaagataagtcaaatggaccaaataatagatgatgataccatccaaagaagttccacggttgactgagaagagatccaaattctcatccgcctggcgattgcttttaccggggagagactttttcagactccgatcactcatcgacggtttaaaaacacacgatcaaagaacagggaaataaaacagaagtcatataaagacaaaagagagatagagatagagaatgtttcaaaatttggttaaataaaataaaacaaaggcattttccattcccgtgtggttttggttttcatgtcattttcttccattttttataaagcatgagaggaagataatgtgaacatagaaacttaagattagctgattatattatgacgtgtaaatagacgtgtcacaatatatgctgcacggaaataaagtagttatctacatgtgtgtgttacatttatttgataatctaatttattcggtttgctttgattcggccaatttctgtttaccaatttttcaaaaatacaactataccgcggatttatttcacaaagatgccaaaaggttacaattatattcaattccgaagaaaatagcttctgattctctgttgaagctttcgtgttaaaaaaaatttgtaaccaaacgaaaatctgtttaaggggtctatatttcaaatcactacttattaaaccgggtcggtatcatttattctagagctggatttaaaaaccaaccggaaagtaaccatggttggctgatcgtgttagattcggttcggtttaaaaattccaccttaacaaaaccggtttacaattaaaaatggatccctaattttctcaacagttgtcgtcatccgtctccaaatttttttaatcgttcttctctagtcatatcgccgtcgtcgtatgtctctctcacaacaggttcagttttgatcgttattgcgtttggagtgtttgcattacgatatcactgggaaccaacttggggaatgaaaaattctgaaagattttctgcagcaaagccattgatggaacaagggtttgtttcttttctctgcatcctctttgaactgttctttaataatctaacctccgaaaccctaattcttaattttattttagtggcaaaagttcgagaaagccaggttttatgagtgaggacagaatcagtgagttgcctgaagttttgcttctgcagatactgtcttcacttcctacaaaacttgtcatatccacaagtgttttgtccaaacgatggctatctctttggaaaatg

SEQ ID NO: 14956 - DNA, 3000 bp, Unknown
  misc_feature (1)..( 3000): cDNA_ID_2731274_gDNA_ID_2684236_Annot_ID_137713 3000 nt of promoter + ATG
tgctactagacgttactatgcacaatgcttacttgtgagttcagcattcattaacttatgatgttttgggcatctcagattgctaagtttcatggccagtatgtggaagcgcttagggatctgtttgagaggcacaagtcccgagtcggctatgatcttgagctgaaaattctttgaacaaaatctccaatggaaataattacttgtgtgtatccttcattaattgttaccttggagctggatttggacttaatataaatgactacatcatgtagtctacatgtattgcatgtctttagcatcgactgttgaagtaatggaatacgtttataaagcctgtaaattacatgtcgtcttgcacaagagtatgtggtaataataacatttgacccaaaaataatactagttaaatttttccttgacttctctgacaaaccaaactaatttgttcatgaatctctctaagcaaatgaaagtaacaccacgtagtaaaagctctgcttgatgagaaggattcttacacatataagatcattcgaattcaaaaacaaggtggcatgaattggaagtcatgaccacaccatccaattcctcgcgcatcttacgtcttttggccaatttacagagcctcttcgcttcaatgggatccgtagagaaagttgccttcttcagctgtcttgcgttccttagaatgtacgtcgccacttctttctcttcttctcttccccaattgcaatttctccacataaacgtttcgagacattcagggacatactttggttgattccatttcccttggtccttgtattttttgtcgaattctagattttcatgacgagtctcacgctaccaaaagggaaatgaaatgtatattagaattagtccttcaaaactaaccccaacgagagaccatcaacaatagctagctaactaataatgaaatgtcttacatcaatgagcttgaggacttgtagtttaggagagctatcaagcatgtgcgtaagtagattccaccactccactttatgtgtatgcatctccagatataccagctgatggtacataacttcagtaggatatgtaatctattcatgagacaactattagtatatacagaaacaacaaacaagtcaagtgcgataaaagcgaagttaccttcaaaggtgataagtccaaggaaagacgtttggctgacttgagagatcccaaaatattctcattgactatcttagaaacgtttctaatatttgcctcaactagctcggttacattctcaatcagaaaatactcaaaaccttctacactttcaattcccaagtacttcaaagaaggagcttttatcacatatcccctactactctctcgcgcactaaagggatcggaaagcaaaagtgtcttcaaagatggcgcatcaatgatgaaattcactacagcatcaaagaagaaacctcgacgcaggaccaaatgttcaagattagggcagctagcaaaaagattatgaccagattcatcgcctttgtagaccacagatagaaggtgaagagttctaagggacttcatagaaaccggacaaggaacataaatataaacgtaatcaagtttcaaggtctcaagtgtatcaaagcaaaacaagctagttggaaatctgactcgagggccatggtaagaactaagatcgagtacgaactcacgaacatggcgtgtaaatgcaattgtagcccatactccaacataaacaccatcaaattgatctccaactttcagatgcaaactctctagaactggagctttatgtgaaagcaaagacctggtaacgttttcagcaaagtcatatatgtttcgagaagattcaaactcgagtctttgtaccattttccaaagagatagccatcgtttggacaaaacacttgtggatatgacaagttttgtaggaagtgaagacagtatctgcagaagcaaaacttcaggcaactcactgattctgtcctcactcataaaacctggctttctcgaacttttgccactaaaataaaattaagaattagggtttcggaggttagattattaaagaacagttcaaagaggatgcagagaaaagaaacaaacccttgttccatcaatggctttgctgcagaaaatctttcagaatttttcattccccaagttggttcccagtgatatcgtaatgcaaacactccaaacgcaataacgatcaaaactgaacctgttgtgagagagacatacgacgacggcgatatgactagagaagaacgattaaaaaaatttggagacggatgacgacaactgttgagaaaattagggatccatttttaattgtaaaccggttttgttaaggtggaatttttaaaccgaaccgaatctaacacgatcagccaaccatggttactttccggttggtttttaaatccagctctagaataaatgataccgacccggtttaataagtagtgatttgaaatatagaccccttaaacagattttcgtttggttacaaattttttttaacacgaaagcttcaacagagaatcagaagctattttcttcggaattgaatataattgtaaccttttggcatctttgtgaaataaatccgcggtatagttgtatttttgaaaaattggtaaacagaaattggccgaatcaaagcaaaccgaataaattagattatcaaataaatgtaacacacacatgtagataactactttatttccgtgcagcatatattgtgacacgtctatttacacgtcataatataatcagctaatcttaagtttctatgttcacattatcttcctctcatgctttataaaaaatggaagaaaatgacatgaaaaccaaaaccacacgggaatggaaaatgcctttgttttattttatttaaccaaattttgaaacattctctatctctatctctcttttgtctttatatgacttctgttttatttccctgttctttgatcgtgtgtttttaaaccgtcg

SEQ ID NO: 14957 - DNA, 3000 bp, Unknown
  misc_feature (1)..( 3000): cDNA_ID_2731262_gDNA_ID_2684236_Annot_ID_137716 3000 nt of promoter + ATG
gttctccaaatctaatacaaccagttcagaaagatgcatgagcgaaggcagttcttttatggctgtaccaccaagatataactttcttaggttttttggtataccctgaatatcctcaagctctaagcattgagaaagatcaagaactttgaggttgtctagataaaccatgattgacagactttgcgaatcagacgagacctcccgattcaagaatttgtgatctttatgatcataaataaatgagttatcttgtggagagaaggtcacagttggtattgatcttatgccagtttgtttgagatacagctcctcaatattaggtggaacctctgggaaacttttgatctttatgcaaccagagagatttatcacccgaagatgctggaaatgacctgttgctagaaatctttgtagtcttgcacaaccttggagatcaattacctccatatttagagcaatttggagttcttgaataccaactagctgttgtgaatgacaaagcatgatcctcttcagcatcccaagttcctggaaaaacaaattgttaaaaaaataacaacagagacgcaaaatagtaattggttttcaaatgcatatagactttcttaccttggttccttcccaaagtctctgaagtttactgtaacacatgttgagtataacaagatttctagtgttaaaatcttgtggtaaggataacaatggaaaatgttcccagtgcagtaaccttaactcctccggtagggatttgacgcccttgggaaggtgtagagcataatggtttccaggattggaactgcaaatcttcagatatctaagattatacatattctcaaacgccataggattgacatcaaagcttaaggcagatgggtccagaaatatggcttcaatatcttcactaccctgaaacaacaagggaaatagatggatcaagaacttggctcaaattccaatattgagctttgtgggaaaataacagaattcaacataccaaaacttgtctatcttctagaaaatacttaattatcaaaggtttccacagtctggaacgcctctttcctccattgataattttgcgacctatggattggatcaaattatgcatcacaaccctgccttctgccatactcaccaaacacttctcaacaagaacattgatttcaacacgtggaaagaaaccacatccctcaagcagatgtattacacagtcgacattttctcctctgaaaagacacgcaatatcaagaaatatgttcttctcgttggaactaagcgaatcatatgtactcttgactgcatcatgaatctcatgtgccagatatttcttgactttggggaatgcaatctctataggtttaggattcttccttgacatacatccaaaaaaaatcagagctaaaggatttccattagcataatcaatcactttctttgatagtttctgcaaactctcatgtataatctcctttccgaatgcacaccgcgagaatagctgcagagcctcttcctcatttaaacctggaacctcatatatctgatcgacccgacatatagaaaatacttgtttatctcttgaagttatgatgatcaagcttcccggacaaaaccaatcaaaccctccaagaaaggactctgcatctagaggcttacacacatcatcaagaacgacaagaactcttttatggcgtaaaacatttctaaggaggatcggtcttgtaatcgaactttttatgccaagctcttccctaagaattttcccaaagtgtgcctctaacaaaccataaagtcccttctcatgaaacgccttgttaaagtctttgatgaaacaagaagcctcatagtcaccagagagttggtcaaaagcagctttagcaagagttgtcttgcctatgccgggcattccccatattcctatgctgcggacaccccacggttgcttgtaaatcaatgtttctatcttccccaactttgagtagattccaatattgtctgacatgttgagcttttcacgcacatcagccacaatctcctccacaaagtcagagtcactgcatatttttgtagagaatgagtaaatattccaaagtggtctaggtctagtgaagttaatgatttaaaaatgcttcaaagttcaaacctttgcgtatcgtataactcgtggcctggtaagtctacagtttccaatagagcacttggccaatcgcttctaacatcgcccaaattccagatttgtttcttcataaacgatttcgtgactgggtaaaataccggaaccaccgcgagacagtttttccgccggcgttcggaaaccttgaccagctcctccatgcatgacttggatgacgagtatttctcagagaaaaccactacagaagccctagacgtctccaacttggagaatccattgctttccgaatcggagccgttttctctgatgaacgaagatattcctctgcggcggaaagcggcgcagaggtggctgacaaaagagtaccgcaccgtatcctcacttctgtcgaagctgatgtaaacatcgctgcaatccaccatgattgtttaggcgcgtttttcttgcacctagatttaggggattttcagttttttttttttttttcatttagactggatcaagtcggaattagtgaattcgtaaagagacgtgcctcacgatgaagaagtcgttccgagtagagtgttgacctagtttttcttacaaatttcttggaattgtgttttttgatcgaggccggccaagttcttctcggaagtttcgcttattctctttgtcacaacacctcaacttgaacttaaataaaaccagaatgatagttaagttttatagtttgtttaattcgtagcaattctttttgttttgtagatgagtagaacaggtcaagattttgaaaaatggtatctctaaggttgtttgtgcaagcatgtcgtcttgtatctcaaaaggaaactcaagaacgatttgtttccaaacaaactccg

SEQ ID NO: 14958 - DNA, 3000 bp, Unknown; identical to SEQ ID NO: 9729
  misc_feature (1)..( 3000): cDNA_ID_3019747_gDNA_ID_2684236_Annot_ID_137718 3000 nt of promoter + ATG

SEQ ID NO: 14959 - DNA, 3000 bp, Unknown
  misc_feature (1)..( 3000): cDNA_ID_2995065_gDNA_ID_2684236_Annot_ID_137720 3000 nt of promoter + ATG
gaaagcagagggtgcaaatcccaccaatctgattgaaagagatatcaaccacgatgttttgcaccagacatttaacaagcttgacctgcaaaagaaaagaaatttaggtacttgaggagataacaatcaaaatgataagcatgcataaacaccatatacaaacttggaatactcattggtcactgcagactctagtttctggaatttgaataacacagagattatgtaaacaaacctcagcccgtattaactgcacatccttaaccacaaattgggaggacaagttatgctcttccctctcaagtacagcaaaaactttggcagccagttcttcctcatgatacagcccaccaaaagcagtgagatcaatgtctccatcaggaagatacgttttcaatggaaccgatccaaaagaatgtacctgaaagacacataccagtagaaaaaatcacaactttgcaaaccacactcatagtcaatcaaagttataagccgcaacattgcagaatctctggtcagtaatagaaaaaaggtctgctttttgcacaccactttcgaaatataaaacaacaagtagatgacttgagataatctaacaagaaaagccatcaacttaagaataaaaagacacaagacaacattaaaaagccatcaacttgcatcaagagaactcaataaaatgcagaacaacatcgccgactcaagtaaagttccaacatttaaagtttttatccaaatgttaatgcaaacagagaatgttttattcaaatttacctcgcatccaagtgtcattctgataagtttttgaacatatagaatcacatctcttcgtcgatcctcggagacaagagttggatgaacctgctctataatttcacgggttgcttcctcaactctcatccacaactccggctgattcaacggagaccgaggcggcggaagaagcggtggtgataatgaggaagaactctcttcttccaaatcatcgagatccgcagccatgaaaaacaacaaaaacctaaaaactaaccaaaaaaatcgattgatacaagaacacaccgattgatcaaaccaaggaatcagttcgttgtaaactacgcccaggaaattgaaaatccgattgagttcgaacaaaacaagcgagtacaaagaatcgagagatgtctcaggggaagaagaagaagaaagatgagttttttcttctaggttttgaaagatcccaagtgattactgttgaggaccgattttgtgttatttgattgttctttcttctctctcttttttgttttcactgcatcggaaaaaaaaaaaaaacaaatttgtcttaactttgtgtatgcaacttgaaacccttttagatgtcgctctttttgtgtacctttttatttaccttaacgatgcagtatttagaaacaacgaccagcattaaattcttaagacatcatttgaagtttgattagagtgacttgggaagttatttgttcagaattttgatttcactatagttggttaaattgtaaagttcagatattcttccattaagtttttatagagttgtgattcttatgaatgttttaagagaaatgtcaaagattttaatacatgttttcatggtttagctttatcttttttatcattcaaaaagttagaaacttttaactttttttttctatgacatactaaattctcatgtaccttaacaaatataaatttttttttatgatttaactaacgcagtcgcgcttttttctattgaataagctcgattatcataactgattatgcttttaaaaacgaaaaaggtaacatttgagaatcattgtcttcaaaatcctttattcgagttaagttataaggggatccaactgtgtttcacgtgttccagaaatttgatcacctgttattctcgaatatgattttgttttgacgtggtatccacatataatgatatggttagtaaaacaaaataaataactccaataattagataaattaataattaattttgttctataaaagaattttaaattgaaaactccaattacaaaaatctagtaaacgttttgttttggaaaaaaaaatatataaaaatctctaattttagtcccgttttgaaaacaaaaatcaaaatcttgttatacacagaacaaaacaatatagaaaatctgcaaaacaaaatcaaaatttaagaattttacatggaatattaaaaacttatgtataatatttaaagcaacagattttactgatgtgaatataacagtccaaaaatgaacatcgttatatcttaaatatatataacaaaacatatttgttttaacatttagtcgttataacaacgacatttcaccccgaaactatattttcataattttttgtgaatacttttctatttcgaaatatataacacggtcttttaaatcaaaattaggaagcaatgtactaatgtattctaatactttgtgtaaaattttcttatctaaaatctcataacacaatccgtttagctacagatcagatggtcgtgttttttttttttttttttggtaatgatttaaaacgaaattatatacatcactaaaatatgttaaaccatgtctctttttttttgttctgatataagttgattttttggtttcgtcaataatcagttaccaggccctccgaccaaaacaaatatcagttactaggccctatacctggtcaaaactgagttggaaacaataaagttgggcctgatattttggcccaataataacacggatgagagttctcagttctcacatttgacatcctccgcttcaattctaaatctcccggcgaagaaaattaccggcaaatttcacggagaaacctcgccaacgaagcggagttatggcgggcatggctgcggtggcaggattacgaccgtggaacgcttttattcaagctctagttctgatatctctatcatttccctttctctccagcgcttaccgacctggagatatcgtccggatg

SEQ ID NO: 14960 - DNA, 3000 bp, Unknown; identical to SEQ ID NO: 9728
  misc_feature (1)..( 3000): cDNA_ID_2731258_gDNA_ID_2684236_Annot_ID_137721 3000 nt of promoter + ATG

SEQ ID NO: 14961 - DNA, 3000 bp, Unknown; identical to SEQ ID NO: 9728
  misc_feature (1)..( 3000): cDNA_ID_3019743_gDNA_ID_2684236_Annot_ID_192431 3000 nt of promoter + ATG

SEQ ID NO: 14962 - DNA, 3000 bp, Unknown; identical to SEQ ID NO: 9727
  misc_feature (1)..( 3000): cDNA_ID_2995065_gDNA_ID_2684236_Annot_ID_192430 3000 nt of promoter + ATG

SEQ ID NO: 14963 - DNA, 3000 bp, Unknown; identical to SEQ ID NO: 9726
  misc_feature (1)..( 3000): cDNA_ID_2114138_gDNA_ID_2684236_Annot_ID_192429 3000 nt of promoter + ATG

SEQ ID NO: 14964 - DNA, 3000 bp, Unknown; identical to SEQ ID NO: 9729
  misc_feature (1)..( 3000): cDNA_ID_3019747_gDNA_ID_2684236_Annot_ID_192428 3000 nt of promoter + ATG

SEQ ID NO: 14965 - DNA, 3000 bp, Unknown; identical to SEQ ID NO: 14956
  misc_feature (1)..( 3000): cDNA_ID_2731274_gDNA_ID_2684236_Annot_ID_192422 3000 nt of promoter + ATG

SEQ ID NO: 14966 - DNA, 3000 bp, Unknown; identical to SEQ ID NO: 14953
  misc_feature (1)..( 3000): cDNA_ID_1440790_gDNA_ID_2684236_Annot_ID_192419 3000 nt of promoter + ATG

SEQ ID NO: 14967 - DNA, 3000 bp, Unknown; identical to SEQ ID NO: 14952
  misc_feature (1)..( 3000): cDNA_ID_2731283_gDNA_ID_2684236_Annot_ID_192417 3000 nt of promoter + ATG

SEQ ID NO: 14968 - DNA, 3000 bp, Unknown; identical to SEQ ID NO: 14951
  misc_feature (1)..( 3000): cDNA_ID_3019763_gDNA_ID_2684236_Annot_ID_192416 3000 nt of promoter + ATG

SEQ ID NO: 14969 - DNA, 3000 bp, Unknown; identical to SEQ ID NO: 14950
  misc_feature (1)..( 3000): cDNA_ID_3019767_gDNA_ID_2684236_Annot_ID_192414 3000 nt of

SEQ ID NO: 14970 - DNA, 3000 bp, Unknown; identical to SEQ ID NO: 14948
  misc_feature (1)..( 3000): cDNA_ID_3019771_gDNA_ID_2684236_Annot_ID_192412 3000 nt of promoter + ATG

SEQ ID NO: 14971 - DNA, 3000 bp, Unknown; identical to SEQ ID NO: 14947
  misc_feature (1)..( 3000): cDNA_ID_1014464_gDNA_ID_2684236_Annot_ID_192411 3000 nt of promoter + ATG

SEQ ID NO: 14972 - DNA, 3000 bp, Unknown
  misc_feature (1)..( 3000): cDNA_ID_3019774_gDNA_ID_2684236_Annot_ID_192408 3000 nt of promoter + ATG
acagaggaggagacaaagaagtataggttcacattgcatagccagtttagttttgaaggatggatatatgaaaaaaatatgaagagagagaagagagaagaagaggaggattaaagagggtgaggccagcttttgtgctttggtagtagatgaggtttaaatgctccataccttccatttccttctctcttaccctaatttaattcttcctctcctttataactccccacagacattctcacttctcctcctcacacttcacatcaacacttctttcttgttttttcattttacaatgtttcctttgatatccgcactttaagcatgagagagtccctttgatattggcctggttcactcagatcttacctgaccacacacgtagatatacattattctctctagattatctgattgagccgcgccaatatctcagtactctctcgtctctattttggactttgtggtcttgtagatcgatttgtatgtgtgtgttgaaatggagacaagtacttgtaacttctttgttgttatattgtttacctataggctgatgtcataaactcttttgatcttgtttctaacttccagattcttgaaaaatcaagtcgtgtgtgtgtctccatggaagccttttccatttcttcttttccaaggtatccccttaatcagcttccttgccaagtataaatctgttgtagggttttgcttcaaataatctatatggatccttttagaatgcatattgtgttgataccaattttgagacagaatgtgtcagcgaaactgatcttgtttattagtacaaatgcaggatgttagagagttagctaataacatatacaacaaaatcacaaaaccggtgaagcaatgtaaaatgtcacaatcacaagatgtttttttcaaaaacaggggaaaaagcagagttaatgagagagaagctgacgagcacgaaccctaacctgcaagcgagcaagagcatgcatacaatgtaaagcaattcgtgcttgtctcctcacaagcactcctctagccaccgcctgtaacttcaccagactcttcaatgctttaaacgctcttcttgcctgcaaaacactttaatggttttaccaattttgttttttcaggttttcaaaatctacagagatagaaaatgtaaattaccaggtgccctctgaaaaaggcttggattttaacggcggcaatctcttctcgagttgtttctggagctgaagagcgaatgattgtgattctgctttgagatcgtcggagaagtttccttcttacaacaccaaacaaacgtttggagttggccatgtttatgggtggatcttgtcttcttttggttttggttttggttttaaaagaggacgtctaaggaaacgtaaaatgtgaataaaaagtgaagacggtggctttaagggatatatggaacatgatgtgctctcctcatttctaactaacgaacgtgctcgcatgctcctctctttacacttggtttcgttttgtttattagtagttttcaagacacacgagtctttggtcttttttacatttagttattgaattatagttatgttatgcctaactcaataaaaagaagcttattgagattttgaaaaggttattataaagggtgattgttgcatttcaatgctcaaaattaccatgttatgatatatcttataatcacatgtgaaatctacactatttttaaaatttatgatttagacaattttttcgaaaatgtcactctatttttcaacaagaaaataaaattaggtcattggtattgtggtttgtaatatactaatgacccccactacaatcctaccgacaaagcgtccactctttgtaatgaagttctttgatcatttctctattcaatcttgacactatgaatgtaatcgcgcagcggaagaatggttcatcatactcttacactgttacacaggtccagccctgaactaaagtgtttgtgtttttgtatcggatatgattagcaattgtgcatcaagttagttacggtctcttctcaaatccagtaaaccaaaaaatatataaaaaaatcatactctataataaacttacatcaaatgtcctttttttaacgtttatgttgggagtacgtagtgagatttttcagatatgataaatgtttatgtttgaagttctattttgagtatcatcattttacacgtctcctatcttttcttcaatcaataaagcctttgagcccacaacttcgtaataccgttaaacccaattgttattgggcatgaaaacaaggcccaactcaagtctatctcccccacttgttcatcttctattgtcttgttgcgagtttgcgacttaaacagtaattaaattactaattacgcaataatggcggattaatcgaacctactctctctctctctctctctctctctctctctctctctctctctctctctctctctctctctcgtgcatctccataaactatcttcaaagattaaattttgaagatcttctttttggcttattacccgattctgtcactgtctcttcttcttctccaatcccaatgtttgcttgagagaaagagagagagtcaaaccaaaacatgggcgtttgttgccctttccttcaaccctgggatcgagctcgtgatcaatgtctcctcaacctcccttgtctctccgatcctggtaccaatttcctctctttttaccctaatctatctcacgatccggtgtttcattaggttcttatgattctgtatctaattgctatcttcttcatctacccagttcgaagatcttctctacttctgaaattggcactagtagctctccacctcgtctttatcggctttctcttccttttcgatgctgaatttattgagaaaactaaacgagatccatggttattactccttatctctctctgcttattcaattactgtatccttgagcttaatgttgattactctgtgattctttctctgataggtat

SEQ ID NO: 14973 - DNA, 3000 bp, Unknown; identical to SEQ ID NO: 10752
  misc_feature (1)..( 3000): cDNA_ID_3019786_gDNA_ID_2684236_Annot_ID_192402 3000 nt of promoter + ATG

SEQ ID NO: 14974 - DNA, 3000 bp, Unknown; identical to SEQ ID NO: 10753
  misc_feature (1)..( 3000): cDNA_ID_3037848_gDNA_ID_2684236_Annot_ID_192400 3000 nt of promoter + ATG

SEQ ID NO: 14975 - DNA, 3000 bp, Unknown
  misc_feature (1)..( 3000): cDNA_ID_2731364_gDNA_ID_2684237_Annot_ID_137723 3000 nt of promoter + ATG
gcatgtaccacgtacgattcttcagaaaattaataattagaatataccgtatcactaacaacggtccaagttataagttttaaagtttagtgatgtatatatttgataagatataaaggagttcattaaataggaagtagaaacgacatatcaacagactcagtctaagacagcctaacagtaacaaatcaaatattcgtatcaaatgaaactgtaccttcaagtagtagaatgtattggcgttttgtgtgtgtgtgtttttcttcaatatacatgaacttcggtaattctttcttcacgattatttttttctatatcagtcacgcgaatttacataacgtacaatatctttcattgatttcattttctctaaaaaagcgtgtgattatatgaaaattctgtatatcattgtacatatctcaataaaatgaaaacttgtttttcgctgcaaattcaaaattttaaagcgttactttgtgtgtataatggaggagtaaacataacagtgtgaaatctttattcttctgaatatccagtaaaatttgagataatccaatacaacaaactcgtgtcacgctcaagtagtcaaatgtcgatttggtcacatccgcacccgtttattgaaacttatcaaatatatatcattttgaaaaagcaataagaaaacaaaggcatgcagagataaaaagctggaggaaatgaagaaaaagcccgtgaacaaatagttgaatggaataattagtatgcacagtacatatgaggctgtctttttaattaaaaagaagctcttacttcattctatttttttttttttttttttttttgtcaatccttacttcattctattataagtgattctgataccctatatttgtggaagataaaaaaaaattaaagctaatgagacgactttgagttaagttcaaacttttcattattaatcgcatgaaaagtcactatgattatgtttctttgttcatttataacacactcatcattgtatttaaataaaatttaagattgatgatgtctttaaatgacgattggtaagctagcaacctttaattcaaataaatttgcatgcatatctgacaaaccctttcatcgtcaactctatagatttagataactagatcccggtttcatcagcacacgaacattatatatcagattattccgttttactatatgatcattatttagatgttgccatgttgggttatgtattctattatttagttaaatgacgtgaccttacttctcttaaagattatataatcctcacacaaacaaactattttgaaaattttgttttgaattccaatccatccaataattcaaatgtggattaacgttaatattttgaatgttaatgcaataataatacgatgaacctaacaccacgttgacctctaacacctaacatgttgatctctagtgtgccaaaggaaaaaaaaaaaacacgacaaccaaaagctaaaacaagttatccaaaaaccagtaaacagaattcagaatttaaagttgctaattatatatcggcttagaaataatatttgtcttggtaacgaagtccgacaaatattcctgaattctgattttctgataagaaattgacaatagatagcataaggtataagaaacagtggtgacattattattacagtaataattgacttagcgacttttggaaatactatagttttgttgctctgacgcaccatgtcaacaacaactcactcacgtgacccctcctcaagttctcacttattcttaaaatctttctaagcttttctatcacattttaccaaacctcctgaaaaaatcgatttcatcctttccctttttcttgttctcatatctaatttcaaattttgaaatatggccaatgacgttagtggcgtttgattacgaattttccatcatttcacatttttatatctcgttgattgtaaacaaatttgcttgcttccatcaaagactctagtatacatacatactattgtgattatgtccttgagatttcgagccaaagtcaaaatactaatctctgaaattaacgaagcgccaagactgcttgttattttattgaaacatcagcattggttaactatgattgaaatcacatttgaaaaactccaaatctcccaacaccttgatgagtcattcgactattttaaatttagttggtctcttaaaatattcataataacatttacaatatctaacattactttttttttttgttcttaaagctgttttggagaggtaaacctctaataattttacagacagaattttggtagaatatagcaaaaaagagggtttgatggtacttttgcactgaaatactgaaatcatagttaggtataagccaaggttgacccaaaaaaaagaattaactataagcccatatcttattcatgggctttgatgttggcccatcaaattattaattctctgtgattatttgccacttttaaccattgcccaattaggcgaaaatattaatgagatcgatttctcacaatagagagggggctaattgatcaaatcaaaaactaaaggggtgaaattttaataaggatggattactataaataaatccgggatggaaaaataaaaaaaagttccgttttggtttcctcatctttttgtaccgctccgttgcgcctctctcttcttcccttcctctctctagcggcggagttacattgtcggccgccggggaaaccggcgacagtggattctctaaactcttaaactcgctacgtcgattcttaaaggattcatcgccgataacttttatacctccttcttttccgataggatcgggactcattttgtttccaacaccccggatccggtgatttagggcgctttttgatgcttatcgagtaaaggatttatcgatttaggtatttcgttattgatttgatctcggattttgacgggattaagattaaaggtccttactttgattttgtgtagtgatcgttt

SEQ ID NO: 14976 - DNA, 3000 bp, Unknown
  misc_feature (1)..( 3000): cDNA_ID_1808426_gDNA_ID_2684237_Annot_ID_137730 3000 nt of promoter + ATG
caatggcagatttgtacagaacacactttgagttcaacattggtccatcctagaaacgtaatcttcgaatcagtcaaagaaaaatagaaactttgtgaaaatttaagctaataataagttaataactacctgattgattttccatttagaatcagaacctgtgcatctcgaaaactttctactcgtaacaaaacccttaaattcatcttccaagagtctcagcttcacccccaaatcaagatcagcctgagttctctcataagcgttcctcacaatctcctctgtaaattcaggtttaaaaacctcttcaagcacccaactaaaccctaattccaaacccagaaccaacccaatcaccaaaatcactttcagaaaaacaacaatcagtagtcttctctctttcttcgtcgttttcctctgttcttcattctcgaaaacttttgatttcttggtcagtttcttcttcggggaagagatcatcaacttcaagattgggcgagaaacagaagcaggggtggtgaccaccgttggatcaaacgaagtcggagtagattcaacggtggatttgaaattggatgcagaagaaagcttagtgagagagcttttttgaacactgagaggcatgagatcaagcgtagcgttgagactatcaagacaaatctcgcagctacaattcgcatctttacgacagtctgggaagtaacaattactgtctcttctctcccaatcttccgtagatacagttgtagtagtcgtcgttgttgttgttgtgctcgatgtcattgatttctccgacggtgaaactaaaatctttcctttcatggtttctctgtttatcatctgattttcgttggccctagatttcatcaatctctaatttcattttgtatttttatcgttttgaaatttaaatgtcaagtcccaacggtcctctgatctcggcagtttttgtgttatgtaaatgactaacatacccttacttaacacgtgtctttctctttccttttaatgggccggattctagtttgggtccagttataatttcctttgtgtttcgaattaggtttaaattttactttattagaattaagcccaataacgagttttgttgccaaattttcttacttgctatatatgtcgtcaacatgcatactatataatctcataacaaagtttttttttttttttttctaaattgtaaatatcatataaatgaaaaaacaggttttacaaattttgataacctaaaccatttgaactctttggcaaaaagaaataaaaaacaaagagtcaatcgaaaactgggaaaaaacttggaagtttcatcacagtcacaacgccattaacttgcgaaaagggcgtctgtttcttcttgagatgataacgttttttatttcgcggtcgatgcacttgaaaatagaaggcggagagagtgaagtagcgttatgcaggacattgtttcgctgcttccagatgtggaagaccgtagactgaacgacgatgtttctaagaaccgatggagcggttgtttttttatgatgtgactctccatttttatgatgtgattacaaaaaatcaagtacagatactacttcttttgttatttcttggaaagctatgtgacgctgaaatcttcaaatcttttatttaaacccaattttacatgttaacatacatacacacctttgacaaaaaaaaaaaaaaaaaaaaaacaacgtacatacatacattcacaattcacaactccagtcagcacatttaatgtttatgcaaaatccacatctatagaattgttttctctaacgacattgttttaaggaaacgtcacgcgttattaatgattccttgcgacttagcttgtccataaacacatcacgagttccttctatatttgtgacaatgactattgactaatattatcaatttatatccatggatctagctactacttgataggtaataccataacaagaaataatcattggttaaaagccaacccagtgaatatcaacaaactccaactccaaatgataatagtttcatgtgaattgttttctagttaaggtaatctctcaaatcaatgtaattggcacggttttttcggaatttatattggaaaatgaagtctcaaggtataagattagtatatcctaactcgatttaattttattaaattttgggatactttgaattgacataaaactttgtttgcctaataaaacaaatcccaaatgatttttcttctcgcttcatactaagttttctttttttgaggtctcattctcatcctaactcctaagctaagtaagtagcctaactttatgaattgttgtatatcaacttgaaaaattaactaaagttttgttggaaacacctaccaacataaatgcttgaacgtggcatcttgattatagttcaacgaattagtattgctacttgctaaagttcttcagatattactttctttgtccaaggattacgaaactaaattctggtgacacgttatcccgttaactttaatcacgttatggtttaatcgtttattttcgtcacgccacagtttatctgatacaaaaatagatactacataaaatagatactacttttcacgattattatttctttcttttgctacatatatatgacaccatttttcctgtcaattataaatcctattaatttcataactacatcttgttccataattttatgttttgagtgtttttgcttaaccaaactcatttaaattatatccaaaaaaagaatcaaattcaaaaactagctttctttggtaaaagttagttaaggtagttgagtaccaaaagtcaaagtcaaagccaaattcgagaaattaccttaatatccttttccactatatatcatgcacacatatatacaacaagacatatcaccataactatttcatttacacagaacccaaaccaagacaatatttgatcaatttatcaaattctctcaacccctagtctaaacacaaaa

SEQ ID NO: 14977 - DNA, 3000 bp, Unknown
  misc_feature (1)..( 3000): cDNA_ID_2731334_gDNA_ID_2684237_Annot_ID_137733 3000 nt of promoter + ATG
agcattgcggatatatgaatttggaattaagtcaatctcaaattttagtctttgactgaaactctattttgctcttctttttaaataaatttttctggaaataaagcaagtcctgaggggaaaccatgacatcgttcgtagaggagacaaacccaacgatttggaatctcattgttgtctcattttggtgaatcgttatcattttgtagcttatgacacggtttttgtgccattaacatttcattagttgcagagatcaaaaagcaatgtaaaacagagacaaaaatcgcagagcttgagtaaatcaagttataaaacaaaacaacaaagccgacttaatcataatcttaaaaagcaaaaccaaaaataaatccattgtatcttctaatcttatttatccttgactgaaagtgtcttgagaaagtttgttcggagaaataatgcattgagaaggctctaataactatctgatttatcgtgtggttgtggctgagatgatttgcaatgtggctgatatgatccgtcttcatcatcatgaatttctccctcaacaatcaattgattaaatttctgggttctctcaaattctagtgttctttgattctgaaatttggggattttcgatcttaaatcgggtctactcaggttaaatccggtttcgtttagtcctaatgtggttaacgatgtctgggtaacaataaaccgattataaaccatgtttatgtgtgttttaggtttgaattttgattttatgtgttttgagatttcgaactttcaaattagggagaaataggagtagaacttttcatttgtgttgaccaagatcgaggttggaattcggtgtaagtctagtgttatatgaaacttccgagggacacacaggtcgttcacccttaaataaatcatctaaatttttaggaaatcaagaaactcaatatttaaataaagataaaatttgggaacaaataaaaagttaactggcgaaaaaaaaaaaaattgaaaaggaaagatgatatggcaaactatatgacatagctttctttatctctttctctttttcctctatacctctctctctttttaactttttatagtattattcttttgctttatttactttgtttgatagacccaaatcttggagagaaaatgtaatacaaaaaaatattatcatcatgtggtaagaaaaaaaaagatctacaaatagatgaatggacttaatttatatcagttcaatttcagaaagaaatagaaatggacaccgaataagttagtttacgaaaactagatgaaagaatcaaactagtttaggcaaaaatgttcttgcaacaagaaaaaaaagagtacagatagatgataaacacaactacctaactgatgaattggcaatactctctttttaagcttaattaaccatttgcttattatgttaactttgttaagtgttacaatttacatattcgagcgtataggtttgtggcaatttgtatcccagaattagtataagctttttttggtgcttaatcagtcaacatcatatacatatttcgcatgcaaaaaaaaatctctcttgcttctattacttttggttcattctgatccacttgtaaatataaattgcaccaacgattatgtctcaattaatttgtaaagtttcaatttttattatttaaattaacatgatatttcattcgattaaaaatgtatttgacatatgacacatcttattagctaaatgattatgatacaaaaaaaaaaattatcgacttttacttttattattacaagaagtgatgataagttcttactagagttgacaaaaccaacaggcatgtttctatcaatcatagattgtcgcagaattctataattatacaatattaatcacaactaaattaaatattatgtcattctacaattttttgtcagtaatattaaaactcgttttttatcaatcttatttatttttctttttttttggcaaaacgtttctacgatttatttatgaatcgagacgtacatactgatttttgcattttcttaagaatatagatcaactgtgttgaaaaaagtgtatagataaaatgttattggcgatggcaaaattcaagaaaaaaatgatatttgccaaaaaaaaaaaaaaagagaattaaagatttgaattagacagacgttgtcaacattaaatattcgtattggaaatctaatcaaatgggtctgtcaaatcgtggtattaaattagatgaataaaaagtttccaaaaacaaaacatagtactaattacaaacaaacaaaaaaacgaacttagccaaaacttaaaaataaaaaggtagagcaaagaacaggactaaaacactcactagtctctgcaactttatttttgttcaaaatacgctgcttttactttgcccgtttcattgaagctcctctctctccctttctttctttctttctctctgtagaatttgttaactttaactttctcactctaaaatctgccctcattgtctcgcctctgtctactttcaagaattgatgtctcttcaacactttctcttattttaagtctctctctctttgctacatttcctttttttctgtctctgccattaaaccttctctcaagaacaaaaaagaaagaaagccctcacattgctttgtccaaagagagtcttagaatctcaaacctatctcttagggagaaaccctgattctatattcttacttgctttcctttaagtttctgtctcgtccagagggacaaagccccccaattccagtcaatttcctttgtttttgatggattgagtttctttctgttggagaaagaaaaagaaaagagctacacatacacttgcagagaagaagcaacaatgagagaagagaaatccaagactaataaggtttctttattctcgaaatctattaactttatttttgcccatcttcatggaatttaaaagctgaactcttttttttattctatgaatttctgaaatg

SEQ ID NO: 14978 - DNA, 3000 bp, Unknown
  misc_feature (1)..( 3000): cDNA_ID_1827934_gDNA_ID_2684237_Annot_ID_137734 3000 nt of promoter + ATG
atcagcttatcattgatcaaaaaaaggttagaatatcaatatttccttcacaagttctgcaagacagaagaattgacaaataatataaagtcaaagtaagcaatcgagggaaatcaaatcatatacctgaatggggagggatacaccaactaaggtcttgacgccaagtactatatttgggtttccatcccattgcatatcaagttccaaggtaatcccatttttatcaccgtcgataacggaaacacctaacgaataccaaggagcacaagcaaaacataaattctaaagcaacaatacaatttcgtttaagattatggttcgtctttttgcaaactttaaacacacaatccgaagaagtgtaaagaaggatactgctgccattgcctgattatttcccagtcgaattgataattcactcctcagttgttattcaattgaatattttccttttgacaggaattcgatgactatcacagaatagtaggttacaatgtggagacacgtaaaagtaagaacattcttagtctaagctcaagctcaagaaaagttcacaatcaaaaggattccaccaacaattcaacatgactcaattgcacaagttctggtaccttacaacacaaagttttacacttaaaaagagaaatgaacaaaactaacctgtaaattgaggtgccactgtaccgagagtaagcttagaaaatgttaaggaggccacaatggcaggtctatattgctcaagaacaggctccacggatgcctttataagctcagaggctgcctaaaactccaaatcgaatcaaaagaggacaaaaaaaaaaactcctttaagaaacaatatctttatccataatacaaataacatatctctacttgaacgaattagacaatagaaacatacctcatcaacataaggccagatctttgtcaagtgatggttgagccaagtcaactgaagtaaataaaaagccaaagcaacaacaagaatcagtcccaagtatgaccaaattctaaaactttcgtgttcttccaatacgcagaaagagagagatgaaaacacatcaatatgtaagtaatgttgtaactcaacttctgacgctcggagaagacaacccaggaaggataaaactcaggaggcaaaagcttcctggaatcctccaccgtcatcctcgcaaaagcagccaccgtattcgccttataaaacagaaacaaaatcccgattaagaagaaaaaaaatcgaaattttcaatccgaaaaagggagagtggggtctcacaagttcagagcgaagcttggatcgagaattctccaacttgacaaagccgatgatgattgcgattccgacgaggagtccgattacaacgccgactatgaaacccatatttaatcgccggatttagaaaaattgcaatgtccgtattactctgatcaacaaacacaccagattcagttccacgagctaaaccgaatgaaaaataaaagagaagtaatttatttcttttctaagaaatctctataggaaaacaaaaataaataaaaaggtttttgattttaaattgggattagtctcattttaattacagattatatatttccgaagagttcgctaccgacgcagacgcaaaggttgtgctatcgctcgcaccaataatacaatgacacgtcatataacttggaatttacagaatcggtgagattttgactttgacattgttaaagacaaaaacaaatagaaaagaaagacagtgatggaactaaatccccggaaagattttgaacatcgtcaccggaacataatcgcaatgacaaagattgagctttgcaaatcctcacttaagaaacgagtccagagttctgatcatatgcaattaggatcttgggggactaacagttgatacttcattatacccttaaatcatgagatgactacataccataataagtcttgtactcgtgtagctgactggtttcggctatggtaatggctcattgatgttatgtgacggtacggtcttaagaagttagttttgttatacagttttcgatatttgcttctctaataatcctctgaggaatttgtaacttgtcacaaaaacataaacttaggagattaataatggtcccctctgtaagttattatcttctgactaacacagtttagcctttttcctaatttgtcaaagcctcataggacgtgatgtgttcattactgcgattagataaaaggtgggcacttaaagtgaagttggtacataaattttctttcatcatatttagaacttgttggtgatgtaaattaatgaccaagttccaatatcaaaaagactttgcgtgaagaactcatacctctctctattaatgacaagtattcttctctgttttctctccttggaatgatgttgtttgctactttatattctaaaaacctttgtttgtatatgtttgtaagtaatcatttttggttgccttttctttcaaacacaatattctttagtttaaaaataatataaaggtctaatagtggaattaaatgccagcaagaggaaggtagttgatttcaataatactccaatctccaatcccattcaaagaaagggtttgagattcttttataaaatagtaaatgattcgatttttttcatttaaattgttataacaaatctagattggtaaactaaaaagattacatttcaaaacaaaagcaaaaggaaaacacagaaaaaaaaattagaagcagtaagacataatttattacacattgtttgtcttgtaatgaaatatcttctcttcctgcagttttgagtgacgtgttgactctgtaatttcagagtggtcaaaaaggtaatttagaacagaaaaaaacaatgcttgaaatggaaactgattaatgagctgtttttttaacgaaatgtaagaaattttttgaccaaaaccaaaaagcagagtgtgtggaaaaatagtaccgttttggcggtatgagagacctcctgaaatagcatg

SEQ ID NO: 14979 - DNA, 3000 bp, Unknown
  misc_feature (1)..( 3000): cDNA_ID_1827922_gDNA_ID_2684237_Annot_ID_137737 3000 nt of promoter + ATG
taacttttatttgtccatttaatacatatattattaaattttcccaaatttaaaagctttcgtttatttaaattttggtacttaatggaggttctaactataattaaaatttaactcatggtatttataaatatatatactatctattctctaaactttacaaatatattaggttagtatggtggttaaacgtggattgactaactatcttagtaaatttggattaattaggacaaagagggattgactatcttaataaatttggattaattaggaaagaagggggattcgaacttagatttatgaagagaatcaatccacatttaaccattagattacactaatatatttgtaaactttagaaaatagattatacatttcgtgaatatcatgagttaaatttcaaccacagttagaacatccgttaaaatataataatcatgaatttgaatgtttgaattaaaaaagcatttaaaaacataaaattaatttagatattattcaaacaactatagatattaaacagatatttttcgagttttttctctataaaaatatgatattttttttctttttgacagcatgatactttttctttcgttctattttttttataaataaattatatagtatattcagcatgatacttattatgatctccatcatggcgtacgtcgtggatcacgccaaaagcggtaaaacatgttatctcatgtcacatgaccccaaatgaaatcccattactctcatctaatatattttccatttatatacatataacagcacaaatccacgaggagacacacctcgtacgtattaagaaagtcacttcaaaaaatggcgcaaccgcattttctactggtaacgtttccggcgcaaggtcacgtgaacccatctctccgttttgctcgtcggctcatcaaaacaactggcgcacgtgtaactttcgccacgtgtctctctgtcattcaccgctctatgatcccaaaccacaacaacgtcgaaaatctctctttccttactttctccgacggattcgacgacggagtcatctccaacaccgacgacgtccaaaaccggttggtacacttcgaacgtaatggcgataaagctctatcggatttcatcgaagctaatcagaatggtgactctcccgtaagttgcttgatctacacgattcttcccaactgggttccaaaagtggcgcgtagatttcatcttccctctgttcatctctggatccaaccagccttcgctttcgacatttattacaattactctacaggaaacaactccgttttcgagttcccgaatctaccttctctcgaaatccgcgatctgccttctttcctctcaccttccaacacgaacaaagccgcacaagcagtatatcaagaactgatggattttctcaaagaagaatctaacccgaaaattctcgtcaacacattcgattcgctggagccagagttcttaacagctattccgaatatagaaatggtggcagttggtcctttacttcctgcggagattttcactggaagcgaatcaggtaaagatttatcaagagatcatcaaagtagtagttatacactttggttagactcgaaaacagagtcctctgttatttatgtttcttttggaacaatggttgagttgtcgaagaaacagatagaggaactagcgagagcactcatagaagggggaagaccgttcttgtgggttataactgataaactcaacagagaagcgaaaatagaaggagaagaagagacagagattgagaagatagctggttttagacacgagcttgaagaggttgggatgattgtctcgtggtgttcgcagatagaggttttgagacaccgagccataggttgttttttgactcattgtgggtggagctcatcactggagagtttggttctcggcgttccagtggtggcgtttccgatgtggtcggatcagccagcaaatgcgaagcttttggaagaaatatggaagacaggtgtgagggtgagagagaactcggaaggtttagtagagagaggagagataatgcggtgtttggaagcagtgatggaggcgaaatcggtggagctgagggaaaacgcagagaaatggaagcgtttagcgactgaagcgggtagagaaggaggatcttcggacaagaatgtggaagcttttgtgaagagtctgttttgaggttttataaaacagaggagggtaaaacaaatgtaacaatcagcatgcaatgttgggtatatttcgtaactacaatttaataatatgtttttatagatgtatatcgtcacaacgtgtcttgcacagattcatgttgtaggtgactcatgggaacctgactcatgtatagttgagtttacaaattatatgcaccttcattgattcaataaaacttgtattactaacgttattgtgatccccgtttaaatttgttgcatttaatttgttagtctaatatttaatttagatgtgggttacataaagttgctttgataattgggatatgtttttttctgtctaatacacagataaaggcaaatatacgatcaatcacagttttaattatttttgttttttcaatgaaacaactctgacaaagaagatttggattggccaagtgatctcacatattctaaaatgtgagaaaaacaaaacagtattttgaattttttttatttaatagaagatttggtcaattgttaacataagttgatgatgaattagttgccaaaaaacccaaaatccattataacttttgcaattaattactctgttactttttaaccctaaaaaagcatgtatgtatgttattagagacagacgactctctctactcataaaatctctctcacatagatagatccctttccacagtttcgtctctgcttttgattcttctgaggtcccctgaatttacagaatcacaaagaccaaatttttcattccaatttcggatctttacccttaaaaaccatg

SEQ ID NO: 14980 - DNA, 3000 bp, Unknown; identical to SEQ ID NO: 5640
  misc_feature (1)..( 3000): cDNA_ID_1827914_gDNA_ID_2684237_Annot_ID_137739 3000 nt of promoter + ATG

SEQ ID NO: 14981 - DNA, 188 bp, Unknown
  misc_feature (1)..( 188): cDNA_ID_2731322_gDNA_ID_2684237_Annot_ID_137742 3000 nt of promoter + ATG
cttggaaagaaaaagcaagtctcttcctcttaaagttattcttctctcattattgtttccaccacagtggtgcatttgatctctttggcatgagggatgtctaagtggtttgtctgctttcctctgtttttgttcttttgcagattaagaggcttcatcttttgcttactgtcaaggagtcagctatg

SEQ ID NO: 14982 - DNA, 2932 bp, Unknown
  misc_feature (1)..( 2932): cDNA_ID_1829007_gDNA_ID_2684237_Annot_ID_192471 3000 nt of promoter + ATG
cttggaaagaaaaagcaagtctcttcctcttaaagttattcttctctcattattgtttccaccacagtggtgcatttgatctctttggcatgagggatgtctaagtggtttgtctgctttcctctgtttttgttcttttgcagattaagaggcttcatcttttgcttactgtcaaggagtcagctatggatgttccatccaacttggaagctcgaaggcgtcttactttcttttcaaattcactattcatggacatgcctcctgcacccaagatccgcaacatgctttccttctcgtaggttccagtcacgatggacatcttctcgtaggcttactatatcttaacatcttccattttgttttttcatagggtccttacaccatacttttcagaggatgttcttttctccatatttggcttagaacagcaaaatgaagatggagtttctatactcttttacttgcagaagatcttcccaggtttcacttttccatctgttttaattttttcatatggtactgttactttgtttgagctatcagctgagtccatggcttacatcagatgaatggacaaactttctggaacgagttaaatgtggcaacgaagaagaactaagagcaagagaggatttggaagaggagcttcgtctttgggcatcttacagaggccaaactctgactaaaactggtagactttagtctcctctcttaatcggttgaattctgcttcatttttctaacctgacgaatttatcttttgataaacttgttgtgcctgatttctgatctgtttcaactagtgcgaggaatgatgtattaccgaaaggctttggaacttcaggccttccttgatatggcaaaggatgaaggtgcttgaagaatcttctctgtgattcttttcgattcttaaaaagtatgaaagcattccttaaactaccttgtttttgttctagaattattaaaaggctacaaggctctcgagttaaccagtgaagaagcatcaaagagcggagggtcactttgggcgcagtgtcaagcacttgcagatatgaagttcacctttgtggtttcttgtcaacaatacagtattcataagagatctggcgaccaacgtgctaaagacatattgagacttatgacgacgtaatatcttcattctttcatcctttatctttccagttggtttgttatttagttcttagcctcattagttaagcttgctatttcctcatggcaggtatccgtctattcgtgtcgcctatatcgatgaggtagagcaaacacataaagaaagttataaggggacagaggagaaaatttattactcagcgcttgtaaaagctgctccacagaccaaaccaatggattcttctgaatctgttcaaacactagatcaggtataagttgagaaaactaagtaaaatacttaacattttggtgctcctttttttcccaaaatacgaggatgagtttaatcctatgcagtgaggtcagaggatatagatgctgctgttcaagagagactgagttatatttattttctgtcagctcatttatcggattaagcttccgggaccagctatactaggagagggaaagccggaaaatcagaaccatgctatcatatttacccgtggagaagggttgcagacgatagacatgaatcaggtgcgatgcgtagttttcttttgtctaacatgtgtcgctaatgaatcacatataatatgcttaaaattgttcaaagaataatcaccgcaggagactcttaacctctaaatatttgaccttaggacaactacatggaggaagctttcaaaatgaggaacttgctgcaagagtttcttgaaaagcatggaggcgtaagatgtcctacgattcttggtcttagagagcatattttcactggaaggtactaacagaatgatcctatttctgtcttctagatttttagtttctgtgtgcatactgatctcctatgtttgtggtttcttgtgaagtgtgtcttctcttgcatggtttatgtcaaatcaagagaacagttttgtaacgattgggcaaagagtgctagctagtcccttgaagtaagtttcttccctgttctgaaatcttgtcagggtattgtagttgtcaaaattgatgtgctctttctgttgctgctccagagtacgattccattacggacatccagatatttttgatcgtctgtttcaccttaccagaggtggtatctgcaaagcttctaaagtcatcaatcttagtgaagacatatttgcaggcactagcttgatctcatattctttggtggtacacatatgatctacttcattttttacattttttctcatacctttttactggtttcaggttttaattctactctgcgtgaaggaaatgtgactcatcatgaatatatacaagttggtaaagggagagatgtgggcctcaaccagatctcaatgtttgaggcaaaaatcgccaatggaaatggcgagcaaactttgagtcgcgacctttataggctaggacaccgatttgatttcttccggatgctgtcttgttatttcaccacaattgggttctacttcagtaccatggtaggttgagattctccctttttatctctcaatcactagatatatacatggcaggtttgtttttctttctcaagactgaagccattatctgtgtgttttgacagttaaccgtgcttacggtgtatgtgtttctttatggacggttatatctagtacttagtgggcttgaagaaggattgagtagccaacgagctttccgtaacaataagcctcttgaggcagctcttgcttctcaatcatttgtgcagattggttttttaatggctttgcctatgatgatggagattggacttgagagggggttccacaatgcattgattgagtttgtgctgatg

SEQ ID NO: 14983 - DNA, 3000 bp, Unknown; identical to SEQ ID NO: 5639
  misc_feature (1)..( 3000): cDNA_ID_3077964_gDNA_ID_2684237_Annot_ID_192468 3000 nt of promoter + ATG

SEQ ID NO: 14984 - DNA, 3000 bp, Unknown; identical to SEQ ID NO: 5640
  misc_feature (1)..( 3000): cDNA_ID_1827914_gDNA_ID_2684237_Annot_ID_192467 3000 nt of promoter + ATG

SEQ ID NO: 14985 - DNA, 3000 bp, Unknown; identical to SEQ ID NO: 5641
  misc_feature (1)..( 3000): cDNA_ID_1827922_gDNA_ID_2684237_Annot_ID_192465 3000 nt of promoter + ATG

SEQ ID NO: 14986 - DNA, 3000 bp, Unknown; identical to SEQ ID NO: 5642
  misc_feature (1)..( 3000): cDNA_ID_2159919_gDNA_ID_2684237_Annot_ID_192463 3000 nt of promoter + ATG

SEQ ID NO: 14987 - DNA, 3000 bp, Unknown; identical to SEQ ID NO: 5643
  misc_feature (1)..( 3000): cDNA_ID_1827934_gDNA_ID_2684237_Annot_ID_192461 3000 nt of promoter + ATG

SEQ ID NO: 14988 - DNA, 3000 bp, Unknown; identical to SEQ ID NO: 14975
  misc_feature (1)..( 3000): cDNA_ID_2731364_gDNA_ID_2684237_Annot_ID_192449 3000 nt of promoter + ATG

SEQ ID NO: 14989 - DNA, 3000 bp, Unknown
  misc_feature (1)..( 3000): cDNA_ID_3019895_gDNA_ID_2684238_Annot_ID_192493 3000 nt of promoter + ATG
taccccttagcgagggtcactacattgcccgtatcatggttttagtgaggtacaaattctaggtaccttctttagaggagttgatcaaagataccagatggctcttgattcagagaggaatgttaacttcaataccaggtatccggcagatgctacatctttgagcctgagcctgagtcagaagaaggtgtcttctacattgatggtcaaggttacaagaactttggacagccagaaggcaactttagtggcaacaggtttactgggaacaagagttcttcaggtttcagccccaaacctaccttccagaagacctatcctcagagcaacttcacaaggtcttatggtaattcttcttaccaaacccctcctccaccgtctgcccatagtaagatggaatccatgcttgagtagattcttgagggtcaggccaagttagttgtggacttcaatagaaagtttgacgctatctacacagatcttcatgggaagatcgacaatttgagctctcacatgaagaagctagatgttcaattggcttaaactgattagtctatcaagagacaagagggttttctttctggcacccctaatactaatccaacgaagagctgcaatgttatcttagtcagagatggagacaatgtataggaggaattggatacagaggacgagttggagctcacagctctagagctggtgtcgatcgacaccatatggtaaactcttttccaaaactacttctgaatagagtgtcgatggacacactcctaacgtcgatcgacaatgggtacgcattgcaccttacgagggtcatatccctatgcaacccaaccttgtttacactcttacggttccatatccgagaaaccgtcgttctaagcaggaagtacacgatacgaagtgcaaggcaataaaggagaagaacttgaccaccattcctaaggatacctcagagaactcatttgctcaacttattagatatgtcaagcatttggtcaacattggaatcaactccaaggaagccaacctgcttaaagagatatcagttccatactgttgaagaaggtcaagaaagactagtcgaagagattagtgctttctgaacatgttagctccattgccaaagggtaaatgataacactgtattttactcattttaggtgtatgtttatcatcatttacttttgcatttgctcattgtatcatatcattttgcaccattttagcttgttttgcatacttaggcatctaggatcatcttgcatatgcattgcatgttttggtatgttttcaggtgcagaaggagataaaaaggactctactcgatccatccactcgatccaggcagctacagaagaggcatcattctactcgacctctttactcaatccaggatgctacaaaggaggctgcagttaactcgaccctcttactcgatcaaggcaacctcagatgaagaagcagattgatctactcgcccctcctactcgatccatttactcgaccaagggtgaccatctctacaagacttgttgagctatcaaagcgtcttcggatcctcctcattccccactcaaccagacatctgagcatacatataggagaggagaagcatctactcgaccaattgatcactcggagcatagacacaaaggcgcagactttgcagcaccctctttactttatccccaagatcgagtattcgcccaaaccgcctcaagtctcttgtcttctagtgaatctagggtttcaacattttactataaatagatcactttgggggttgtccaaaggatctatgctttatctttcagtttttctttgtgtttatgaatcttaaaaccttaattactcttaatctgtttcgtttttgcatttagttgttttagtaaagttgtttagcttgtttagatctatattttggtataattttagtaatatctgggtttgtgttcttgagaatgttgtttaagtagtgattagggttcttgaggatgaattagattagggtaatctctaggttagttaggtggttactgtttaactttatacccttctggattcgcttggcccctatgtggtttttgctggctaatgtggagattcgatcatagacgtccattgtccaaaagatgttcaaatggatgtctgacctacgaattccagagatttgtagactcgaccaagagattggcttgtctgcctattggctttggtagattgtttcgtaaaccctgctcttctatgtttcatcaacgagagttgagattaggaagtggtagagttatgggggtctctatcacgagagtggattgacccggtttttgaatctatcgtcatgggtatctacctttcgcctattagccatctgatgaaccctagagttgcccttatcaatgaatccatccttagaacttctattagatttatttgtatcccttgttaattgcacttttatttacctgttatttgtatcccctgttgattgcatttaggttacttaattttgttgcatgtttgttctactcgacccaatgatcgagtagggctctttaagttctcatttttacttgtttgaatcctgacctaggattgttactagaaacccaccatctttataatctggcttgacttagttatttctgtacagatcttgattgctagcaataacagtagactggatagacaccccttatagctgcatcgacatgtttgtgttttaggggaattgaactgaatcacacattcaccctaagcaggcatgaaaaacctgctttcaatttggcgccgttgccaattcattgttgcattgttacattcaagatatcagaaacttttaagatcaaattcttttacatttataaagttactaactcatattttcgtttgcttgtttttgtggtataggtactaatctttgtgcatgcaaactcgatcgaaaggttctacacacctactaccattcagagattgaattgacagaatagctcgtgagtt

SEQ ID NO: 14990 - DNA, 3000 bp, Unknown
  misc_feature (1)..( 3000): cDNA_ID_3019861_gDNA_ID_2684238_Annot_ID_192502 3000 nt of promoter + ATG
aaactggacatgaaaaacagaaacaaacagtctcaaagacaaaaccctaaactacaaaccagtcgttaactattaaatccctctggtgaaacgctagctttagacgttacaaagcttctcacgaaaactcgtgccgatcggaaaccagatgatattacgatgttagttacaatccttgctggtcctaattcgcgtctgagaaaacgtgtctcacgaaactgcgaataactcaaccaattataatccaaatccacttctgtaaactggagaatatcgataaaatacttgggaataactctactaaatttcgttacctttgaaaacgatttgatatgtcgcaaccgtttcctcccaaaccctaatgattctggttcttctctttctctctatttttctcttttataaaacgaaaagtggctaactaaagccctaattttgagtttctttcttttataggcacactctaggatttccaattaacccaaccgattaaaccggacgatttaagtataaaccctaaccgatttttctatttacgggtgttacacttatgactatacaatgccaattttttttagtatgagcattggaaagcttgccatggatggaagatgagcttttgcaagtgtgtttagcaaatgtgttataccattacaattcgtctttgatttgcatggactgcttttggatttgattaaaatttcgcaagcttaacaatcgtttccttacttgaattgtagtttatatgtgaaatttacacattgatcagttttatgatacaaatttcatttttctctttgttcttcacttctttgatttcttgagttttgttgttacttgcagcgtgaaaggagtaatcctcatgacctaaatagaaagaagttcaatatcatagaaggcatctagatatataaaatacgtttagctcgataatcattactttcatagattcattatgtatggtttaaaagtcgagcctataagctccttaggctgtcatgagatttaaaactaccaatccggattagccattgcatcaactgacattttaaaagttataaattacttaattaagatacttttaaaaagcaaaaataccaatagatatgaaaaaatgtaaatttttaaagaaaaacatatgtaaaaaaaaaaaaaacgtaagacgtctaaaaataatctcttaattttttgtaaaaaattaaaaaaaaaaaaagacaataaaagaaatatttgaaatatggatacatttctaactatgatgttgtgttattaaaaatgtaatataaaagtaatcaaatgtaaagttttaatattgtaaagattattaaatttataaaccaaaaatctaaaaatatgaaataattctgaatataattttgttatgaaattcataaaaatgaaaataacaaaatgtaaatttatttgtaaattttattactttagaaaataggatatttattataaaaacatcattattagtcttacaaaaatttcttattccaactttaattataaaagtcgaagtgatgagcttttaaggccgtctacatgggatttaaaacgaccaattaaagttagcaatcacattgaatattttagtcatctcattaattaatattttaatttttattattattttatgtacaaagatatttgtaaaaaggaaaaaaacaatatatgaaaaatagaaatgtaaatttttggaaaataatatatgaaatatattaaacttatattattatttttatttgttaatcttcttatcttctaaaaaagaagaaatattcataggaaaatatatttgattaacactagacctaaacgagctagtcacatggattgaaggtggagctgatgatgatgacaatcttgagcctactctgcattacgtggtatttaacggtgttggtgttgaagagtcacaagatgtgaaaactgtaactcctgcgccatgtcaaaggatcaatatcgaggtggtggagaagattccatcaagtgcattggttagggaatgcatgaagtgtttgaactccatggaagaggttgagaaaggtagtgatctttacatgtttgcgatggatttatttatgaacaaagagtgcagatagatgttcttgttgttggagacctcaaatttgagaatgacttggatgcttagacgtcaatcttgtggctctaccattgctgcctaagatcctcttattctcctacacttctgcttatgtcttataattatgcttaaaactctttattttcttttgaagaaaacagtttatgtgtttactagataaggacccgtccgatggatcgatttatattcttataactaaaatcaaatttaccaaaaataatacttaacaaaattgtaagtgtaaattatcttttaaaagtaaatttattttttggttattttcactgttatattgttttcttactactaaaattattgattaaaaactttcaatatcatatagtaataactcaaaattatttgaatgaaaaatatattacatatcaataactcttggtatacttatatgaaaactaaattaaaaatcgttatcataaagttggcgaataaaaccaaaatggttttcaaattagacatattaaaaatataaagatgatcaatcaatgtcgactagatgtctcaggacaaaactcccagacacctatttatacaaaacgaaattaaatgataatagacgggccagtaacctaatcgcccgacccatagagtgataatgggccgagatgggcttcgtgatccgatggagctccaggccgtttccaaacacttcttcttctcctcttctcttcattgttctcagcttgtctggttgagtgcggatttgagtcgactctgaatatgtggtcgagtgcttgatcgagtgatggcgatgattggtgaaggatatactcgaccagggggtcgagtgatgtcatcgagtggcctgagctgctgttactcgaccagggggtcgagtagatggaagaatg

SEQ ID NO: 14991 - DNA, 3000 bp, Unknown; identical to SEQ ID NO: 8932
  misc_feature (1)..( 3000): cDNA_ID_1989272_gDNA_ID_2684240_Annot_ID_137744 3000 nt of promoter + ATG

SEQ ID NO: 14992 - DNA, 3000 bp, Unknown
  misc_feature (1)..( 3000): cDNA_ID_3044064_gDNA_ID_2684240_Annot_ID_137747 3000 nt of promoter + ATG
agaccagcctccggttaagtttgattacacgaacccgaacgtaacccaaacaaacccgggacttttgttcactcaaaaatcaactagcgccaagattttgaaattcaatacgacggtggaggtagtgttacagaaccatgcgcttatagcggcggagagtcatcccatgcatctacatggatttaatttccatgtattggctcaagggtttggtaattatgacccgagccgtgaccggagcaagttaaatctcgttgacccgcaatcccgtaacactttggctgtccctgttggtggatgggctgtgatccgtttcactgctaataatccaggtataaactctctatccaattccttagttatactaaaaatgtaattatatagtttagagttttacaaaggctattattgttgtttatgcatgaaacctaaatattggctacattgtttcaggtgcgtggatttttcattgtcatatcgatgttcacttaccattcggactagggatgatatttgtggttaagaacggaccgaccaagtcgaccaccttgccaccgccaccaccagatcttcccaaatgttaagcaagataaaaaaaacatatttcatcgaaaacaataaaaagaagattatttagagcaaagaagacaaaaatttgtctctctgtctcacatttgttttgatgtagtcggtaaagaaattgtattgtagtccattcatatgttgttaccaattgtgtgtgctgtgagtaatttatatgatttattattatttttgtcacttttacaagttttaatttgatatttttgaaaagaacgtcacttgaaccaaaataaaagttctactaattaaaaacatttttatagaacaagaaaaaaacagtttttgataatttgcataagctaaaaacatttgtaatctagacattacccgaaaaatatttattcaaaattttaaaatacaaagttagtgccccatatctttgtaaagtactccaattttgtgatttgcagtttaattactacttcaatccggtaattttaatctgatttagtttcataccggcatttgggataaaccgggttcccggttaaacaaattccaaaacattatccaaaacaaacagagaattttatcaacggaattttcccaaaagaaaaacagagaatgatgaagctgcaagggggacttctccagtggagtcgtagcagcttaatcccgtcgatttatacgccaatcaacaaaacccaattctctatcgccgcctgtgtcatcgagcggaaccaccagcttacggcgaaggagagacggcagctccggaacgagcggcgggagagtaaattggggtatagctggcgagaagaagttgaagaaaagttgattaagaaaccaaaaaaacggtatgcaacgtggacggaggagctgaatttggatactttggctgagtcgggtccgcaatggtgggcggttagggtttcgagacttcgtggtcatgagactgctcaaatcttagctcgagctctggctcgtcaattccctgaaatggaattcacggtaattggaattttactggatatttgggttgtgttgggtgattttaaagtttggattttgacaatgagattggatcaaactggtatcttgatagaattgctgacaaactctaaacagttgttgatggaaagtgaaaagatttgattttgggttattgtgtgatctttagaatttgtggggaattcatacattggtattgaaacaagtggcttttgaatttggttgtccaggtttatgcaccatctgttcaagtgaagagaaagctaaagaacggttctatatctgttaaaccgaaaccagtgttccctggttgcattttcatcagatgtatattgaacaaagagatacatgactccataagagacgttgatggagtcggaggtttcataggttcaaaagttggaaatacgtgagtagtattctcactctcactctcaccctatgtgtgttaaggtctgtgaattaatttgtatctgcattttttttttgtagcaagagacagattaataaaccaagaccagtagatgacagtgacttggaagctattttcaaacaagcaaaagaagcgcaagagaaagcagatagtgagttcgaagaggcagatagagctgaagaagaagcgagtatactagcgtcacaggaacttctcgcattatctaattcagatgttattgagactgtagcagaatctaaaccgaaacgagccccgagaaaagctacacttgctactgaaacaaaggcgaagaagaagaaacttgcagcgggttctacagttagagttttatcagggacatttgctgaatttgttgggaacctaaagaaactaaaccgcaaaactgcaaaggtacactaactaactacttctagctcctttgtgttattgataacaaagctggtcaatttgcacaaatgtgtttgtttagatgtctctctgattctttcgtatggttggttgcaggcaacggtgggatttactttgtttgggaaggagacactagtggaaattgacatcaatgaacttgttcctgagattcaatcttaaatagtttgttcactagaatgtgaattttttggtttgaaatataaatccatgatcacttcacatgttttggaagttttggtgtgtttgttctgttaaattcgccaaacgattgcaacgacgacgttctatcttcatttgaaagatgagagcctttactggttaaatgggcctaatttgtgaaaaggcccaacaaacaagagccgtcagatcagaatgaagcaaacaggcacgaaccgttagattaagattcacaaagaaaaccctagaggttcccttatcctcaggccaaatcgtgaactataaaacggctgataccaaaaccctaatttctttacgtcaaactctctctatacacagagttaaattgagtttgtgtctcgtaacttatcctgtgagcgaaaatg

SEQ ID NO: 14993 - DNA, 3000 bp, Unknown
  misc_feature (1)..( 3000): cDNA_ID_2731431_gDNA_ID_2684240_Annot_ID_137749 3000 nt of promoter + ATG
gatctctgcctccataagcttcccttctctctctctctctcacctaccggatttaactgtaaaagcgttgagtctcgttgaggtcgcgtgaacacactcgctctttcgactagattcgtagggcttgtgtttcgggggatcttttattccttttaattactattttgcccttataattgccatttactttgttacccttaatcgttatcctctgtcttaacttttggtcaaccttttttgggggatatttaggtaaatcacttaaaacggaagatcttcggaagttgatgactttcttctatggcgggaaattcattaccggtggactaagtacttttattgggcctatttaagcccattattcaccatatcaggcctcttcatgacccattcaatggataatgaaaactgaaagtgaaaagtaaacttatttctctacccaagaaagctaacctagaaatccatttttttttattttttttgtcgtaacctagaaatccattttagacttctgatttatcactcaccgttaattttcttcactagtaaataacaaaataatattgtttcacgttaatgagataatattgtctcatctttcattattttgtttttttatcaaaccacattttaagatggttacaattttttttaattttttttgggttttaaatactaggttaaatccggtgctaatttaatataaaatttaaagtaggatttgatttatattagattctaagaaattttgaagtattttcaatctataaatacaaatgataaaatagtaaatgcggaagtaagctttgttattttgaccaaatttcaaaatactaatgcttttttgggtaaattaaaatctaattaatgtttaaacgtttgaattatagaaagaattctacatcctaaatgggtttctaagtcaactcacaaaccatgtttaaaaattcagtttgcccaactaaaattgaaatttcatgagaaagtatgcaagatcctggagttgattgagtttaagtagtctttaaaatttgaaaagtcaatgagaatccatattcgcgtatgaaatgagatggcgaaaggccgaaagctaataaagaaagctcatgatcagaccaatgcttgcacatacagtaaacagtcagattattgttaatagagaacgacctttgcctgaccacaaatctttagatttgaataaaacgatttttcaaattatggcaagaacgttcgttttacaatgtacataaaatacattattaacctaaaatttaattgaccagatatgtagaacctatctttacaataatcaagtatgtacatataaagttacatgtccactgacgtcgtagaagaatgattaactggatcaactaggccggtcaagagaaaacagttgtcgcatccaatattacaaatattcatgcagagatatattatgtgaaacgtatatagaaaatatatctagttatctacacaaaaaatacatgcaacacgtttctcgaagatattgtaaagttgacttggatgctttcaagtttcaacttgaacatatggaccgtttctatgcacgtacgtatcaaaattcttcattatatatatataaaaatgtattaaagtaaacaaattaatatgatagtggggaactttttataagaaataattgatcaatagttgaaagaataatttcacaatacaacaactgtcatatattctgagacaaaatccattggcctgtgtctggagtgcgtcgcatgtattgcttttgcatttaaatcaagtctaaagcaaatttttggattcgttgattccttaattttatcgaattcgatcaacttttaagtacgtatactacgatctcttatgattcttggatatcttttcacttttaaattctgagaacagtagcaatgaaaaataatttgaccattggtttctttagtttctaccttttcaatgtttaaattaagatttggattactttgatattgaattcatcgatctttgggaaggattttgcaaattcagaaatgttcagttttattataaatctgtcactaaaattgtggttgttacttagatatcaaattagataagtagttgtctatattggacttgtaatacgaattatattgaattgaggttgtttgtgttgagaagcaaaaaatttgatgacttttgttattatttacgaaaaaagtataaactaaaataataaagggagtaatcaactgttagaaatttagacaacgatgtctctactaacagattgaaaatacttattatgggcatagcttcgctagcaagaaatgtttcaatatctacaaaaatacacgtagacaaatatttagacacaattgattatgttagagaacagtggtcgtctggtcgatgtacatatagcaatccattaactccgattctaatatttcttgactaattatttcgaaattgtgcaacaaaaaaatcataaacaagttttaagaagcttacattaaaatgaataattaactatacatttcttgtttaaattacacactagctattaataattgtaagggattttttctgtatagaaaaggtatcgtttttttaagtttaatcttcgatagccattttaaacaatatatcatataataataaacaataagagagcaacgaactataatactaaagttgaaaaactatcaaaatgatgtggcagtaacattggatagaacttacgtttacgtagctagttaaagttctaaagaaaaccaaacaaccaaaatataattataatagcacatattgaatattcatttatatttacttgtatagtcaaaccattatcttagacaaccctaattaacatcaaatgtttagtccttcgttagttatcacttaccactctgcattctataaattattaagtagaaccacaagtctcgttgcttcaatatctccataacacgtttctctctttctctgctagctctctcatccttctctctatagatg

SEQ ID NO: 14994 - DNA, 3000 bp, Unknown
  misc_feature (1)..( 3000): cDNA_ID_1019230_gDNA_ID_2684240_Annot_ID_137752 3000 nt of promoter + ATG
ccgtccacatttggaatgagaactgcagcaatatttttttcctcatgatgagatattgagatgtgtcaaaagagatatgtttctcaaaaatataatgtacctcatttgtgaccaccacatcatcctctccatacccgagtttctcgagtagttcgtgcataccacttagatccactctccagcatgcttctccgaaaggggtcaagggcaatggctcctttgttgcaggttcagtgtatgatggagtctgtcattattaagtcccatgtacacataagaaagcctgcagaacccgaaaccttggaagatttaatgtagtaatgacttacagggatgttttcttctttgacgttgggccataactcagctcttttctcaagtcttgaaagagctgacataagaaactttatgcttggcctctcgtctggttcagggcgcaaacagcgggaagctagatggataagttctgttctatcctcatcagagaattgaccatccagagctgaatccattagcaccaaatagtttttaccacggaacagatcaagtgcctgaaatgacagataagctaaaaatcaatgaaactgctaaagatacattatgtatatacacattttgctttgtgagaagaaagttacatggtttggtggaatatgtctgccgctcataagatccagtaacaaggttccgaagctaaatgtgacactctccggtatcacagtacctaacaataaaagtaaaagaaaaacatctttgagatttcagctgatgaagttttctctcaagaaaattaaacataaaacacatacctagacgtaaatattcaggaggagcaaatgccaagttggtactatagctctttccctctcggctacacttcatgagaccaaaacaagacagcctaggattcccaacctgttccatcacttttataaataacttatgataacatcaaaccgcgtatgaagtttcttaccttgtcaaacaatattctgtaggtgttaagatcgtgatacaaatctattccccaatcattacagtactccaaggctgttgcagtatgtaacgcaactctcaacctcatttcccacttcattggtcttttctcccctgaaaaaccattttagagtaaaaacaacttagacacaataatgaaactctaaagtaaagtttaaggccaaaagagatcaagaacttgaaatgtttgagtctcacagtgaaagagatgcttagcaagtgtttcattaggcatgtactcagcaacaagcaacctctcgtgaccttctgagcaacaaccgatcaaattggccatatgctcactcctacatctccctacagcttgtgcttcctcctgaataacaaatatgccatattcaagaaattttcctctgcaacagatcaagcatagaaccgaattgaatctttactaagtcaaacagacttgaaatttgcctcctctgcaacaaatcagaatccagaacattgcaacattcaagagaagtatcacggagttagtaaccaataaagtcaaatcagatgaataagcgatcactagtcaaatcttatacaaaaccaaacagagaagaatcaataagtattgatgggtaaaggacacgaacgatgaattctaaagaatcaggccatgaaagccgttgaaaccgcttgacggcgatctttcttccgtcgttgagctggcctttgtagacgatgttaggaaccctctcgttgtgctccgacacgatgttgtcggcggagaatccgtcagttgcgactctcaactgttccaagctgaactccaggaaattaggacaagtacttccttcatcttcttctttattatctgcagccaaaactattaggttagttctctcgatcatcgtcttcttcagaatctaattaacgcataggaggagtggctggcgaattcgttggattttacctagatcgtcgatgacggtgatggtggatgttatcgacggagaagacgatcgacgccaacgtttgaaacaaatgcagcccatcgccggcgacagtagtttctccggtggagaaaaacttttcaagtgcttggttaaaaactcccgcctgcagggagaaaataaattattatttttttcttttttgcctagcgaatattgttggaaagttttacggagaaagtggtaaaatagacccaaaaatatcatttatttatatatcacataattaaatagttgatgaccaatatatactttttttttttttgaaaagatcaacctttatactattataaggataaaatgtcgacatgatctatgtattaatttaaagaaaatattgtttgcttgttccatttaaattactcggtattagattaattttgagcataaacattacaggtttttattttggtaaataatcattagactgttgagtttggtctttactttagcctcaattttaaagtctatattcaatggattttgcttacatacatttcattcacgtttaaaccgaaattaaaatatctcatttaagttgtaaccaaaaaaaaaaaaaacagaaaaattctcattaaaattaatttttgctagttaccgcagcttttcgagactgggtgtgtaatatccatcacactaacctttttttttttaatccatccatacgtttaactacatttaagcaaatatcgctatcaaatcgttttggtatatttcgctcattactggcaaaattcactctacaaaaaaagtctagtttgtaatgggacgctcgtttttaggtgacttatataaaaataaataaatagattaaaaaacaaataaaatcagtataggcctaaataaaagttagcttacggaccatttatgatgaaacttgggccctaatgcaaagcccattaattttatctttggagtctgaagtctctcctctctgtgctttcacataatcacattgcatgattgatcaaatactcgattttccgtgaaatctctttgaatatttcgattccttgttacc

SEQ ID NO: 14995 - DNA, 3000 bp, Unknown
  misc_feature (1)..( 3000): cDNA_ID_2731421_gDNA_ID_2684240_Annot_ID_137753 3000 nt of promoter + ATG
tgtatatgtacatatgcagtggacatttaatgatcgaaggagccattgattgaacacaattaggaacaccatgcatcttatctacaatttccaatatcttcttgtaatactcaaagtcaaaagattggatctacaatctgacgaaagaaataaagaaacgcttacacagtctttttttcatttcaccaacatgtattattatctcacatttgaatctaaatagtaacacaacaatatcagcacaaaccaattacatatttttcgtattataatatatttttttcatatcgattacaatcttaacgtcgttttataaaataaatttggggtttttttttgttaaagggttttaaaacaaaatttgttccaagttaaatgtcgttcaaaaatttaatggaatatatatatatatatatatatatatatttttttttttagaaaacactagttatagaattaaaatggataaaaatatgttattttaattgaacatatatacatcgaaactttttgttggttttgttagcgtttagcgatgttgagctacgagttctattgatggttgtttacaacaataattggattggagaacaagaagttatacatgattcgtgaagttaattagataagtttttaatacgaagaaatgagtcccgagacaaaaatgaagcttatggaattaattggtaaattagcatggcgacatacatttgtgttatgaaatcatctagttgtaggcacggtgatggatccctcagatggtcatgctatcattttcgctttcaaatagcgcgacctaattttttatataataaaattactaacgtggatcgcatggtatattttaatataataaaaatgttttaagaaaataaggaaatggaagagcccaccgtccaccaataaattaccgagtaaacgatttatacgaccgtcgaaatgaactgagaagataacgagaaaaaaagaatcggaattatatattttgactcaaaaacgagaaaataattcgtagcgattctaactcctactttataccttaaggaacacgaaacttatgagattttatggaagttacaacgtggttagttttttttttctttctattggaccagtgttaaattttcaatttggcatggtgtaaaactacacaaacagcctttctttctctgacccgtaaactactatttatctatttcaaatctaacagatttcattatggcgatagatatagtccttaaaaattatattggattcattagcaaaacataactatacattgaaattgtattgataaaatttatattattacatgcaaccaagcaagagcggatgtacacgttttggtgtgggtgcgagttccacatcagaatttgtttgtctatataagtaattgtgagagacaatcggaataattggctagaatcagtctttttttcctagtggatctttaaaaaccattcttttataccaagcatgtacatgctgtggtgtgggtgtaagtaaatcctgccccaatgaaaattgtttttggactcgccactgcaacgaagtgtaccaacaacttgactaggattctaagttcttttatgtataggatgtctatattaaactaccatgactaacatatatatagtagttccatatgctcgataaactatgatagatcaacaattttaaacatatagtttaacactatttatttgttcaacgtcaatagtttatagttacgcatgcgctcggcttagatttggtccccaacagtcgaaattgtcaaataatataaaataaaagtttcattgttaggattcatttattcttcgggtggttattgtaataaaaggcaaaagaaaaagaagaacaaaattcacaagtaaaaaaaaagataacatcattcttttagtcgacaaaaaaaaaaaaaaatcaaaaagatttattcagtactacagtttaatattgttttgacttttttctttttctttatattatctgaaaattctagactgcagctgaaacatgtgatatggattaaaggcgtatccagtatccacataaagaggagtggtgtcgctcacccagtcacccttgttacttgttagatagcattaatacatttgtaagcaacagcttatctgatagacatgtcttaattgggaaatatgctctaagatgatacaaccatggttccaactgttgaccaccatagctgataacatgttgattacattttttcttttcagttataacgattacttttttggggaaattattgatataatatgattcattggatgatccgatatcatgcatataaagttgtatctcgtgaaacacgagatagtattatactccattctttcattatcggagtatgtttaaaatttgaaaacaaatacagacacggaccgtggtctttaccttcagaaaaaaaaagagaaaaaaaaaacaatccactgtttattataggagttgtagaaaatcgggcaacgatattcgatatgagttattattagggccttattattatatggtattactggatattactaaataaaataatcatataaatttcacattttaatatacactcgttggacacgcggaatattatatgttctaaatgttaaaaaaatcaaaagaaatacaacgatcgacggatctagagtctagaccatgcaaataaatcatcctatttaaatataataactgtgcatatagtttagtcaaataaaaaggtaaagaaacaatatacaacctataacgtcaatatccatgtacgtagtaataattaggatatgacagaaaacacgatatcttgatatatacaaaatgaaaacttaaaaattgattaatatggcctggctgggtatattattataaaaacataaagagagatcaataattgattcgaagatcactatataaagaacgtcttcgatatgtaaaagaaccatcctaaacattttttcttgaataaaatcagaattacaaacaaaaatg

SEQ ID NO: 14996 - DNA, 3000 bp, Unknown
  misc_feature (1)..( 3000): cDNA_ID_1444487_gDNA_ID_2684240_Annot_ID_137754 3000 nt of promoter + ATG
aaaacacatttcagacaaactttacatataaacacatcatagatctcgctgtctttgattcacttatataagaaactttactatgtttaatctaatagtagctagggatctactctggtttccaacttaaaaaatcatcagtttcaatttagtcatttagactcctcaaaaatccctaaatttctgtgtttcagcttctaaaatataagtgtttaatttagcaaaatagttttaggcgaaaagcgataacacatgtgtcgccatttggaaactgagatatagatagatctattggttcaattggttgtacattcaagtcattttaaaaatcatgttgattgtattcttctataagaactatctaataatattaatccgatttctatgttagtttatataattcatagtgtaaattttaaattttcaaagggtttgtatctttaaattctaaaatagaaaacataagttatgaataagtttaaaatattcctaaatactaatttgagaaataataaaaagatgatgttctaaaattgctttagcaaaatttctggattcctttgatgattgagtacgtgtataatacacatatcaatacaatgtgtagactttttggaacgaattgttaaatttaataatatttttaattctagttcacgtgtacacccgtatgattcctccggccaacccgacagctccattgaagaacacagcggaaattaatttctttatcaaaaaaactttactaaaatcatattccggtctaaattctaaacttatatctacccgattttcccggaaacgtaacactcggaaatttccatatgacaccacacgatctctctagtcttccgataaaaacaaaaagaaaattgttgcaagaggaaaaaaaatatatatcctaagagaaaaatattgacctataaataactccattaacacaatcatctcaaaaaaaaaaaaaaatggatgcgaaacatatagttctatgcttcttgctaacgtacgtcttctccatggcggcagcctcatcggaagctgagcctccggcaacaaggaaactcggcaggcacgaatggccaggagaggaggcagaagcaccggaggtttcacatttggaagagactgtacggcgaggccaccaccattccacggtggaaagatcggttgccggaggtggagttattctcggaggcttagctacaacgtttcttgtggtagtgttttgctatataagggctacgaggaaacacaaacccaattatgatgaaaaggagactgagacccctaaagtgttagtttaattttgacttttcgttaatctttgtaaatattttctttgtattttggtttttgtgatataaaatgattctattttattttttgtcttcttcgtatttagttatataatttgagcttcattctcattctctgtttattttccaagttttaaatttatcttacaaaataataaaagtcacattaaattttagtgctagtcatactatatagaagaagccaggtgatatacaataaaacttttcttaaaacaaattcagctcgaacccagggtcggatcgatataactgatgattttagttaaagcaaacccacaatgtcatctaaataatgtggacagagcagaaaaatagtttggaagattacattttgtatttctttgttcaacaagaagccaatttatagaacctacaagttaagaaatttgacattatatcttacattaaaatattagtttttttttttttttacagcattcgaatttaacatttatattcatcaaatgaatcaattttatcgaattaagtgaactacagtatatgttttgataacataaaatcaaagcttatataacttggaaaacataaaaaaaaaaaaaaaaaaaatgttacctcactaaaaaaggggcccaataggtttcggttcaattgggtttcaaatcagcccaatcaaattccttatcctagtttagttttgagcctttcccagggatttccaaaaaaagtcaaagatgtattcaatattcattactattgggcctagcgaagataggcctattttgaaaattccggatagagagacccgtttcttccacagtacttgtgaacgtaattgctgtttttttttttttttttttcgtcgaacgtaactgcttacgtagcccctcacaaaaaaaactaatcacaaatataaaagattcgaaaacaaaacttagcatgaaagtattgaatccgtcaaaagctgtcggtatcattaaattttcccttaatacggagtataatataatactcaaaaaaaatttcttcaattacgaaacgattatgcaaaaaaaaaacagggagtaaaaaaaaaccgtatcttaccaccctaatttatgtggaattttaaacaattttgatgtagtaataaaaacacagcacgctactcagggcctgttcttttcccaatcgtcgcgactcaagttagcgactgaaaaaagcactggatttatctaattagtgtcgctaaagttaaagcagcgacagataaaaaaaaggcaacgacattaaattcgaaaaagagatgtcgccggtgaacgctgattttttcagcgacttcatctccatcgtttataaatctaaagttgtcgctggttttctctgtcagctgtattatgaacctattcttttaattataaagcatttaaacctctatttttctggtcgctgtcgctaattgagcgattgagaaaagaacaggccttcaaccactaccctcatttaaagtcaaaaagttgaccacctaatattcatcctatttgttaatttcaaattttacgaaacattaatctgattattctcgtgaccaactattcttcatacatccatttaaccaaatccaaagtggttataaataactgctaaccatcattgctcaataaaacacacacacacaaagggaaagccaaaccggtatattttctttaaacaggatatatagatg

SEQ ID NO: 14997 - DNA, 3000 bp, Unknown
  misc_feature (1)..( 3000): cDNA_ID_2993463_gDNA_ID_2684240_Annot_ID_137757 3000 nt of promoter + ATG
ctttgaaaacgagtcagtcaattgattttgtagatttattcagttttcatagatgtccaacactggaataattgttgataatttcaggaaaagcatatgttaaaataatgctaataacaaaaacaaagctagtgatgtgtatcaaactaccaattgtgcagagacaaaaacaaaacgccaaaatgctgtgttgtacccttttttgtcaactgcgtatctgtttttttttcagtataaaaaacttaagaaatctctaaacctaattattgagagtaaaaaaaaaaacaaataaataatcaaattttactgaaataaattgtaatgatcaaatatatttaagcattgaattttttttgtgtagtcctaaagttgaatcttgaaaggctgctgatcttaatttgtctttttttttttgttcgtgcaaagctgctgatctttgttattgtctcatatgtaagtggttagcataaaataatattaatttcttgaatatgcgttgtatattttggtgaccatatacaactacttacatcgatcttgtaagaattgcacatagtaaagtaaatatatcacaaatcatatgtccgataacttcatctatttatatatttaatgatgaaaattgtagtttgataaaaaaaataaaaaaaataatgatgaaaattgtagaaacgaaagtattttaatcgtaaaatggaaaaaattgttagatttttattgatcattttttggtagttgctatactgtttataggttttatatttagttgtggaaataatttataactataacagaatagattattcatgtaatgacatagaaacagttgttttcacttttcttgttttgtcttggtgccgtggtagattttgataataaaattagagtgttgattaatttatatttgccaaaacaaaataaacaaataaataatttcaagttgaccaattcatatttcttgatggaaaacactgatctcttctcttctattctttctttctcttatgaggaattttcacaatctttgatcatcttctcctttattctacggaagaaatctatatattctatatatggaaaacatcaaaaaccctaaaaacgcagatgattgttccgatagcatatcaaaaaacagtcatcaaggcgttgatgattccctgaaccagtcaagatcttacgtatgcagtttctgcataaggggcttctcgaatgctcaagcactaggagggcatatgaacatccacagaagagacagggctaaactcagacaaaagcttatggaagataataaggatgatgtcgtcgccgagagtgatgcatccgaagttgtgtctctagaccttaatgaacaacaacaacaacaaggagaagctttgacatgtgatgatcacgatcaatatgttgataacgatataagtcctaaacagaaattagagttttgggttcaagaaagcaagcttgatactaatgatcatggaaaggtcacggaggctagcatagatggttcgagttcgagtcatcatcgtgatattgaagtattggatctcgagcttcggttaggccaaagcgtcgtaaagaagaagacaacatagtctctgaacgatgaatcatatattgattgcattgtatcaatgggaaaatccctatgaaacaccaaactctctaatccgtctattacaaatggattcgtggctcaaattgtattgtaaggtatgcatttgtatcttattgctaccattatcgttgttgtaccttgtattgatatttgtttccttgcttgggttaatttcaccaacaacttttgtaaatgacatacacgtccaaacaaacaaacatatatatagaaattatatatatttggtgtttgctttatagttgtttagggaaaatgaataactaataagcttaacttagctcaacattattgatctggtcatggtagagactattcaaacttgttcactgagaaatattgttacagttgagttatatattggtagtcgtcctcagattttcgagtaagcatttgccaattatgactcttatattcgagattagcactcaacatttaattatatgttagcaaatagtataacattagctagcaaacttataaacgataaatttgaccaaaacaacataaaccaaggtcactttatctactttttgttctctgaattctgaaaacgaatttgaatatcgtattctaacagtgaatattgcatttatactaaaatttacgatcatagccataaataagtagttatgtatagtcaaactatatgtagttatacagtactttaagacgtttgaaccgctaagattcccataatctgcatgataatataatgtatgtaaactgatacatgcacaattgcacatgataaatataactaaattgatacatgccgatttgcgcatgataattataattatatgctctataacatgttaggatttaaaatgaaaagagcaaatggttcaaggctgcaacttggtgacgccaccaatgatgaccttttacgtcttaaccacgttccggtttggttcgagaacttgtttgagatccgctttggatctaaattcagattggttttatttgagatgccgtggaaaattggataatttccaccagagatatatgatttaattaattggattttggattcgattatagtaaaccgataatagtgaggcagtaacgaacaaaacaacttcaaccggatcattgggttggtttagtttactaattgaaccggtttgataatgtttaaaaaataaacaagtgacaacgaagaccagcaggtccagcacacgatcctaaatcctgtgagcatcgtctccatcgctggtcttccattattgacgaatctctttgcctttttttcttccttcttaaacaaacccaattcgatttcaacgaacgcctcttctctctcactctctttcgatttgttctttgccggagctcgtagtgtaagcgtgatccgcggcggagag

SEQ ID NO: 14998 - DNA, 3000 bp, Unknown
  misc_feature (1)..( 3000): cDNA_ID_2731409_gDNA_ID_2684240_Annot_ID_137759 3000 nt of promoter + ATG
aacgattcagctccatggcctcggagttatcggtaaaagaaattcctctgttttttcgatatctaacgaattaatttataacgtttgtgaagattcttcctttttctggaaaatatagacaatctgtggatatcttgaccggagttacacctcctacaatcagtttcattcaccggagaagttctcagacatcattcaccagttctgtcgcttccttatacaagagacgtccaacctctattgcaaattcgtttgcgtcttccacaagcaaacaaccgctgctctctgagaaagacgatgtattattcctttcatctcagatcgggttatccaacaccgatctctcgtatggagaaccaaatttctgctcgtttcctcaatctgttctaaatggtaagacatagtatcggtattgattttgtctcaaaagtctttagggtttgggcattcggttcggttgaacagagattttatcgtcataacaaaaagaaaagtttcaatctctctttaagttgaacctatttttggtgaaggaatcaatgtcctttgtggaataagtctactcacaatgccttacgcggtgaaagaaggaggatggctcgggctttgtatactcttatcctttgctatcatcacttgctacaccggtatcctcctcaaacgatgtcttgagagctcttctgatctccgtacctacccggacattggtcaagctgcctttggatttaccggccgcctcatcatctccgttagtcatatggaaatcatttacatatatacttaacatatctccaaactaatatatagggttcttgatctctcatgagagttgcagatacttttgtacatggagttatacgtatgttgtgtggagtatataatcatgatgagcgataatttatcgagagttttccccaacattacattaaacatcgttggagtatctctagattctcctcagatctttgctatatcagctactcttattgttcttcctacagtttggctcaaagaccttagcttactctcctatctctcaggttccattttctatcataagatccttccaatatagcttcgagattcgttcatatattctttaatatgtgtgttccattcttttagccggaggagtctttgtttcgatcttgcttgctctttgtctcttctgggttgggtcggttgatggagtcgggtttcacacgggtggaaaatctcttgatctcgctaacttacccgtcgctattgggatattcgggtttgggttcagtggtcacgcagttttacccagcatttactcttccatgaaagaaccatccaagtttcctttggtgcttctcattaggtgaaaaatctctttgcctaaggttacttataatggacgttagatactaggtcaaaattttcatttctccgtttctttttgcagttttggtttctgcgtattcttttacattgtcgtagcgatttgcggctacagtatgtttggtgaggccattcaatcacagtttacactaaacatgccacagcagtacacagcatctaaaatcgcagtttggacagcggtgagatataactttaaaactcggtaaacatgtttgtctcgacatatatataattactaaaatttgattggttctttttctcttactttaggtggtagtaccgatgaccaaatacgcgttagctctcacaccaattgtgctaggtctagaagaacttatgctgccatcagagaagatgagatcgtatggagtatctatctttattaaaacgattttagttctctctactttggttgtcgcacttacattcccattcttcggtaaaatactcttaccttctttttgcatgaaactatacaacaacaacaaaaagcatcttaatttatcgtcgtttgttctaattataactttgcagcgatcatgggggctttgatgggatcattcctcgcaatgcttgtcgtaagtcaccgtttaagaaaattacagctatcattgattatagacatatcacatctgttaaaaggattcatatttttttgtttaccgtgcaggattttatctttccttgtctttgttatctcagtatcttgaagggtagattgagtaagactcaagtaagatatatttttttttcttttatgccataaagtaaaatggttattgtttagagtcaatatatttttacatgataatttcatttaagctttatctatttgatattttggcagattggaatatgcgtattcatcataatctctggcattgtaagcggttgctgcgggacgtactccgccattggaagattagtaggaaaactggattgatggtagaatagtgaacaatgaaacaacatagaattgtgaaacaataagagattttctttaataaaagttctatcaaatacgtaatcaagttttgtgaaactttaaacactaattttagtacagttttacagtttattaacttgcaatcttcttttttttattaaatgaatttatatatgagcaactaaaaatgctcattaagagatatcatcatgaaagtctttgcaagccatgattctagttccaattacaaacctgaacgttacatagctaaattattggagacgaagcgaattatcgaaaatgctctgacatttttaaatggagctaaataatttcggttatacggataatcagaaactgcattttaggaattaagaaatgtgtcagcaaaattttgaaaacaataatagaggaccttaatgataaaattaaaacaaaaggggcaaatacgaaataatataataaagaaggggtcatttcaattaggtggggagcttcgagttcaagagatctccaaaatcgtcgacaacttcagacgtactccaacaacaaagtacaacaacaacatcaatcgagagaaagcgaataaataaaacaaataatttaaattaaaaatccactcgccggagacgccgtcgtttcgacgccggtgctccaaaaaaaatatg

SEQ ID NO: 14999 - DNA, 3000 bp, Unknown; identical to SEQ ID NO: 11025
  misc_feature (1)..( 3000): cDNA_ID_2731368_gDNA_ID_2684240_Annot_ID_192573 3000 nt of promoter + ATG

SEQ ID NO: 15000 - DNA, 3000 bp, Unknown; identical to SEQ ID NO: 11001
  misc_feature (1)..( 3000): cDNA_ID_2724771_gDNA_ID_2684240_Annot_ID_192572 3000 nt of promoter + ATG

SEQ ID NO: 15001 - DNA, 3000 bp, Unknown
  misc_feature (1)..( 3000): cDNA_ID_2731376_gDNA_ID_2684240_Annot_ID_192570 3000 nt of promoter + ATG
ctggtatccctccagcaccaagaggtgttcctcaaatcactgtctgttttgacattgatgcaaacggtatcctcaacgtctcggctgaggacaagacaacggggcagaagaacaagatcacaatcaccaacgacaagggaagattgtcaaaggacgagattgagaaaatggttcaagaggcagagaagtacaagtcggaggatgaggagcacaagaagaaggtggacgccaagaatgctcttgagaattacgcatacaacatgaggaacacaatccgtgatgagaagattggcgagaagcttgctggagatgacaagaagaagattgaagactcaattgaagcagccattgaatggctagaagcgaatcagctagcagagtgtgatgaatttgaggacaagatgaaagagctcgagagtatttgcaacccgatcatagcaaagatgtaccaaggcggtgaagctggtggtccagctgcaggaggaatggacgaggatgttcctccttctgccggaggtgcaggtcccaagattgaggaagtcgactaataactttctctcttactctcttactctcagtctttatgtgtttgtatttcaacattttcctgttttgtcccctagttttttttttctttttctttcttgtattgactctattttgagggctcgcttgtttcgatgagctccttattttttttaatctataacaggaatgttttgattaattctgcaaggtttttattcttttagcctttttaacttaagaaagatactttatctcaaaaacaatgagatactgtaaccgcatgattcaagtctccctttggaactctggtgagttgctttggaaaaagcttgctgagattcaacaacataatcatctaagattgactattatctgtgatttgttgattttagaatactcgacacaaatcataatccaccatacttcagcaaccaagttctattcgtttatatcgtatgatttcaagagttaaaaacccataaaagacatcggttggtgtgggtttgataaggtttagcttgggattggcaaggtcgggaaatacatttgatgttgtctgatcatcgtggaagcccagctgggctttctcgatattcaccgattccaagaagatcctgcaggaaagaaaaaaacagcttcttagggaacagcttctggatggtaaagtgcaagatatcagtgtgttgtcttgtctctttcaaatatgcaggacctttaggctaaaacctctacatgttaaggtacttgattctctaagcttctttgtttccttgaatatgcagatgtttaagattcaacaagtacagtctgtgacaaaatgacatagcaacttgctcaagtaactggagcattagaagtggaagtttacctgacaagccctgtttttggctctggtctccgctgtgctagggatatcgtgattcggtttaagaaatttcttctcacgtcgctcacaagaaccccatccgtcagcgaatcttcctccactgcgagaccccatcaaccaaaaggttaaacaccaattaatcactacacactatttgctaaacacaccatcaaattcaagtttatatagaagaacattactgcataatggctcgaacgatgaactcagcacgctggacatttctgttttcgtcgaattcaatagtcttgtctcttatttcataagacacattgaagtaaaacgatattttcctccaaccttcacatttccatacaatgtagcatcaaaaccaattttgaatgtaaaagaaacaataagcagactacaagcataatcttcacctgactttttgatgtatgccttccctgatatcatcgtgtaatcagatttctctagaatctgcaaaatgatgaagcaatattgttagttcacgatagcacttgatgtaccaatgacaaatatgatattggttgagtgaatccaagagtagtgatctagcttgggttctttggttttgtattgagaaaaatttagaaattattatgaaggaacaagtcatgatcgaaataatcaagcaaaacaatgcttgacatttcatcgaacacctttcagtgcacaaaactcatttccgaaataaacaaaaatggatagaggaaaatcgaaatgataccgccattgctgtattctggtactccttgaacagagtagcagaaggaaagctaccggacaagctatgtcgcatctcattaatcggatcgttcttaacacagctcgctgacggagaaacctccgcaaaaggcgtaggctgtctaatcccaggcgacaagtaactctccggcgaagaaaacttcgtcgaattgatgatattcggggtcgaattccggtgcgccgtcgtaacaagagccatcggagtctcactcttcacctcagacaagatgcgagatctggccattttgctcggacgattagactcctcgttcaatcctcggccaagattagggttacgattggggatctgaagaattttcgactgtggagaaggatacgaaacaggcgtcggaggagaattgtaatttggatacctaatagcaaggggtttcggagatttgccggcgatagtagctgcagcggcggcggaatcaatcaccgcccataaatcagcgtcgtctaggtctttctcatcaaaggtgtaggaagaaaccagagatcgtgacgatgacgacgccattgaaagcgttcactgttttttcgtgcaaagcggcaaatagcttattttaatacattcaaatttacacgaaaatccgctaattgggatagaggctttaggcataaaggtcccttcttattccattccggttaaaatctctcctctttgaaccaatttaaaccggtaatttcgatttcagttatgtattaatcattcggttgggctgtcgcaatcgtgagtcccagagatgtaaataataacatatttgaaacagtgaagtgatctcttcctttgattcttcttctaatcttcttcaatg

SEQ ID NO: 15002 - DNA, 3000 bp, Unknown
  misc_feature (1)..( 3000): cDNA_ID_2731384_gDNA_ID_2684240_Annot_ID_192567 3000 nt of promoter + ATG
tccgcggccagctcatttgggaggctatcatggatgaattgttgtcgatgggcatgtcacatgcgaaacgtgtaccgtcctcattatcttataaatcttaatttgtagaacttaagtctctgtcttgaaatcccattaatgtttctttttgttttacatgtttgataaattgcaggccatgctcacaggatgttctgctggtggcttgtctactctaatacattgtgactactttcgagaccatctgcctaaagatgcaactgttaaatgtgtttccgatggaggctatattcttaatgtgtatgtaacttccttttatcacaagtcatgactttaccttttcagtgctctttcattaattccttcaatgaagctggtgatactcccacagagctaaggaaaagcagctaacaatgactatcaacaaaagctattttccttcactttcaggcttgatgtccttggaaacccaacaatgggatctttctttcatgatgttgttaccctgcaggtttgtattcactttctgtcaatattatcttgaataagtcttcattgaaataatcaagaacatgtcatggttttgggttggattgctgcggttgacaccgaccagagcgtagataagagcttggatcagaattgtgttgccaaaatggaaccatctaaggtagcttttgtctcttccttcgaaaaatctttcgtgcctaattatgattggtactgaggcttcttgatttcggtttccagtgtatgtttcctcaagaatctcttaaaaacataagaactccggtatttcttgtcaacacagcctacgattattggcaggttagagttaccaatcctagcaatattatgagaacttttgtcctatctccattttggttttactgcaattcatgattgattttactaaaagtaagcacacattcagattcaaaacggcctggtaccagattctccggatctagatgaaagatggaaaatttgtagactcaatattcaggaatgtgatgccgcacaaatgaaagttctgcatggtaatttatctactcattaataaacctttaactgattctatcaacccttggagcaaaggttaaatcttcggtctttcttggagcataagttatgttttgtcagctctatattttataaatcttctatgatttgcaggtttccgcagttccctgatcgatgcgataggagaatttcatgtgaacaaagagggtgggatgtttataaattcgtgcaattctcattgccagataagagagtcatggcattccgcaacctcaacaagaatcgaaaataaggttagaaaaagacaattgacgcaatctgttgctttcttttctctcgagcatctcttctagcaaattaatgaactttccaaactcatgtctcctctttttgtttttgttgaaacagacgattgcagagtctgtaggtgattggtacttcaaccgaaaaccggtgaagctaatcgattgtccttatccgtgcaatgcctcttgttgaacatggattttccgtatgttaatcattggaactgaaatagattgtatcgttttgatcttattacgatagcttttataacagtagaaatgtaatagtgcatgttattaacggtgcatgtttttcctttttatataaccgaaacgtgaattatataagtgtggatgtgacgaaccatatgaataaggtatctccctaaatgagcatgtttggggtaataaatcttcttcatttttcttttacaaatagttaaaaagttttcacgatacggaaaagtcagctaggtggaattaattgagaaactctttgcttccacgttctatccaatccccgtatattcgttgacaaaatttataagatccgcaaaatataataattacgtgcttaagcataatatatggttatgttgataaactaattgcctcataaattaattaaaaaatgaatgttccaacactactctgtcctgatcatggcatttcatcgagttagtctcatcgactagtagcaatattagtaatttaatatcattgtgtgaaaaacagaaacatggtacgttgaatttttcaaaagaagaaaaagaaatttgattgcagagttcatgcaatacatactgcaacgcaagcagccagctactctttcaagaatatctggtatctttttttttctattaatttcctatatgaaaaaactaatagttttgttttctgcattcacactttttaaagttttgaatagctaaatttgctaagtcatcagcacacagatttgccttccctagagagacaggtaaagcaagtttcctgcatttagtttcttctttgtgactggtctaaccacgttactcattgaattaacatgtaagccatttgactttttgcattccattagtttataaattcataatttttcagttatttatgaaatcaaaacacacgtacccttctttaaaagtcaactccctcgtaccaaaaaataaacaaatttatctaaaataacaatgaatttttttaccaacagatgtttgtttttttggtaaacttgtcattggtttaaagaatgtcaagtaaaattggacttatggtttataggaaactgagttaattccagcgttgcaaaggccaaagagggcaaatcttttttttattcctcacagaaaacagtgttaaaaggaactcgtggacatattgtttaaagaaacttgtcaaaagtttcatgaatttttttactaattcaaataaaaatcggcataaacataattccaagagaataaacctcattgaaagtcaacccttttcatcctcttcaccatttggctccaacataaataaatagccaaaaaacttctcgttcataaatctcgacaaatctccttgtagactaacggcgccgtttcgacttcattctgtgacacgacacggcacagtttcttcttcactgaacggtgacgtttttagctgcgtaatccaacattctcaaatg

SEQ ID NO: 15003 - DNA, 3000 bp, Unknown
  misc_feature (1)..( 3000): cDNA_ID_2685913_gDNA_ID_2684240_Annot_ID_192566 3000 nt of promoter + ATG
accacgtagtcctattaagaaatcggatcacgggtcgggtctattcgaacgccggttcttatccggtccgattgaaagcggtttggtttcagggaagaagaccaaggagaaagcaaaactgaagaaaagtggaagcaaatcctttacgaaaccaaaactgaagaaaagtgaaagcaaaatctttacattcaaaaacgttttcaccaacttatcttgttcgaagaagagtgtgattaagccaatcaacggtttcgattcattcgatggatcatcagatactgatcgttacatacctgagatcaactccttaagcacgattgtgagcagccatgagaaacctagaatcaaagaagaagaagataagactgagtctgctttagaggagccaaagatacaatgggcacaggggaaagcaggtgaagatcgagtacacgtcatcctctccgaggaaaacggttggcttttcgtcggaatttacgacggattcagcggtccagatccaccggattatcttatcaaaaatctctacactgccgtgctcagagagctcaaagggttactatggatcgacaaaggtgaatcatataatagaaacggcgagtccaacatcgagaaacagagtacagtcgagcatgcatccgattcggatcaagaaaactgccctgtgatgaatggaaacgatgttgcttgtggatcaagaaacattacgagtgacgtgaagaagttgcaatggaggtgcgagtgggagcataactcaagcaacaagtctaataatattaaccacaaagacgttcttagagctcttcaacaagcgttggagaaaacagaagaatcgtttgatctgatggttaatgagaatccagaattagccttgatgggatcctgcgttcttgtgacattgatgaaaggagaagatgtttacgtgatgagcgttggagatagccgagcggttcttgctcgaagacctaatgtcgagaaaatgaagatgcaaaaggagcttgagagagtcaaagaagaaagtccattagagaccttgttcatcaccgaaagaggactgagtcttctggtccctgttcagctcaataaggaacatagcacaagtgttgaagaggtgaatctttttgcgagtcctgattcagtgttttgttttgcgaacattagacactaacgatcttttgatgtgacaggaagtgagaagaatcaagaaggaacatcctgatgatatattagcgatagagaataatagagtgaaaggttatctcaaagtcactcgtgcatttggcgctggatttcttaaacaggtatatatatactcatgattttaatcagatagtttcaaaattttgcatgttttatagtttttagggttggattattaggtctacaaggtttgtagaaatatcaaaatgcagaaaaatactattacaaaacctggtttgtttttattcgatttgataatagttttgttcaatgtctttcctcagccaaaatggaacgaggcgcttctagagatgttcagaatagactacgtcggaacatcgccgtacatcacgtgctctccgtcgctacaccaccatagactctcatcacgtgacaaattcctaatcctctcatccgatggactatacgaatacttctcgaacgaggaagccatcttcgaggttgactcattcatctcagccttccctgaaggcgatcctgctcaacatctcattcaagaagtcctccttagagctgccaagaaatatggtaatactaagaacaaaacgcaaacgcacttaagattcgaaacgcaatctttgattaaactcacgtgcatttttttttttttttaggtatggactttcatgaattgctagagataccacaaggagatcgtcggaggtatcatgacgatgtttctgtgattgtgatttcacttgaaggaagaatttggagatcttccatgtgaatactaatcttttgaagagactcttactaaagtaacttttagaattgattcaatctttttagaatagattttttttttttttttttttggatttcgctgaggttttaccattttgttactcagcatattttaacgatgttgcatttgtgtcccatatacgttattgttagtgaaaaatataatgtaagaataatttatataactatcctactagcaaagctaacgcaaattttgaactcgaactttagttaccgtgaatgaaaataacagacttgaactttataatactcgtagtatacgtaatttttgctttttgcagatatgcttgccactaataaagtcataaattttatattttcataaactatagttatacacttttgactaaacaaacaaaatcggtttagcaaaagaaaaagttacttttctgatgaactaggataaggaattcggaactgaattttgctacgttctctctggaccacacacactgaacacccttttaagattttctccttctctttttcaacgtaatttatcttttgatcagaaacgacaaaaaagaagtctaacaatatcaaacaatttttttatagatatttttagatatttttcctgctaattttatctagtgtagacaaacccaaatatacgattattataaaaacacgaaataccaagtggacgactgaggttaatagatctagccgtagaataaagatctgcatgaaaggcggtgagaatctaaacggtgataagaccataacacacggaacatcggtacgctctcgaacgtacaagaatcgacgacacacaaacactccacaattatttgaacactggacaattattgaaccgacgtacgagaatcaatgcgctgagggtaaagacgtaaatgaagaactagttttggagataagagcggagaaagattgcgacacatgtatggtcaatattaatctcatttagcttataaatttgggagcttcctctatcattaattttcattcataaatttttcttcaatttgaattttctcgagaaaaatg

SEQ ID NO: 15004 - DNA, 3000 bp, Unknown
  misc_feature (1)..( 3000): cDNA_ID_3020080_gDNA_ID_2684240_Annot_ID_192564 3000 nt of promoter + ATG
tgtcattttcccaccataattcaccaagtttacataaaaaaaaactaggccatttttccaaacttttcaaagttgtccataaactcttttcggagtcataccattggatcattgtacaattacaatctagaacacattctctatcacacaatatttagatcaaataaatcaatgcaaatgatagaaaactaattttactgtaaaaaaacacaaaaaagcaatggtgaaagactaaaaacttgaagaaccggggttttgatggttcgccggttttagccggcttttgaaatgtgtattacaaatttaatattaaataacaaattttgtatattacaacttttttttcttcaataacatgcatgcattataccggtttaaaaatgagaggtgacaaaagacccgattacaaaattacgacatgcgacaatggcactagcacaaatcattaggcatatcatagttaatcacataagacttttttagttttgtacaatttttgtgactaactattttataaattattttgcataactttttgtaatacattatcaaatattaaactacatttttatattataactataagttattattgaaaatttatttcattaccataaattatattttttctttagcttacggatctataaacgctaagcacggtgccgcgaagacacaattcattttagtgtatcagagttggagatccatgattcataatattttacaggacattgactatgcgagagtcaacgctcttgattttctccatgtactagtggttttttcgtaggttcacacatgctcacttaacgactttagcagatgactcccctacgctacagcggtcggagactctcagctgtagggatacggtttacctacacatacatgtagtgttaatgtatttttttttcttttccaaataatagttaattcttttattgcacataaaagcaacactaattttaatgtatttgaatacagttcgttcgtttgtatcagcatctagagacatccaataaccaaataatttaaaagctcatgcttttgtgttaaagagtagactcactattcattacacaatatgttctcaacttaaaagtctcgagataaagagaaacatcataaggattcgattcctaaattaataattcatttcataaccagaaaccttctatgatagttagatttgttgaaatcagaaaacttgtgaaatgctgataatttcaaagagaaaaacaaaagattagcaaaggcaaacaaagtcaattactttatttttgtgtaatctagtcatattactattaaattgcttcataaatctctacgatatgcacataatcttatacacacaatttgacttgtcctttggttcatatatgttggtgaatgattcattatgtttacacaattatgagtcatgattcatagccatcaaatggtagtagcaagagcacgctctaaactatatgacttgtcattggttctaaacacaatgtcaagccactctagcattccccaaatctctcccgtttgacgtttttcaatcgcaatttccgcccaccaaatttttgcctccttcttaccgaacacatactctaccgacacaactgccattttcccaccataattcaccaagtttacacgagaaaaactacgcaatttttccacacctttcaaagttgtccataatcttttttcggagtcataccattcgattcttctatcagtataacggtagaacacgttctctatcacacaataatgggataatgaaggacatcaccaccctttatttatcgctatgtctgctgttcgccatctacctttatgcagcttgtaagtcacatcctttgcctcagactttacatagacagttccttcatactctacgcttctgtactttgagcctccaaatatctcctcgctagggatctgcaaaaactcccaagtttgggtctgcgtatcaaaaacctccatccaattcgttgaatcaagatttttgcaacctcctgttacatatattttcccatcatggacacaaacagagtgggacaaacgggccacatgcatacttggtgcctcacgccatgtgtgagaataacaatccatgaccatgacgctagacgaataattcttatttactaaccctccaatagcatagatgttaggaccgactattgcagcatccgaccaggatgcagatggaaaattaggagatgaaatcggaaccaaaatttttttggagttaaatggtccctgacagagcgtgaaccaacgtagttggtcagattcggtaaatagtcggaaacacacataaagacatctctcggtgcggcccaggtgggttcgggtttgataaagttccgttgaagcaaggagagagcggaatctcgtggagactaacgagagagttggataatacaatcttgagatgcgggctaagcagttgaatagcaaatcattaggaagcatcagaattgtcatctgtcttcttttaaaaggtgtcgtctcttctccattcatggctatggaagtgcacacttgcgatagttgtatggatggccttttcttgcgcttgttccttctgttaacttctttatgtatccagaaatctcgaccaatctcacctcaagttttcttcttttttttttgccaataccacctaaagtgtttatatagggaattatcattcctaatccaccatgtattattattaaccatattagttcacttttcgaataggaaaaccatagtgtatatgtaaaagaaaatattcctttttaaaaaaggaaacaattaaaacgaaaattggatacgagaattacattaccgagagtacggcgccgtttaagtatttcccgatatttcctttatatgatttgtataattaacttcatgactcagattatatttaggtttaggtttattgaggtctcccacgtctcattcgataagcttcttcggttttctactaattgatcgttagggtttatg

SEQ ID NO: 15005 - DNA, 3000 bp, Unknown
  misc_feature (1)..( 3000): cDNA_ID_2731389_gDNA_ID_2684240_Annot_ID_192562 3000 nt of promoter + ATG
cacttctgcttgtatgatattataataaaatctttcttgtgccgaacttttaacagtcagactattgcagtatgagcaaaaggggaaaacaatgttctggtgagtgcaattgttttctatcagattaaagttcttcactatcgtttgagcacttgagaatctatttgggctgtgtcgcagagaaaggtgaaaaagataaagatggggctgaagaacatgctgatacttcggatgaatcagacaacttttctgacatcagtgatgatgaggtcggtaattgtttagtagtaaatgctatgtcaaatttccaacctcgaatatggaacatgaaataaagaagaattctcaacagtttcaaagtcttgttttctcactacagtttcccttgttatatttgatcgtcagtcatagtattttactgttgctcaggtaaatggctatatcaacaacgaggaggaaacgcactataagacgatcacatggacagaaatgaacaaagattatcttgaggtgatttcagaggctatataatatgtatcttctcttggattccttttgatttatcacctaggagatcaaatcacatacaaaattatgttgttttgtaggagcaagctgctaaggaagcagctctgaaggcggctagtgaagctttaaaagctagcaactctaattgcccagaagatgcaagaaaggctttcgaagctgccaaagctgatgcggcaaaatctagaaaggtgactcagtttgaactttgaaattatgttcctgatcaagcatctgacttttggagaataacatgatacccattgatgacatatggtttctcaatcaatttctgattcttttttctctctcttcatataggaaaagcaacaaaaaaaagctgaggaagcaaagaacgcggctcctccagccacagcagtggaggcggtacgccgaacgcttgataaaaaggttagaatgtcagcttctttgataccttgatacttgaaaacgaatatgcaaaaaaagataaaccgagtatgccatgtatcatctgttaaaaacctggcctggaagtacatagtcaacaacatggctgtcgaaattattagcattgaagaaactttagagtctgtgtttcttcctttttcctgattttgagtgttgactcttacagagacttagttcggtgatcaactacgatgttttggagtcgctatttgatacatccgtaagtttttgattacctcttcttgtatcctcaattctcatcactttttgaggtctttacaattttgcttctcttttcttctttcaggcacctgagaaatcacccaagaggtcgaaaacagagacagacattgagaagaagaaggaagagaacaaggaaatgaagagtaatgaacatgagaatggtgaaaatgaagatgaagatgaagaggatgaagaagaaggcaatgtagaatcatacgacatgaagacagattttcaaaacggcgagaaattctatgaagaggacgaggaagaagaagaggatggtaatgattttggattgtattgatgatatgtattgtgaaacacaagagttttaatttcttttgttttgccggattagttgattttatttgcattaatataggagaaccccaactaaatttattctttattatcagtaacaaatatttaagatttaaaagaaaaaaaagttcacacaaatgatctatttatttttacaattcaagtggtactgactaagaaatgaaaaaccactaacttaattaatttaataaaatctatatgtatttaattttgataattttattttccttgtttatgataattctaatttctatcagataacaactaacaatcactgaacttatctcacctatttgatgagctaaatgtattttaaatttatttttctataaagatataactgaaacaaaagtgatgactttttatgaaaattcccaaaatcaaataccagaaaattcaattttaaacaaaatgtgtcggtccggatgatcttacatctagcttggttttacaggatagtatttaagaagaatcataaagttcatctcaaaccaaatccgacggtccagagtcacctgcaaagcttggcatcgtatacgtgttcagtggtcaacggatcagctacgagtgccgtttgaggttcaaacttctgtttctgaggttaactctctaccgttaacgtccgttagtgtaccttctaaccttgacgacttttccactttccaaaagataacgacggcgttaaattggtctattttactgaaccagctttaaccagaattagattgcattacattcaactcgtgcttatggataaatatcagttcggtttggagaaaataggttacttaaggtaaaaagaacggcaagtaacggtgtgacgtcagcagaagaagtattcgttataatagtgagagagagagagataaaacttagggaacccttttttatgttttattttctcgctttgtttcgatcaagtcttctctttctctctctatccctctctctctggttcaacgggcaaagtatttttcgaataaagttttggttttttttttaacgttcctttcgccttctttcttcttcttctgctggtgaattcgtgtatctatctatctcgatgagctccacttttaatccagccgcttcttctccagatgaggttagtttttgtgtatcgaatctgaatttttaagggttttgttcttgtgatcagattctagtgaaattgagttctttgttgtttggctctgattcgaaacgaatttaactttattgaaactataaatttttgtgattacaattgttataaaccctaattttgctgtggttggtgttaatgttgagctgtttactgaattcgtgatttgtgagatctgggttctgtctgctttgtgttttacgatgattgcttttttagggtttctctgtttcttatcaaagtctggatcttttttttctttcattgagatg

SEQ ID NO: 15006 - DNA, 3000 bp, Unknown
  misc_feature (1)..( 3000): cDNA_ID_2993463_gDNA_ID_2684240_Annot_ID_192556 3000 nt of promoter + ATG
caaacattagtttacatataaaagtaaaacaaaatttcaatagtaactctaaaaatagtcttcttgtgaatacttttatccatttcctctttttctaaccaatcaaaattttgttacctaacaaaaaaaataacggaaattttctattgggtttcaagtaaataagagaagctgaataaattttacaaaaggaaaacaaatgtttttccctatatatgtactaacgaactaaataaatcaataattgcgaggagaataaataatgatccgagggaagatctcattggcatacaaggcacaataagaataagcaaggaaaggcagtcaaaagaagtcgaatattatttgtctgttagaaagcataatcctaagttcccatcattggctcatagagaacatataatctttctccaatgatttgatgtctcacactcactagtcactacttttacttttcacattttatatgccatttgcttgcgcaaaaatacactgcgaatgaagtggttgtaatttgtggtttcattagtttgatcgatcgacataaaacgatttgtaacaatagatccaaaacagttgcaagtcgatcgataactagtatgggttcaagtccatgaaattcaatcacagctttgcggaattcaattgcttagatttcttgaagagttttgttaggaatttcatgtctcaacaagaagaaacttaaaataacacataacgaatgttagctaacataaacatattcacgttgtaaatgcattacgttttaatcttagaaattcatgaatgtctatattcttaaagaataccataaatttatcagtacagattcgacatcccatcaatcattcgcatagttatagctctaaagatctatccagtacaatcatatcaaacaaagaaggctaagacatacgaatggacatgatagaacatgaacaacaaaattttgttttccactagagcatatgttctcatagcattaaacctttcgaataagcatcttctcaatactatttagcctcacgagggttataaattctcacatttccctactgacttctcaccaaacaaaaaaaactagaagaagaacgatacataaactatgctcacgcaagaacttgcgcgcattatggggggtgacgatgatgagtattggtgaggaccgggtaatctgcatcctgaggtttaaagcttaatttacgcaggaaatttgtatacgcatatacgtatgtgtattagtataccttttagtcctcgggatgcggattacctcgttcttacttacaatacacgtactcggagacacgattactcatcatctagaggttggttttgatcctccatttcttctaagtttaaacatcattaataagatatttaagactgaatatcaccacacatatatagagtcagtctcatagatgatgaattggtaatattatatgacactactgacttaaaattattatcatataatattactaattatattaaagttttttttcgtcaacatacacactagttaaaaatttgaatttagaaaagttcaattgatgactcatttcaggaatgctcgaaacaatggcaacgacgcttgtgtatgtttgaattagtgatatatccgttttattcatacttaattaaactggtaactctaactaatacgctgtatatttacctttttgtctagtgaataaaaaaaaatcacgacgacctagttttatgtcttttatctattgctcaaaggtcgctcattgcctttgactaatatgtttagacttgtgatttctgctattcaattaaattaattaactgcgtttattaaatttcagttaggtgactcataaaaagaaaacatagattaattaagttatatatatagtataatgatgtacatacaaattcaaaagtactatggatcttgctttgaaaacgagtcagtcaattgattttgtagatttattcagttttcatagatgtccaacactggaataattgttgataatttcaggaaaagcatatgttaaaataatgctaataacaaaaacaaagctagtgatgtgtatcaaactaccaattgtgcagagacaaaaacaaaacgccaaaatgctgtgttgtacccttttttgtcaactgcgtatctgtttttttttcagtataaaaaacttaagaaatctctaaacctaattattgagagtaaaaaaaaaaacaaataaataatcaaattttactgaaataaattgtaatgatcaaatatatttaagcattgaattttttttgtgtagtcctaaagttgaatcttgaaaggctgctgatcttaatttgtctttttttttttgttcgtgcaaagctgctgatctttgttattgtctcatatgtaagtggttagcataaaataatattaatttcttgaatatgcgttgtatattttggtgaccatatacaactacttacatcgatcttgtaagaattgcacatagtaaagtaaatatatcacaaatcatatgtccgataacttcatctatttatatatttaatgatgaaaattgtagtttgataaaaaaaataaaaaaaataatgatgaaaattgtagaaacgaaagtattttaatcgtaaaatggaaaaaattgttagatttttattgatcattttttggtagttgctatactgtttataggttttatatttagttgtggaaataatttataactataacagaatagattattcatgtaatgacatagaaacagttgttttcacttttcttgttttgtcttggtgccgtggtagattttgataataaaattagagtgttgattaatttatatttgccaaaacaaaataaacaaataaataatttcaagttgaccaattcatatttcttgatggaaaacactgatctcttctcttctattctttctttctcttatgaggaattttcacaatctttgatcatcttctcctttattctacggaagaaatctatatattctatat

SEQ ID NO: 15007 - DNA, 3000 bp, Unknown; identical to SEQ ID NO: 14996
  misc_feature (1)..( 3000): cDNA_ID_1444487_gDNA_ID_2684240_Annot_ID_192554 3000 nt of promoter + ATG

SEQ ID NO: 15008 - DNA, 3000 bp, Unknown; identical to SEQ ID NO: 14995
  misc_feature (1)..( 3000): cDNA_ID_2731421_gDNA_ID_2684240_Annot_ID_192553 3000 nt of promoter + ATG

SEQ ID NO: 15009 - DNA, 3000 bp, Unknown; identical to SEQ ID NO: 14994
  misc_feature (1)..( 3000): cDNA_ID_1019230_gDNA_ID_2684240_Annot_ID_192552 3000 nt of promoter + ATG

SEQ ID NO: 15010 - DNA, 3000 bp, Unknown; identical to SEQ ID NO: 14993
  misc_feature (1)..( 3000): cDNA_ID_2731431_gDNA_ID_2684240_Annot_ID_192549 3000 nt of promoter + ATG

SEQ ID NO: 15011 - DNA, 3000 bp, Unknown; identical to SEQ ID NO: 14992
  misc_feature (1)..( 3000): cDNA_ID_3044064_gDNA_ID_2684240_Annot_ID_192547 3000 nt of promoter + ATG

SEQ ID NO: 15012 - DNA, 3000 bp, Unknown
  misc_feature (1)..( 3000): cDNA_ID_3020125_gDNA_ID_2684240_Annot_ID_192543 3000 nt of promoter + ATG
aattatcttcttttttgcagtcctctttggcttcttaattatcttcattatggcagccatctttggcttttcatctataaagtaacaacgaaagtttgttacacttggttaacaggaagcaagaatcaacaagatattgacgtacctgggcggccacaaatgatgcggcctttctggcggcgggggtggaaaatgtttcttccatggtaagcaacaaaccgaacaactgctttgcgcccccctcccatgtcggtcccactaagttttggggccttgtctattgcgtcttctcccagtagatacactatagagaagctgtaaaaaaccaggacgacaagtctttagtataagtttagactttactaacttggggaaatatggttggggaggaacaagccacaaacctatcgaaaatcatgacatgatcaaccttcccacatgaagagaaaagtttactcaactcgcacttgatatcagactcactaagcgaagtgtcgtatcgtatccttcaacctctaactcaacgcaactgaaataattggattgcagcagatgatatagtataattagaaaacaatcttaaagatacaaatctcggaaataaattccgtttacttgtcttcttctttcggaaagggatcggcctcagcatcgacagtccatcctcccatgtcacttccattgagttgcaaggccttgtctgctgtgccttctcccacaaaataaataaaagcatgactccagagagaagaattgcgagtttcgggaatatgaacatccgtgatctctccacatggagagaaaagttttttcaactcactctcgacatgttcacgaggaagctcaatgtcatatcccgtaacgctaatcctctcaatgtcactgtcactacaagcaagagatcatgatcaacatatatacatatcttactcatacaataatctcaaccaatcaatcaatttaccggatttttcgactacgcttcacttcaagcccctaaagatacaaaaacatctatcagaaattcgaaacagatcgtcaaagagtgaataagaagaaaggctataaggatacgaagaagattaccttgttggcgatttcgtccatggataagttgacaagagcgccggcgataacccttaagagatattttacggttttagagatttaggtctgatttgaacaaggtattaataattgtgttttaaaaataaaataaaaaatcattactagcttgctatgcacggacatagtatacttgttattttctttttatagagaccgaaatatttttggtatcaactaaatattttaataatttgaaaccaaatgaatcatatttttatctctttaacttttaaagacaaatttcatacagttaaacttttttcataaagcaacttcatacatttagactaaaaaatcattataaaattattatgattagctaacagatttaaattgtaaaccaatttaaaaaaaaaattaagctagtcttttcatttttacaaaagattttggtggatcaaacgtgtagcccttaaaatctatttttgttgtttggtactaatacgttttttcttggttttatatcaagccaatctccgtcacttatttctgatatcaaaaatcacttttttttttaacagtttaaaactttattatctcctttttcgcaaatatatgagttgtttttatcaaaatagtatatggaatataatggttctgatgtttagatctaatcatccagaaatttatgcggtcgtgatagtggaggtacaaactacaaagcatgtcgcggaacgcaacttttctctatctttcggaatatggtgtttgaacatattttgatcgtaagcttcatgtaattgctaattctttattgattattctccaaagcagctagtgtctgaggcaataaaaattttcgtaaatgacttttaaatacatatataatctctcagatactaaatataatatattcttaatatgaactaccctcacaagcatggatgtcgggaacaacaacatttcgacgcacctgaatcaaattccattttcattcgaacaaaaactggagaggtttgatcccagtcaccaaccgactcatccttgtaggctagatcccaaacactacttttctcaaccttccatttctgaccactcaaaccggttcaaaacgccctacgacgaccaacggttcaattcggcaagaattagcttctacaagaagcttacgatctaaatctgctctaacaccatactccgagaaaaagagaaaggttgcgttccgcgacacgctttgtacgtccgccatcaccaccgcaccaacgtttgtacaattggatctaaccatccgaaccattgtatttcgtgtaattttttgaataagaacaactcaagtatttgtgagaagaggagatactagggtttagatttttagagaaataagtgatttctaatatcagaaataagtgacggagatgagcttgatataaaaccgcatgtcatgcgtgaaatcttatcatgacaaatgtatattatattgacccatcataaactttatcgccaaatattttttctttttatccaaaagtaatattcggtatttttttagggtgaattagctcaataaccatattccataaaaatattaagtaactaacaccataaacgaaggaattgagagagtgacgctacgggtatgtgaagttacaacccactccctaagccacgtttctgtgatttcttgtacgcgcgtgagggtaagagcgagcttctttctaccagctgacgtgtctcctttcgaagccagtaaaaaaattatcctagcaccgcttgagaattgtcccatcagtaacataacctgcagatttttacattaatttgaataaaatattccccccaaaaatatcggagcagaagatgctctgttttctatttattgccagtaaatgctataccttttacgcagagatctaacctgcaaaacagaacagt

SEQ ID NO: 15013 - DNA, 3000 bp, Unknown; identical to SEQ ID NO: 8932
  misc_feature (1)..( 3000): cDNA_ID_1989272_gDNA_ID_2684240_Annot_ID_192542 3000 nt of promoter + ATG

SEQ ID NO: 15014 - DNA, 3000 bp, Unknown
  misc_feature (1)..( 3000): cDNA_ID_2731393_gDNA_ID_2684240_Annot_ID_137763 3000 nt of promoter + ATG
ctggtcgttaaatttagagtggaaggtaacgttcacatgtttaaaaggtccaaagtcaaaaggtacatgcgtggcatagatttgccaataaattaaagaaaaaaaggtaaattcaagaaaggcttatcgagctaatttaagcccaataatactgaactatttgggcttgagtcttaaaggcccaatttgtggaggaggcgtcatcgtcttcgcttttccttttcccttgagaggtcgtcgacgaggtttaagatttttaagaatgttgtagtagcttcgcgaataatctcaggtcttctataaaaccaaactagcgattagccgactcttcctctttattattacaaagacgaaaaggcttcgagttttgtaatttcttcttctgttacaagttcttttcactgtgaaagtaattcttcaatggcgaaagacggacctaattgggatggtttgcttaagtggagtctctctcacgccgacggtactcgacccactcgccagttgaggtacggacattcatcttgtagttggttttttaggttctgtcttttgatttgtctgaaactgatgggatgcttggtgggtagtttaggtatctgtgtggctatgattgagctttcacttgaggagatgaatcttatgagtgaattcgaatctgggtttgtttaaagtagttttcttttttgaagatatctgttcagttcatcggtttggttaagattcaattatcgaattctgctgttatgtaggtgaaaggttatctattttctcgtttttacatgaaactctgttaattttttttaagggaattcacgatttgttcatgtcaaatcattctgtatgtgttttattgtggattgttttgttgatttgagttgttttaatgagacagtgaggaggatcgaaaatggtttatggaggctatgcaatcgcagactgtagatgtagtcaaacgcatgaaggagattacactagttatgcaaacacctgaacaagttttggtggaacatggagtaacacctgaagatatccaaggtgcgtaatttgtggctataatacatagcttagatctttatcttttgccattgtgtgtagggtactaattgagtttattattctggtagatttgctggatgagctgcaagagcacgttgaatcgatcgatatggctaacggtacattatctctaacttggactttgctttttttttttttttttttttctttcctgttctggttagctcaatttgaacattgcttgtaacaacttgtttacttactattgtgtagatcttcattcaattggaggcttggttcctcttcttagtttccttaaaaactctcatgctaatattcgggcaaaagctgcggatgtcgttagcacaatagttcagaacaatcctagaagtcaggaacttgttatggaaaccaatgctctggagtcattgctctcgaatttcacttcagacactgatattcacgctcgaacccaggctcttggcgcaatatcatgtaagcctgcttctgatagttcatttttagtaaagattgagatgatcaaaagcttttgtgatttctattttacttggtttgtgatactaaaagagacttatcttttcaatatgggatgtagctttgattcgccataacaaaccaggagtaacggctttcaagcttgccaatggttatgctggcctaagagacgccttggcatctgatagtgtgagatttcaaaggtaacccacacaaatattcttatcatctgcggatataaaatcgtggaagattcttgaattgttgctcattttctttattcaaattctccaggaaagccttaaacttgttgcaatatctactgcaagaggatgattcagaccgcagtattgccactggacttggattcccccgagtgatgatgcatcttgcctctagtgacgatgctgagatcagagaagccgctcttcgtggattacttgagctttcaagagagaaaaacgatggaagtagcagcatagataaaagcgatgagaaactgaggcagctactagaagaacggatcaaaggaatcaccttgatgtcacaagaggatcttgaaacggttaaagaagagagacagctcgtggatttactgtggagcatttgctacaatgaaccttcttctctgagagaaaaaggacttgtcgttcttcccggtgaagacgcattgcctcctgatgtcgctagcaagctctttgagcctcctcttagagcttctgcagcaaaccgtaatgctactgagaagaaagatgaacctatgaaactacttggaccatagacgagaaatcaaagctaaaactttttattacttttccttgttttttatgttttgtaacttttcaaattgtcagaaaagtttcatagatatatgtattatgtcaatgatcaagggctatgttatgttaatttttgttttcatcattcgagatctttagtcttgttattgttgagattaagaatattcagcttcaatgctttttcaattcaacaagtgttctatacgatttcggtttagcaacagctaatacggacccgatctaattgatcggttaaaattggtaactttgaattgcggtgaaccgaagaacaaaaccaaagcgaacgtcacaattactttgcaatccctaaagggacagagttcgaatcaaggcagtctcacatatcggagaaatctctcgtcacgtctctcagcttcgccttcaacaccgtcgtcgccgtcacggccaactccggtattgttatatagatacaattacagtgaactagataatctcatcaaaccctgattctttccacttcctcgcacgattgtgtgaaaacagttactttcgctataaatagtctgatcttctttctattgagcagtaagattggaagctgttgtttcgaatcgattcaagcctcgaatctgagtttcggatcgatattagaagctaaggtaggagctttttgagtgaaggagtt

SEQ ID NO: 15015 - DNA, 3000 bp, Unknown
  misc_feature (1)..( 3000): cDNA_ID_2731389_gDNA_ID_2684240_Annot_ID_137764 3000 nt of promoter + ATG
gttcacttctgcttgtatgatattataataaaatctttcttgtgccgaacttttaacagtcagactattgcagtatgagcaaaaggggaaaacaatgttctggtgagtgcaattgttttctatcagattaaagttcttcactatcgtttgagcacttgagaatctatttgggctgtgtcgcagagaaaggtgaaaaagataaagatggggctgaagaacatgctgatacttcggatgaatcagacaacttttctgacatcagtgatgatgaggtcggtaattgtttagtagtaaatgctatgtcaaatttccaacctcgaatatggaacatgaaataaagaagaattctcaacagtttcaaagtcttgttttctcactacagtttcccttgttatatttgatcgtcagtcatagtattttactgttgctcaggtaaatggctatatcaacaacgaggaggaaacgcactataagacgatcacatggacagaaatgaacaaagattatcttgaggtgatttcagaggctatataatatgtatcttctcttggattccttttgatttatcacctaggagatcaaatcacatacaaaattatgttgttttgtaggagcaagctgctaaggaagcagctctgaaggcggctagtgaagctttaaaagctagcaactctaattgcccagaagatgcaagaaaggctttcgaagctgccaaagctgatgcggcaaaatctagaaaggtgactcagtttgaactttgaaattatgttcctgatcaagcatctgacttttggagaataacatgatacccattgatgacatatggtttctcaatcaatttctgattcttttttctctctcttcatataggaaaagcaacaaaaaaaagctgaggaagcaaagaacgcggctcctccagccacagcagtggaggcggtacgccgaacgcttgataaaaaggttagaatgtcagcttctttgataccttgatacttgaaaacgaatatgcaaaaaaagataaaccgagtatgccatgtatcatctgttaaaaacctggcctggaagtacatagtcaacaacatggctgtcgaaattattagcattgaagaaactttagagtctgtgtttcttcctttttcctgattttgagtgttgactcttacagagacttagttcggtgatcaactacgatgttttggagtcgctatttgatacatccgtaagtttttgattacctcttcttgtatcctcaattctcatcactttttgaggtctttacaattttgcttctcttttcttctttcaggcacctgagaaatcacccaagaggtcgaaaacagagacagacattgagaagaagaaggaagagaacaaggaaatgaagagtaatgaacatgagaatggtgaaaatgaagatgaagatgaagaggatgaagaagaaggcaatgtagaatcatacgacatgaagacagattttcaaaacggcgagaaattctatgaagaggacgaggaagaagaagaggatggtaatgattttggattgtattgatgatatgtattgtgaaacacaagagttttaatttcttttgttttgccggattagttgattttatttgcattaatataggagaaccccaactaaatttattctttattatcagtaacaaatatttaagatttaaaagaaaaaaaagttcacacaaatgatctatttatttttacaattcaagtggtactgactaagaaatgaaaaaccactaacttaattaatttaataaaatctatatgtatttaattttgataattttattttccttgtttatgataattctaatttctatcagataacaactaacaatcactgaacttatctcacctatttgatgagctaaatgtattttaaatttatttttctataaagatataactgaaacaaaagtgatgactttttatgaaaattcccaaaatcaaataccagaaaattcaattttaaacaaaatgtgtcggtccggatgatcttacatctagcttggttttacaggatagtatttaagaagaatcataaagttcatctcaaaccaaatccgacggtccagagtcacctgcaaagcttggcatcgtatacgtgttcagtggtcaacggatcagctacgagtgccgtttgaggttcaaacttctgtttctgaggttaactctctaccgttaacgtccgttagtgtaccttctaaccttgacgacttttccactttccaaaagataacgacggcgttaaattggtctattttactgaaccagctttaaccagaattagattgcattacattcaactcgtgcttatggataaatatcagttcggtttggagaaaataggttacttaaggtaaaaagaacggcaagtaacggtgtgacgtcagcagaagaagtattcgttataatagtgagagagagagagataaaacttagggaacccttttttatgttttattttctcgctttgtttcgatcaagtcttctctttctctctctatccctctctctctggttcaacgggcaaagtatttttcgaataaagttttggttttttttttaacgttcctttcgccttctttcttcttcttctgctggtgaattcgtgtatctatctatctcgatgagctccacttttaatccagccgcttcttctccagatgaggttagtttttgtgtatcgaatctgaatttttaagggttttgttcttgtgatcagattctagtgaaattgagttctttgttgtttggctctgattcgaaacgaatttaactttattgaaactataaatttttgtgattacaattgttataaaccctaattttgctgtggttggtgttaatgttgagctgtttactgaattcgtgatttgtgagatctgggttctgtctgctttgtgttttacgatgattgcttttttagggtttctctgtttcttatcaaagtctggatcttttttttctttcattgag

SEQ ID NO: 15016 - DNA, 3000 bp, Unknown; identical to SEQ ID NO: 15003
  misc_feature (1)..( 3000): cDNA_ID_2685913_gDNA_ID_2684240_Annot_ID_137766 3000 nt of promoter + ATG

SEQ ID NO: 15017 - DNA, 3000 bp, Unknown; identical to SEQ ID NO: 15002
  misc_feature (1)..( 3000): cDNA_ID_2731384_gDNA_ID_2684240_Annot_ID_137767 3000 nt of promoter + ATG

SEQ ID NO: 15018 - DNA, 3000 bp, Unknown; identical to SEQ ID NO: 15001
  misc_feature (1)..( 3000): cDNA_ID_2731376_gDNA_ID_2684240_Annot_ID_137769 3000 nt of promoter + ATG

SEQ ID NO: 15019 - DNA, 3000 bp, Unknown; identical to SEQ ID NO: 11001
  misc_feature (1)..( 3000): cDNA_ID_2724771_gDNA_ID_2684240_Annot_ID_137771 3000 nt of promoter + ATG

SEQ ID NO: 15020 - DNA, 3000 bp, Unknown; identical to SEQ ID NO: 11002
  misc_feature (1)..( 3000): cDNA_ID_2731368_gDNA_ID_2684240_Annot_ID_137772 3000 nt of promoter + ATG

SEQ ID NO: 15021 - DNA, 3000 bp, Unknown
  misc_feature (1)..( 3000): cDNA_ID_2035675_gDNA_ID_2684254_Annot_ID_138074 3000 nt of promoter + ATG
agccagacttataaacttgcacgacaagacattcatccttttttaattaatgaacaagagtaacgacttttacacttctcttgtcacaaaattattgaacagtatttacaagtattttataaaaattgctattggttgatatttttattggtgcatgtcaagatatttctggcaacaatcattagaacgcgaccataacatgtgctgcaatttgacaattctttatatctaaaaaatgacaatttgacctcgttggaatcttggatttgtttctcccaagcacaatatgttcgagctatcgtaccatttctgaaagtgtaattataaagactgcaatcatatatgggctcgtggagctaaatcatggcctaaagtttttttttaatcaaatggattttgaacttgtggtaaagttttcggatctacgaaaaattatgcattcttaatcaaacctctaattcgataagacaattgttttccaacaaagaatgtgtcaaaactcaaaaactcttaacaattgttttgaatgttttccaataataccacatcggtttatgtatcaattaatattccaaaagttgatactcccaacgatattcctatgacctagaatttgatccatatctcaaaattttacgaccgacaaatatattaatgttcttttattttattttatatagattaatggtttagtcatctacatgtattcattaatacacctatatactgtaatattttcacgaaacttttaaacatttacaaaaaatgaagagattaactttgaaacggaagagtgttaattacttaattatgtatgttttgtttgtttgtcaacgaagagtattatttttttatatactaatatgaagacaaaacatataattccatgtcacctcgtaatctcgtatgttgtaaaaaaaatatctctatccaatagtatttcactacctagtttaaatcgcattctctataatacgttaccatattccccaaattacccttagctatgaccatagtcgctggctcgctgcaaaaagtgaaaggggtatataggtaaaaaaggataaattaacagagagaggaagggctttggcgtggaagctcagcttttctccgagtcgggaaaatgtctttttctcgaaagaataaatctttttctcttctctctgtgttaccctcttgaaattttccgcgaaaaatctcaacttttccatctgaaaaccccccaaaatcaaacaattggatcttgatttttagctgtgatttagtgattaagaggcttagggtttgtggcgaaatgttggtacagagaagagtaatgagttggagaagagtctggaagtcgtttcaagcggcttctgcgcattgtttactcttctccttcacgcttcttctcgctttgaagcttgatcatgttgtttctcattcatggtggtcagtttttttcttcttcttcttaaagtttccgtctttggtggcttgacttctgttttgtattgtgaaatgtttgaattgatcgattggattctcaattatgcaaattctcttcttgtaaaattggatttttttttgtcttaaagttaaactctttcttaggtttatcactttgaatctttggtgatgtataaagtagaagtagtatcttcaataccatccttaaaggttaagactttgatgtggatagctttcactcttctttaagtatgtgttgttttgtctgtttttacaggtttgtatttgcacccttgtggttgtttcatgctgtgattgctcgtggtagattttcattgcctgctccatcaatgcctcatgatcgacatgtatggcatttttatgattctcttgtttcattttgaacctttgattctttgttgtgtttaagtcctaacttggtcttgtggcagtgggctccttttcactcggttatggcaacaccacttcttgttgcttttgagatccttctctgtgtacatcttgaagataaatatggtattttccatgacttctattcattgaatcacggcatgtatgattggtgggtttattataggctttggttgtgctcctctgtttgcagttgttgacttaaagattgtctttctaccgttgcttgcatttgaggtagcaattttgatagataatgtcaggtattccattcaaagcttttttgattttgttcacccttcttactactcttagagtacggaacaattaaatcttttttgcaactattcctgcagaatgtgcaggacgctcatgcctggagatgaagaaactatgagtgatgaagccatatgggaaacacttcctgtaatcaaagctcgacaagtttaaaatatgatcccttatatttctcttttaacttgtctctgcaggttgtctctgacattgtctaatggttttgtagcatttctgggtttccatatctatggttttcttcattgccgcaacaaccttcactcttcttaaattatgtggtatgttacgcttttacttaactatcttttttggagttagtgatcttctcccttccaactgcaatcttataggtgtcacttccatgtccttagttcaacttaaaagattaaaagaagaaaagtaattttaggttgttatgatatctggtgactgcatgttctaacagttagcgtgcgtgtgtgtgtgtaattttgtaaaatcgactgcatactcataactgttgttctgcttcataatctctctatctcaatctgtttctgaatctgttatctttcgagtccttatataggtgacgtagctgcgttgggatggtgggacttatttataaacttcgggtaaactactttttctctttaagatcttctgcctcttaaaaatgtcttctgtgccaggtttgaacaatcttctttctcctcaattcacagaatagcagagtgctttgcgtttcttgtctgtacaaagtggagcaatcagtcaattcataggtattcacatataccggaacctagctcatcttcaatg

SEQ ID NO: 15022 - DNA, 3000 bp, Unknown
  misc_feature (1)..( 3000): cDNA_ID_2183105_gDNA_ID_2684254_Annot_ID_138075 3000 nt of promoter + ATG
aggtcggtcaaactttaaaccctataatctactcaaaaactataaacattataattaaaattatttgacaagcttttctctacacatcttcttttgtattgtcaaggaattcgtacgttacaatataaaaatcgcagcttctttcttacaaaagagttcaaattatatctgaaattattgtgaaccgtgtttttgccattgctggttttggtcatgacattctaatagagtcagatagagaaagtagcatccatcaaaattttcaaatacagtatatatatatatatatacacacacatttttctcataaataaaaacctaaaaatatacacataaatacgcacacgtgcatgtatatttgagtgtatacatgtcaatttccaatgtcgtatattagacttccatctaaataaactactaataaaaatttggtaaagaggaatatttaaggtaaaaacaagaattattaaaaacacaaaattaacttagagcttttataatgaaatgaaagtgctaggaaagcaaaagggctttttgattgcaagcttgagactaaggtcatgatgatacggccagcctttcttgagtctttggtcggtccgacaatctgtgtgttttgtgttcactctctgtttttctttcatttttttcttatagtttatttacttatatttcggttatagtgtttctcaagctctagctcatatatcctataactataaggggatgtgatttaaagcaaattttggaccaatcactatgaaataaaatattactaattttgatattttatttccctgatagctacactccttagttgagctttccgtaagttgaaagcaaagacgacttgcagagcaactttccaagttgcaaaccacacatccatctatagagacatatcatataaacaaatttatttaggaaaaatcctagaaattgtcaaggtttactcattagatgatactctaaattacacccataatatattggcttgctaagttgcaaactatccatacatttatccatatacatcgtaagaataatttatataggaagacctagaagttgtaaaatgtgtatgaataaattccaaatgaagacctagagcttgtaaaatataaattttaaatctagatatatatatatatataaaatccataatataaaccttttgtaaattatgttataagttataacaattgtaactttaagacgagtttactattagcacttgacactagtattttgcaagcatttaattttatgttaaattttgtttatttataggtgacaatatgggtaatccagtccaatttgatccataatgtttatggggtgaatgttaactaggtgaacgaagaacgtaagccatttagtaaataggttgaccatataaaatgttctagtttctggtatgaggggaggtaaatgcctattaatctatctaatttgatgggtcgaaaatcaaaatgataaaatagttctacccataaaatatttttgtaataatttatcacatattttcataattaatagttattacaatcggtatcatatgtgatacgttcattgtcttcacatcatcatcgcattatcatttttatcatcatcataacataacgatcatcatttcataccatctccattatcatcataattttgaaatcacctttatggcacaaaattttggaatcgtgcttttgcaaaacaaaacaaaaatatagttttctctgcaaaaatcatgtttttacgaaacattgaatatagcggaaaattgtggatttgtgtttttagcaataattattatgaaatacttttagctggaagttgcgaaattacataattcacgattcattgaaattcagtttttgaccaaaaaaaacaaattgtgaaattatatgatcatgatgatgataatggggtatgatggtgatgatatgataatattatgatatcatgaatataataagaaacgaatatcatttacttttttttttagtttttaacaaaatgtgggtaaatattggtgaatcataaatcttttacaatctaactcatttagcccattaattccttatggtcagaactcatttgccttatcaatataatagggtcataatatttagttatgaggatttgaattcggatgatgacataaggaaacattagtatcaattattagattacatgaatttggttaatatttgttaattagtatcatggttttatatcaacgagaaaacaattgaccaaaaaaaaaagataaccaaatcactatcctacacaatgttatgtgctctcccataactagttagtggtctaatagaagacaaataatcaattttttgttgatacctacaaatttgtaacgtatattatgtggtctctaatacctagtttagtgctatagcgtagattttatttatataaatcaattaaatctgtatagtgccgactcatatattttcgatgctctgaaacaaatttaaaagatatgtattatgtgtcattttgtatatataaattctttttgtgtctttttatatatacaaattatttttctgtgtatggatatttggcgatcgcattgcttgtccatatacttattagaaatagaaatagaaatagaccgtgaagtactaaatgcgtaaattaaaagatagataatctaaagaatcttaaacccattacctttttttttttacctttttaataattccaccacaacacaaaacacaagttgcaaactccacatatcctgcaaaccattggtaacaaacaaacgcatgagtttcctatatatgtctgcgtctacaacatttgaaagcaaacttttgtctctttttaactctcttaactttcgtttcttctcctaccttcttttaccaacctttcctttctcttacacacatatatatatacatatatagagagagagaagaggacaaagagttgaaagatgaagactctcatgtcttcatagaaacaagtgatatg

SEQ ID NO: 15023 - DNA, 3000 bp, Unknown
  misc_feature (1)..( 3000): cDNA_ID_2731454_gDNA_ID_2684254_Annot_ID_138077 3000 nt of promoter + ATG
cgtgaattactatttaaacataaaaattcaatgcaaatttaaatttcctttaaaagaatcaaaactagttcttaatgatttttttctaatactatacgaaatggtacttaacacatagataaataaatgaattcactaatagagtaatattgtacatccatattttattattattaataaatctgttttcagaattgcaaaatttctttctaataaaaaagataaacgcaaatatacacatcggtctaaaatcgaaatctctatgctagagaggagaactaattaatataaacatgtttaggtactaggttcaaaaatattatgaacctatttaagacttgcaagctcttggtaaaaagtaaaaacaaataatataccgatcataaaactgcaatctacgacagttttgactaccgccaaagctaacaaaatatcagccagtaggcaaaattttgacgcaaaaataagctggacagttttgtaaaatggtgtacatatgtcatatgataaagcatcttgcgttgaaaagacaaaatccaactctctcgcatctcttgagctttacattttgtcaactatatcatatataaatatagatgagtcctttcatactctcttctaaaccgtccaacaaaacctttttagtcttttttccaaaaacatacaaaacataaaaaaaaaacaagaatttagttttgtggcctattgattagcacacccatatgcttagaatttcttcatcatcttccatggccttgaaattttctcaaattctcttcatagttttatggctatctctcttctttctcctcctccaccacttgtactccctcaacttccgtcgtctctactctctaaacgcggtggagccatcattgttgaagcaacactaccgtagctatagattagtgagcagaaaagttctctccgacagattcgacttcacacctttccatagccgagataacagccgacataaccatcgttccggcgagcaatacgacggtgatgagatagaccctcgttacggagtggagaaacgccgtgttccctccggacccaatccgttgcaccattgatgattacacgtgtatggtatgtgttgtaacattaaagacaaagatcagatcctttgcctagctagcttttttttataaggaagaaaattaaacgttagagcttttttttgaaggtacatttctacaatttgggtgttcatacattttattttatttttcttattattttgacgattgtattcgtgaatatgttgatatatactagagatattgacatcttgattattgttttctactgtatgtagtaatgttggctgctacgtatattgattactagtaggagtattagtttaatagtataaataaaaaaagattggtcgttgattacaatgatgaatgtttaaataattgctttgactttgggattagccaaccagtagctgcgacggcacgtcacaactcagagatattctagatgcattattgtaccaaaactaaataacaataaatggtaatgaacaataataatttttgtttcatgtgacgaaaattaggactacaagtatatatttaattcccttttataatacgcaaacaatttccatcgatcgtcaattctcattttaacaaaatgtaattgcagcaagagtattgatttcttttaaataaaccagatcagagaaactcagccgttttttttcttacaaaaatatatagaaattgtaaatttgtaaagctatatcgtaaagaaaattggtttaaaacgttaaagacatttatttggtacgtctaaacatgacttgagacgcgtctaacgttctgtcttttcgatatgaataaggaaattgtcattttgcaaaagcttcactttctctcattctcaagatgtgccgactttttactatttgatttctacaccaactaaatattattataaatttccttttgataatgacatttcacataatgcaaaaagggactaagaatccaaaggaaatggtaaacggcctgattaacaattttgagtaaattaagtgcgtcttgtatcagtaaagataggatgaatttatgaaaattctaaggatttggagaagagtttctattgtttacgttccattggtaatgctaaaataaatatttttttatcaactcataaagtatactttgtgttacacaaataagtttatgcaataatgtaaaaatgagctgactcatatacgttcatgtttcagtcaattcaaggataaaactatctatgtttgttgaaactacgatttactaaatgaaaaataaattcatattatttgaacaaaaaaaaaaaaaaacccaaaagattctgttcatctaatagcctaaaagatttatcgtatttttttccataaaaagttattagatagataaataaaaaaagtcgcccttacacaatagtgtagagactcctgtagtggttgggtgtccatcatttttcaatggacccctttcagatacattaggttctgtgtggcattgtatttataaatttgtacaatgttttgaagaaaaagcaattcgaattagaacaatcaattactttacagaaacatactgtaatcaattatttcaaaaataaagtttattttaagcattatgcatagatggagttatctcgttgtgaataatacaataaaagaagcccaaaatggaccaataattaaagtggataatataagaagcccaataggcccaataatattttccaggagctaacgtcgtttgcaacttgcaagtagcaccgaagagttttgggggttggagagtgacgattacagagtagttttgtagcggaggagagaattgttcacgacggcgcgtgtcacaaacccacgaagaaagctttcaaatttgagcaatttgatttcacgagtcgaaagttgtgaaaatggtgttggtttctcgtcccctcttcatttgatgcatctgggtctctagggttcgaacggaa

SEQ ID NO: 15024 - DNA, 3000 bp, Unknown
  misc_feature (1)..( 3000): cDNA_ID_3609868_gDNA_ID_2684254_Annot_ID_138079 3000 nt of promoter + ATG
taaggggaaaaaacatcaactttattcagaacaaaaaatttttatgtaaatgaacaagtaaagatttaatagaaattgaagcatatatttacccttttcaagaattttatcagctaatcttgaaaacctatcactgcatcgatccgtagataattcaaatcttaagctatcaacctctcttatgtacaaatcaatagccatccatctagacaagagagatacttctttcgtgacctggacaaatgatatcacaacattcaagtgtgtgttatatatcaagagaatatgtgacaatcaaattttctgattgcagttttaaaagatcttcttcatcaaaaagtaaatgttaagaatctcatattacaagtgagatgtgacctagagtaatataataacgaccatggactaattttcattaccggttggttttgagttcaaatcgtaaaatatcaaaagactaacctttgccgtgacatttggatttccatctctatcacctcccatccaagaaccaaatttcataggagtgcatgttagtggaagtggcttccctgtaaactaaccaagaaaatacaaaatatcaatattatcttaagataaagtataacgattattcatatattctagatacctaaaggtaaaataataccttcttcaaggaattgctgacacgacgcaggtattgtggtactgctttccaaagggattgctccactatgtttagacctaaatgaatgaaaaagaaagagaaatagttttttagagtgaaacttttctgtactttacaattatatttaaaataccagctctagcttcatcaactggagtaggtttctgacgtctaagctcatcagtttgccacagtgaagtaatctctctaacctttaagtataagtaactcttagtttataagttactctgctgataaaatttatatggaagatattgagatggagtgtaccaaatcttcaatgagcgtttcgcgatcttcaacgcttagatctgatctagtgttatattctagaagatgctgcaagaaccatatacttttaactctctcaagtaaaattaagagatataatccatatatgttaacatcattagaactaacttacagcaattctaatatgcttgtactgcaaggttcttcgatttatttgggtaggatgagcagtaagaacaatttcgacctcctaaagcgcgataaacaaacaaatatcaaatagagaaaacaacactcagatacgacctttgtgttagataaaacgaattgaaatgtttctaaaatgatacaatatgaagtagctagacctgtttgcaaacagttttataaagttcgtctggagagattccactttgcaatagctggctgaatatatcatcacaagatcttgcaagttgtgtaacgttatggactttgtgcattctggaataaaaatgtttattattagaatccacaatgtttaagtttagaattatctattcatgtttattacttgtaatatttttgttgtaatgtgattacaaaaatcatgacctgtgatgagtgtctgcaatgcccattaagttaagagaatgagtgaatgtacgagccaacgttaaggcttcttctagtggcattttggatatttcactagtcaattgcttctccaaaaggtttgcggtatcctcaataccagccatacgcaaatttaacgcactctgaaacatttaaaaaccacacaaaaataagtcgtatcattcatatttgtttcgataagttgattgatctatatgactatatctcttattactacgatgtgagattcttatcaaatgatctaagcatatggaagcgaatagacagaagatgaaacctgagcaagaatccgaatgcgttcgactttttccatgaatgggttgccaacttccctttgtaacacatcatggaagagactaccgagcaatttgcagtcatcttcgaagctttggaatgagatttcctctgcgatatcgtctgttgtgtccgtcattgtatcaatgaacaaggtgaaggaatgaataattgcagtgatcaaagttaaatattttgaagagtgattatatatggtttgttagctatggtgcttaattactaattatggtggtcaacgcagtaaattatggcgtagttaaatttgtggtgctagtcatctttccccaaaaaaatatattcttatttcttaagctaattttcttcctttccaaactaaacaacaaaacaaacagttgatatattataattaagaagaaaagagaaggaaattctacgatttttttttttctttttttgggtaaaaattctacgaaaggagtaactggttttaactaactctgttttatctttggacctacaatttattttgtgcctctttggtgattgttattttaacatacattcttatgatcggaaaaaaaaactaaagtacagtaaatgacatataatttggctaagtcttactatctaacaaatgactactccttctattttttaagaaaacataataaatgttgattataaatacattattttttatgttttacagttttctataactcaaaaaacaatgataattaattttttttttttaattacaattcatcaatactaaccaataaatattgcataaaaaacttaaaaaaatcaatattttagaaataaattttttctaaaaaaataatcatttataaacagaaaagtatatgtatatgttattttttacataatcgttctcgttatggcaacatcataaagaacatatattatataatatcatctaaattttttaataaataaaatgaaaacaagtgcaatggaaaaagaaacagcgataattgtgtacagccaatcacaccgacacggcgacacatttgccaacacgtatataaacgcataaccgatacgacatcgttttaaactcaaattaagtcaacaaaactaaaacacgacaagaaagggtttcactgtgttcgataataatg

SEQ ID NO: 15025 - DNA, 3000 bp, Unknown
  misc_feature (1)..( 3000): cDNA_ID_2035675_gDNA_ID_2684254_Annot_ID_193069 3000 nt of promoter + ATG
gaggtaatcaattttttacttaaatcgctttttttttcttactttcggtgtatctactacgtgtgttgtttgctggttatggaaatgaatgttgtacgtcacgttatactatagatatatgtgtgtttgtgtgtatgtataacggaagtatttgtatccgttgtggtcttggacttttggtttggttctaagatacttatttttaaaaacttgtatcgttgagttggttttctagatatgcttaatgggagtatgtgacgaaaaaaaagtatgatttctgtaaggcaatgcatgggtttggaaaattcgttttctcttgtcatgtgggaggatttgaatttaattttggcttatttttgcaattgtgtgaatgagaccaaaaagagacaatgaagaagaacaggaaacgtaccaaagatgatgtgtatcattaattgatttagtcgggttctgtccgggggaaaaacaaaaagagacaaatttgggattctgagcttcgtacgttgatgcttctctgactcttttgccttgtgtatttatgtgttctgtagaatctttttcgtgtaacgatttacatatattcaaatattttgctttatataaatttgcatcatggactggtatgaggtaaacatcgggaccaagactaagatataaaggacgtagccaattagttttttaggttggtccatgaaatttaacatggtattctaaccagagttttattttgtaagtgtgttatgttttatgtgttgcacatgagcacgtccttgatcgaagtatttaaaatttgttattaaagaaatgtgtaaatttatagggatgataagtgattgtgattgagattggtcatgacgaggaacatacgtaattgacgtcgtatttgtgttaagcttgcatcatgaagtgaagtacgtcgacgttattaataattatgatcatttagtactacttacgtactattgtaccctaactgccatttcatttgtcttttaacatttttacctaagtgacggtcatgtgaattgtctagtagactagtactgactcctcttttggctttctctatagacaaccttgaatttaattttaatttatgttaattacgtcttcattatcaaaccaaaaacttagaagatttctaagttttgtggagacttgcaattagggctcagctggtcatgttgttagagcgacataaaatgagatgaattttattagtttgttggattctacaaagatattggactacctaccatttgcattgaaaagaatatcccaaaagagacttttggttttactttagggatctctttttattttattttatttttttataaagaagagagtattgggaaatctttaaaggcccaaaccaaagctcagccatatttctacagttaagcccagccatttttttaccaaagaatgctaatatcatttttcagcaagattttattgaatcattcaactctctaattattgattagtcgcggtattaaaattgtgcttccccttttggaaaaaaatagagtaactgttcaaatccttatcatcctgattcaggatattaaaccttaaatattgtttgtcaaactcaacttctatcaatcattttttatattgttttaatgttaaacaactgtccatctatcttatcaacaagaagaagaatttctagccagacttataaacttgcacgacaagacattcatccttttttaattaatgaacaagagtaacgacttttacacttctcttgtcacaaaattattgaacagtatttacaagtattttataaaaattgctattggttgatatttttattggtgcatgtcaagatatttctggcaacaatcattagaacgcgaccataacatgtgctgcaatttgacaattctttatatctaaaaaatgacaatttgacctcgttggaatcttggatttgtttctcccaagcacaatatgttcgagctatcgtaccatttctgaaagtgtaattataaagactgcaatcatatatgggctcgtggagctaaatcatggcctaaagtttttttttaatcaaatggattttgaacttgtggtaaagttttcggatctacgaaaaattatgcattcttaatcaaacctctaattcgataagacaattgttttccaacaaagaatgtgtcaaaactcaaaaactcttaacaattgttttgaatgttttccaataataccacatcggtttatgtatcaattaatattccaaaagttgatactcccaacgatattcctatgacctagaatttgatccatatctcaaaattttacgaccgacaaatatattaatgttcttttattttattttatatagattaatggtttagtcatctacatgtattcattaatacacctatatactgtaatattttcacgaaacttttaaacatttacaaaaaatgaagagattaactttgaaacggaagagtgttaattacttaattatgtatgttttgtttgtttgtcaacgaagagtattatttttttatatactaatatgaagacaaaacatataattccatgtcacctcgtaatctcgtatgttgtaaaaaaaatatctctatccaatagtatttcactacctagtttaaatcgcattctctataatacgttaccatattccccaaattacccttagctatgaccatagtcgctggctcgctgcaaaaagtgaaaggggtatataggtaaaaaaggataaattaacagagagaggaagggctttggcgtggaagctcagcttttctccgagtcgggaaaatgtctttttctcgaaagaataaatctttttctcttctctctgtgttaccctcttgaaattttccgcgaaaaatctcaacttttccatctgaaaaccccccaaaatcaaacaattggatcttgatttttagctgtgatttagtgattaagaggcttagggtttgtggcgaaatgttggtacagagaagagtaatg

SEQ ID NO: 15026 - DNA, 3000 bp, Unknown
  misc_feature (1)..( 3000): cDNA_ID_1989410_gDNA_ID_2684254_Annot_ID_193084 3000 nt of promoter + ATG
aaatgtgatttgagaaactaattaacgttttagatttagacttctctgtctttgacattttctttgcagcgttgatattttcttcttactaaaataagaatagtttattagttttagtagatttacctaagattataggttgtaatcgttaactaatattttcatataaagctataacaaaagaataattcattgcttattactgaagttctttagtttatagaccaataattgtactacttttgtaacctttaaattgtcaaatcctattttaccatacaaattttagtggaagattgtcttcataaatatgaaatatcatatcaatgatctttactcttttacacatcccattccaatactcttaaggacaccgttttggttaggacaacatctttgctctttttctttttcgttcttcttccttttttatgcaattatatatatttactcctgtttcattttctttttgctattctcttcccgtttttttttgttggtgtacattttgacttgattttcaatgaatccaaatgatcaaatgcttattttgttatcgtaaatttcaacgtaataccaaggatatctttaaacctaatttgtataactagaattatctttctataataagtggaaacactaacccaaaacccaaattttgtggtcggaccaaattaagaaattaccttataatatagtatagtttattcttcagcccctagctatatcttccaatcttattttttctcgcatacccaataatacatctatgtaagacatgaaataatacaaaaaacgatttactgtactacactcaattaatccattttatgatttaacattttctttctaaaactgttagtcgatctgagaaaaaaaagttgctatcttatgttacacaccattgaagagctttaattcttttagaatatatatagaaagatttgaacagagcgtctgttcaataaattgcaaatctcgaattgatgatgttcacatatcacatgtggcacagttataaaaaaaaacgaatcaaatgtctttggagaaaagagaacatgttagcaacttaggataataagtcacggacatctccacaagtaaatccatttttctccttggaataaatagaatccttatcgttaatgcactatggttttgtcctagatacaacaaagtataaaagactggtcctgattgttcataatttcatttgctgtttgtgttaaatgtgttatgcgtatcttttcaaatttaaaccataaccataaaaatttcagaaaaaccctattgcctattgtaaattgcacaccagggaaaacggaagaagaatatttcatttgcataaatcaatgttgtttttatatatatatatatatattttaaaaaaatgttgtttatattttttagaaaatagttattaaaattaaagatgttcagcatttaaaaattaattttagaatatatattttccacatataaacgcaaacacataattttaaataattgagaccctgccatctacaaccaaatcccatttttgataatatctacaagactacaactttaagatcctccacaaccaaatttgaaacaatttgataaaatcccattttttatcatgagaaatttgtagcatgttctaatgagtgttacctatatgttaggttaaactaccaaatattgatggtggtctaaatttgttcaacactagaatgaagatccatgttatctcgcctatatagaaatatgtatatgtagtcgtctgaaatatttaaaaatttcacattattatattttggtttctatttttgatttcttaaaaacttaattttttgtgtgttaattccatccaatatacaaaagaaaaactaagttgcagatgaaagaaaatgaatcaacacaagcgtagacaatggaccacacatacacacgcacaaaggcaaataaagacaaggtaaaagaagaaagaaaaagagagcaagtaagaccaaaaatggaaaaagaaaacaaaaaagaaagagataagaaaaactttgccctttggcatagaaatggagagggcaaagagaggagcccaataggctagtgtccaacacatgccattacctacaaaaccttacctgtcccttataattagctatcttctacctctaaccaactttttaagtactattatccatacatacgtacattagtacatgcacataagtcacgtaacaacactattaatatacataaacgacgtcactatgttattatattatgtcttaatggaattatcaaacatcattagtttagtcacaatattataacagctattggctcaataaactgcgttaatggatacaaatacaatcaatcattcaagatattttacgtaccagttatcgtttactttttttgatattttttttaatcatttttttttctttttaaaatagtaaattcatatcgtttaattaatatcgttttttaaccgttttaaaatagtaatttagtgagaaatgagattataggtttggaacagagaaaattcatattttattttaaagatctacaaaaattttattcgattttacggtttttgtaggtcttcgattttggaaaacagaaaatttgtttcttgtaaatttggttatagaattattcaaaggaaaaaaaaattgtataaccaaatttacaagaaacaaattttctgttttccaaacatagctaaacgagtttatctgaagaagcccaacatcttatacaggcccaatcttaatctcgaactcggtcaaatcaattttaccaactcaatcaaaccggaccggtttattttacgactcgctcttgtcttgtcttcttcctctgcaaatccaacacacaatttcatattcatctccaatgttaaatctcatcgaagatcacaataatggttcccttcgtttcaaaatgaaatttcaatagattcttctatgtttgaaacaaggtacctcttctaattcaacaaaaatg

SEQ ID NO: 15027 - DNA, 3000 bp, Unknown; identical to SEQ ID NO: 15024
  misc_feature (1)..( 3000): cDNA_ID_3609868_gDNA_ID_2684254_Annot_ID_193078 3000 nt of promoter + ATG

SEQ ID NO: 15028 - DNA, 3000 bp, Unknown
  misc_feature (1)..( 3000): cDNA_ID_3042149_gDNA_ID_2684254_Annot_ID_193059 3000 nt of promoter + ATG
tggataaaattgagtcagtttatgggaatgtgataaatgatttgactattgttttagaaattttacaatagtcgttgattgagccgaatctaaatatcgttagtagataaagacttgtcagattatatatgaacactttcttttggaaatatttggtttatagacccgtaacaagttcagacagggatcaagaacatttcgaaagagacaaagatgatgcatacatcgatatggacctgtttatttattagaacatgaaaatatatagtttttatttttttgtaaccaaaaagttttggaccataggtccgaaattcaaaacagagcaaagtcccctgaacacccccaatgacaaaattcgaacctgagatctaaagaacactctctttaggttatatttttggtaaaatatatttgattatattgttatagattcatttgagatgtttgtataccttggtcctcttctttaaataaacaacaaaaaaccaacaagcttacgagacgattagaaggtccagatctgatcggcctctacgctaagaaacctattaagcccgatctcaccaatcatcttcctcgacttggagttttcctctcgaagtttcatgttctcttctataaccttctcgtaacattccctggcttggcttagctcatcgactagagatttgttcttattgatgagttgaacaagcatggaccacagttcttccatgtgacgctgtttccgcatacgcgatctccgagctgactcgcggttcgataccttccttctccgcttcctctcattatcttctgcagtccggctagagtcgtctgacgtggcaggcaagtttgaaagtggtactcgatcaacaaagatttggaataaagactgtggattagggttttgacttggaaggttatagacagaaccagccatgaaaaaaacagttatgcgttctttaagaaaatttttgttgacaagtatgatggtatagatcaatgaaatgcactctaattttggtttttatagatgaataaatcgaaagtagtgttaccttacactaataactaatccaagtggctgaagcatacgtaaattttaataaaatagaaggagaagaaaaagagaagttctaatcgtgagattgatgagtcatgaagcacttgaaaggtgaaagtaagtagatggcatgaaggggaccattgcggagaaaatcaaagactatattataaattattcaaagaaagcgtgagaggtagcgactcgtcgacgcaccatgtttcttttcgagcaaccatatctaatttttttaagagcgtactttattttttttatatacgtaattattcgataatccaatggtttatgaaatttgtgggtaatgatgtagcataaagtgactttagtccttgtacataatttatagtgttaaagagttgacaatgaagaaattttaccaaaaactactatagttcctgaagcctaattgcgagagttgtggtcggatagctaaaatgtgcttttagaaattttgcattaggtaacatgtttttaccaagtcaaataaagtctagtgaatgaaaataatatcttatagctgggatgaaatatattggcaattttttttttggataaatactctaaatatattggtatttaccttcaccatttagagtgaatgtcacttggggttggggtatcagattggttaaatttgctttattaggcggtaatttttagtagcagttataaataatattttatctaaagtaaggattagaatattgatgttttctgctagtaaagaagtttcctagatccacttaaagccaatcatcttagtggcgtgatggtatcaaacatatatagatgaatgtttgaaaaactcgagagtgcgagacgcatcaaattgcaaacgagtctgttcatattataatgacatgttgaattatcttaataagacaattttagccatctagatgttaatcggctaactattttgctatagaataaggattcatccaataacatcaaaatatagccctgttattcataatttatgtaagaagagaaaatacttttctatgacaattaagcgaattaatccattagctgctccaaggggtaactaatgaaagtcaattaaagcttcaagtgacgtatcacatactcacaatgaaacacttattttgctgatgttatggaccattatggttttattgattagaaagcaaatattataatgtgaaactctagtggtagagatttcttgcttgtcttttactagtttccagctactcttgttttgtccgttttggctattccacgatctacaactttcgggttcatatcaatgtccaagaggatattactagcaattcctcctatgatgtgaaatcgtctagtgccaaaaatatatcagttttaaaagcattggtttaacttaccaagcataaagtaatgaagacattacttttttttggcacaaactcatagaaaagtattatctatgattcttcaaaataaaacccaagtagttttatgagaatttatattttgaagctttgtcatacaacaacttgttgtgataaacaaccaactagattttaatccgcggtacaccgcatgacaatttattttaaaaattagtttatataaaaatttgtaaattatatttatttataaaatttatattttatagtttatatttattattaagtgaaaatataccataaatttatgagataaatattaataaattaaagatttaacccatatgttaatatttattttgaaattatataaatacaaaaataaccgaacggttattgctttagaccgatttcgtaaacaattccacaaacgaaaaacaaattcgtaataaaggcgttgtgggttttggttaacacccggtttgtaacggtctttgcgccttatccaaaaaaacctcctaaaaccttctcaccagccattgattcacaatctcaaaattcatcacagcgaagaagatg

SEQ ID NO: 15029 - DNA, 3000 bp, Unknown; identical to SEQ ID NO: 8365
  misc_feature (1)..( 3000): cDNA_ID_1989412_gDNA_ID_2684254_Annot_ID_138082 3000 nt of promoter + ATG

SEQ ID NO: 15030 - DNA, 3000 bp, Unknown; identical to SEQ ID NO: 15026
  misc_feature (1)..( 3000): cDNA_ID_1989410_gDNA_ID_2684254_Annot_ID_138084 3000 nt of promoter + ATG

SEQ ID NO: 15031 - DNA, 3000 bp, Unknown
  misc_feature (1)..( 3000): cDNA_ID_2729691_gDNA_ID_2684256_Annot_ID_138085 3000 nt of promoter + ATG
ttaggctctttgcattgcagaaagaagaggcttggaccttaggtacagttagaattggaaagaaatggttaggacatggattgaagaaagtcaaagagtcagaaatcaaaggtttggcggatagtaactctaccttgagtcaaatatcttgccacagaaaggcaggcatggaaacagatcattggtataagatcttgcttagaatatggatggaggacgtgctaagaacctctgcagatagaagcgaggagtttgtcttgtccaagcatgttgtagaacctactgttcctcaagaactaagagatgcgttttacaagttccaaaacgctgctgcggcatatgtttcatcagagacggctaatctggaagcgcttttgccatgtccacaatctcatgatagacctgttttctttggtgatgttgtcgctccgactaatgctataggaaggcgtctttatcgctacggattaataacagccaagggttatgctcgttcaaattctatgcttattttgctagatactgcccaaataattgattggtattcaggacttgttcggcgatgggtgatttggtatgaaggctgtagtaattttgatgagataaaggctcttattgataatcagatcagaatgtcatgcatccgtactttggcagcaaaatatcgaatacatgaaaatgaaatagagaaacgccttgatttggaactgagcactattccctctgctgaagatatagaacaggaaatacaacatgagaaactagattctcctgcttttgacagggatgaacatctaacatacggcctttccaatagtggtttgtgtttattgtctttagctcgattagtgagcgaatcaaggccttgcaattgcttcgtaattggttgttcgatggctgcacctgctgtttatactttacatgcaatggagagacagaagtttccaggttggaaaactggattttctgtttgtattccttctagcttaaatggaaggagaatagggctgtgtaagcaacacctcaaagatctgtatataggtcaaatatcacttcaagctgttgattttggagcctggagatgattactactctccacgacaagagtcttgcaagtgtttgattcttcctaggtcaactctgattcgttttaggcagttgttgagctttgtgtatctgatgtctagcaaatcatatgtccggtgattatcgttcttcaaatgttttaatttctagaggccttgtgcagtagcacagtttgcataccctcagaacataaaaccatggcattagctggtctaatgggaaaagtctaggtgaaatggtctcattgacattcacaatataacttccttcacttttgactgtatcttccaatgcttagcttcttgaatttttctgatttttttctcacaattgatttgcggtgctgcaggttttgaacttgacaaaatggaattagcggatcgagcagtcgggcttctactatcttcaatcagcttgtccatattcacgtactatactttttgggtcatcatcctggtaagtgacaacatctcccccaagttccttaaaaagacattgtcagtttgatgtaccaatgtcatctaatgtttaggatattactaggaaaaagctgacataatagaattttcgttttgtacagccatttgtagatagtgatcacttcatccacaagtacttcttaccccaagactatgccattctcgtacctgtctttgccggcatagctcttctctctctcatttccgtattcatcggcatggtcatgctcaaatccaaaaagaagaaggcttaatttcattcaactcttgccgtaagacaaagttctgtccttgtttcttaagttgtccctacattgttttggtctttcagaggtttagtccggaaactttaaatgggtgtcgttgaaccgtacgagactatatcttattgactctaaatacatacacatgttaagctcaaataaattcttgagagaatatatactaatgatgatggattttaggctccctgacaattcaactaaaaaactatttacagaatatacgaatgatttagatgaatgatgcatttcacgaatatatatatttgtttcttattttgtcttttgtgtattctccatatggcagttactgatctattttcttttctggtttcgtcttttttagagagaaaaataaataaaattgactgataggaattcagtttgttagcaatataagcaccttaaatcataattagtgcttttgaaagttgagaaacagatatattatgaaaaatatcagtagtagtagtcatcataggctaagagctggcaaagcattagagacacaagtgagttttctctttgcaattattctatgtctgtaatgaattttggttttgacttatcttatgaaatttaatcatagttttagctttttctaatctcattagcactacttagtgcttatggataaatcatttcaagtcatcttcgtacaattaataaaatcaatagcccattcacttgtactgtactagagaccaaaacttaatacatacaaccaaaaatcaatttccttttttattttattttccaacacgctttgaattctgttctaccacatttgtatagtcaattctttatttcaacaaaaaagctgtcattaactatttgctaaaataggtttcaaaattttggaaggtgtagattcgtttttttggaccagactaataaatgcatgttttctttttgaagtaatgtaccgtcttcttctgataaaaaagtgaagagcctaaaacattctcttctgaaccttcattataaaaatatatacgaaacctctcaagttttcaggagattcactttggttccggatccgaattacggcgacggatcttatcgtgacggcgccggaatatacggatacgaaatcagctagtcacttgtggtggttgtgaagttacgaactaatcggaattctgttaaaaatg

SEQ ID NO: 15032 - DNA, 3000 bp, Unknown
  misc_feature (1)..( 3000): cDNA_ID_2994977_gDNA_ID_2684256_Annot_ID_138093 3000 nt of promoter + ATG
tatcttgcgtcatctgcattcacttggagtgatcaacaaatttgattcctttcttctacattttcacaccaaatcgcttaaatctaaccacactttgaagcaatatcttgaatctggggaaccaatcaaagctcttttagatttccggcaccgattcagacaaagtcctagttttgttgacagtttttctgttttgtttgccattaaagtttcgtcagctcagaaagcttcctcacttgatggtagacagatccacgctcttgtaagaaaactaggtttcaatgccgttattcaaattcaaacatctttagtgggattctactcttccgtgggtgatgtcgattatgcacgccaagtgttcgacgaaacgcctgagaaacagaacattgtcttgtggacagcgatgatttcagcttacactgagaatgagaactctgtggaagctattgagctgtttaaacgaatggaagcggaaaagatcgaacttgatggagtgattgtgactgtggctttatcagcttgtgctgatctcggggcggtgcagatgggagaagagatttattcgcgtagtatcaagagaaaacgaagattggctatggatttaactctgagaaattcacttcttaacatgtacgtgaaatctggggaaactgagaaagctaggaaactctttgatgaaagtatgagaaaagatgtgactacttacacatctatgatcttcgggtatgctttaaacggtcaagctcaagaatctttagaactcttcaagaaaatgaagacgattgatcagagccaagatactgtcattactccaaatgatgtgactttcatcggcgtcttgatggcttgtagtcacagtggcttagtagaagaaggaaaacgacatttcaagagcatgattatggattacaatctgaaacctagagaagctcatttcggatgtatggtggatttgttttgtcggtcaggtcatttgaaagatgctcacgagttcatcaatcagatgccgataaagccaaacacagtgatatggagaacactgctaggcgcttgcagtcttcacgggaatgttgagctcggagaagaagttcagagacggatctttgagttagatcgtgatcatgtcggagattatgttgcgttgtcaaatatctacgcttcaaaaggaatgtgggatgagaaatcaaagatgagggatcgtgtgaggaagagaagaatgcctggtaaaagctggattgaactcggaagcattatcaatgagtttgtctcaggacctgataataacgatgagcagctgatgatgggagagattagtgaggttttgagatgtttagtttcttgtatgacaagttttgattgtgtaatagggaaaaaaatgtagaccaaaagagtctagtggaagttaatcaaagcccacttgtaggagcctgtggcccaacaaattaaatcaaaattgataacttaaataattttaagttttcacttttatcaaaaaggggcctgggaaaaaaacaaatatcaaagaaagcccaaaaaagacggagaaatcagatttttttgaatttaagaaattaaaaaaaaaaaaggagagctccgtcttcgttgctttttcgagcggtgcctagtctcaacttccatggctgacatcttaccttcaaattttctcaaaccaaccaaaaagcttcttctccttttctaaaatttcatcaaaccctatagggttttctcaatacaattgattttttttttcttcttcttctctatggatacgaccctttctcccgccgtggaggcggaacaaatcgccgactcaacgatcgacactgtttctcgtttgatcgccggcgttttctccggcgcacttactggaatcttcgctatgggtattaatatgttttgccgttttgatcatcttttgtttgtgcatttgagtagaggaaagttttcccttttgtgagaattgtgacgattttgttccctctaagttgttcgtttctatccttttggtcaactcttgatctcttgcaacaaatatttcttgtgggcctgcaaattttgtgaaaaaggttacatttttctgtcttgagagatttggttgaacatcgttcagatcattagtcagattatcatacgtgttcaacatcttacagctaatgattttgaacttaattctcactttttagaccaatcctgggtttaagattaggaaagtgtgatgttgttgtctctaggttatttgaataaatcatcgtctctgcatgatccctataaaccattttgttttttaatgttattgtagctggagcttttactggagctgtaactggtgcggtggcaggaagagctgcacagtatggagttctccgtggggctgcacttggcgctgttgctggagctatcctctctgttgaagtgttggaggcttctcgtgcgtattggtatttagagctgtcaggatcaaggggtccatcatctatggttagtctttaattctaacttctgtgcaatcttacacgtttgtcaattttggagatggtttttggagtttttcgactgactttatgatcgagatggtgaaatgattctgagagaaatgtagtttggtggaagaaataatgagatagttttgacatgttactggtgggccaactaaattatgggatgacaggatggcttggtttagtcccttggtaatggtaataggaatgattttgtgttgctaatgccacgaggcagtctaacaaaggatttttagctcgacaaagtctgagtctgttttttttaattgttttttttctgtgggaaggacttgaaccaattgcacggtgtttttgcaatgctggacaagtggacagctctgtctttttttccacctactgccaaatttggtagtgatgactgtttaagtatgagtaagctgagcccttggtatttttgttttggatacaggcagattttgtagagcaactgtttcgtgggagactggtagatgaacaactt

SEQ ID NO: 15033 - DNA, 3000 bp, Unknown
  misc_feature (1)..( 3000): cDNA_ID_1989204_gDNA_ID_2684256_Annot_ID_193146 3000 nt of promoter + ATG
acgctcactcactcctcctatgcctccttagacggcgttctctataaccaactcttcctcgaaaaaggaaactatcccaaagtcttgattatctcttgctgtatgatcggggaaagaaaaatgattttcatttacaatgggttgtttccatatcagacatgattttctttcagttgaatataattttgtttagttttaccttaataaaaactacaagaaataaccaaacatcccacgaattggtttaataatttcaaacaaagaaatcaaaaacataccgaaagactctcgagacgattataccccacagaacaccaattagatgagataacctcccaaaagatgactaagccttgcggctaatgttctatgaggtgtatcattgtctcgaaactcttttcgaagggttttgatttctttgcttgaaattgttaaactaataagtgcgtggaatgtatacgtgaaggaatattaacatacttgtgagaaattatcagcatatatgtcaatataaatattatatgctatgagtctatgacaacgaatatatatatatatatatacatggttaattaatatagaagataaatcagaaaatatgataattttctactttttagggtgtttagtatgcattcccacgtgttgaatatgcatgatcaattacaaaataacacgacaagtggaacaattatgtgaatttgaatatagtcatggaagattgtcatttattattgctaatttcttttgaaacatacaataaagcaaaacacctaagttcttttgctaatatttcactttttttctttcttttttcaatataatcaatatttcacttttttttatttattaatggaagattgtcatttattttgcgatttatcatgtaagttcaacatgtgtgaatgcatactaaatcccataaatatatgttttgctatgtttatacattttaattcatggatataagaaaaatgcaatcatatttattatttctgatttgattaaacatgtgtcaatgtactttccataatatctagtggaaattggccaacaacaaaaataaatcttacttacaaaatagattcccacagatgttattttatttaaacaaaatctatgttttaatacatttttatatagatatactggatttatttatatcattttccatatttctagttagtggaatatgaaaataaccatgttatttaattattatcattaaattatttgataatatcattttaattgcttaataatttaaatatattgatttcccttaaatatatccaatcttttgtaagaaaagaaatttaccctgaagtttatcacctaaaatttagcatgcttgtcttttaagggttgtcgaaaacaagtttacatagatcttcaattattaattaaataacataaacttgtgtttgtaaactaaaatttagatctttaagtttctgttatttaattaatatttgaagatctatgtaaaaaaaaaatttccctttagattttttgaaccttgttaaatcaaatcatttataataattatttaatatttcaaaatataataaaaacttataaaaactagttttatacttattatctgtaaaagctagaggaaacgaaggaagaagagaagaatcatgctgagattgtgagtgttatatgttgatttagtattttaatcatacatataaccaaatgttgtattataatataagaaaccaaggtttgaataatattttcgtggtcatgacagccagaagtggagaatgtactcacaattcatgcacttccaaattgcctacactattttcctccttaattttgtgcatatctgtggggatgtcattcgtatccggcctaagttcggtctactctacatcctttttattttaatcgaagtgctactaaaacatctttgtccatccgacaagattctttgcagctttgtcgaatttttaagccattttagtggagctatcactatcgggctggtgagctcatgttgtaatgtcttattttattgtgttggtataccttgggttttgtttgccttcatactctttgaatgtcttgttactgaagactgaagaacctaagacgcatacaggctcttcaagagggaaattttaaaccatttgcttgtgaatcgtgttacatatcttcgtttttagcatattttataagctttatagtttgtctttcttggactaccatggctttcctagtctattatatatctatgtgttatatgaatctcatggtggattgatattattaaatgaataatgttttctgtaagctctttatttcatccaagacatttttcatatctatattgaaactgaaaggcttccaatcgctaaggttttctatgaacgagttatctcccgtttgacaatatgtttcttcttctttgaagtgtcgtttaaaagaatctacaaatcctttatcacttcattaattccaaaagtgtcactgtttttatcgatgtcaatagactgattgctttttgctttcgtattcgttttgccatgagatcaaacaattgtaatttctaactatgaacaaaaaagaaagatattttagggtgcccttcataaatttggaaatagtcttcaccaattgtcctgaacagagagaaatgggtatcaagtcaactctgaacactctatgactaaaagaaaaaatcattcacctcgataccagaaagaagaaaagtcatcgcttttgggaaatttgatgaacaaagaccaaatcttaaaactcgaattcttctggttcctaaaaagtggctgtcaagaagagtgagacatgcatcaaactctctcttctcctgccatggcgtcaaacctccggaaaccctatttcctcaggtacttaactattcttccccaatcgatgatggtcgaaagctgaaacctttttctgcaaatcgattaaccgacaagaaaatccaacccaacccacccactttgttttgtttggatgataaaa

SEQ ID NO: 15034 - DNA, 3000 bp, Unknown
  misc_feature (1)..( 3000): cDNA_ID_4254758_gDNA_ID_2684256_Annot_ID_193144 3000 nt of promoter + ATG
acgacgaccttggttttctttcttcgctatctcagtttttagtcaggatcgtactgtagagttaatttcatcattgtattataaaaattaacctaaaagacaaaagtgtaattaggtctgcttttatatatttttaaacggactaacaaatatgaaattacgaataaagagagagatagaaagatgagagactattgaaaggactctatgtttctcaccaaccgtgccctactcgtgtagtttagagtcatataaaccccttaaaaattgacttattatttgttgatttatatacatattagtcaaaatgttgtctttccaacataaattggtgatcaatatcagagtgagactagtaaattgtttataatctcatgtttgattgtagatacacagatatttatctaaactagcagcaatgaaaaatcagaagattaaacgtgaaagggcacacaatgattattaaacaattgactagaattaattaaaacactaactaatatatgggaaactaaacatcaaatctacttttttcagtgtccctctgtctgtcacttgtggaaataaaaatgaaaaatcgcaaaattaaccaaacattaaacctttttaatttgattatgttactctttgtctatgtttccatatgtccccttttcaccgtttgggtgatatggatatcttaaaaggtattgggctttactgtcctctctttcagttctttcggccttcttcctcagaattattatatcaataaaattcattggatcacacttcggcttgggcctttgttcattcatgaacatcttatcgagtggtatatttttggtaaagggtttatcaagtaagatttcttaaaactacataaatcttctatccttaaccaatagtaaacaaatattcggaaataactctaaaaatcataacgataaacaatcatatttgttggaacccatttaaatttcatgacaacaaggaataagaaaaaataattagtataagcttaaaagttatgaaatttcgccgtgaagtaaataacacaatgaacaaaactaacgtggttaaaccatctccatcaatggtttctcattgagaaactgtttaatataaaaataaaatataattaaaatgtatgagagagagtagaattagtctctcaaatgagaaactctgagaaacccataagaacacttgtatatttggtcaaatattattttattattaaaatttaattatataactaatatttattaaaatactaatatttcttttttttgagaaaccaagaaagtatctcactgatggagatgcacttagtataaaattcaacgttggaataatacaaaacgaaataaattaatacttatagatttcagcttcctttttaaaatgcttagattgataaattttctacttttttttcggtgtgccagtctttgtttcagtttcagtgaaagagaaaaaggttatctcttgagcggtgtaggaaggtgaagtaataaatgaagaggatacatcaatcgagtggacacgtacttgaagttgtctgatccacttcaactttgaattgtgagtgtcgtaacaagatgccgtatctattaaaacgttaaacacaaacaatttttaatcacaaatgctattttattggacgaccaaaataactaatgaaagaaaaaactagtatcctgttactagtttgacaaaagttattcagagatgaattgtctgcatgttggtttatactacgtcttaaaatttatataaagatattaaactttgtcatggatatagtaattgtgtatccacaaaatgcaaagatagaaaaaagtcgttatgtttgttgaaagcattagatagatatatgtctcccatgtgagtgcacatggagttatgcatgcacgaaaactgcctctacccttttgtctctctctcgattcttcaatcaattccccaccttaagtttgcatgatctctatatccacctctgagatctagacacgttgctcctcctcttcatcgaacggttctctttgatcatcttgctaagagataagaggaaaagtggcataaatccatgccgagattgctcttatcggtccctttatttgttggttggtcccaatcacttgcactggatatgtaactgtttctccatgttactccttctcttttaccaatatacccttcattttcttcaatttgggtgtagtcccaaatgtgactcttttggcctaattgtatcaacttgtttactttttcttatatatgttcatcaatgttacgacgaatgtaaaaaaaaaaatattatttggaatttgataccgaatctcgacactattagtatattattggacccgtcatatgtatttatcaccagagagatgtgagttttacgatacatagtttttttctttcatctgaaaagaaaattaaacacatgtaaaataatttctgcctgtagtcttttaatcactgaagtaactcgaatttgatgttagataattttttcacaaaaatattcaaattcaacagattaagttgttgatgacagatagctctctgggaggaaaaaaagaagaaaagataatggtccgtattaatatagttgaaaacttgaaactactttttagtttgtatataatacagtagactagggatccagttgagtttctttctttattttgagtttgtgtttatgtttgattttacgtttttatatgtaaataagatattttacgaattatggttttatttgggtagaagttgtagaatgacttaaacaatcaagtggcagaatgagatatataaagtaatataatatatgtaccgttattaacttattgtacatgtgaatgaggaagcttacacacacacaccttctataaatagctgacaaaactggttgttacacacaacacattcataaatctctcaaagtaagaactaagagctttactacagtcctactctctacacatcttctctctctctcaagagctagtc

SEQ ID NO: 15035 - DNA, 3000 bp, Unknown
  misc_feature (1)..( 3000): cDNA_ID_4266672_gDNA_ID_2684256_Annot_ID_193136 3000 nt of promoter + ATG
aggctttgtaatctcagaacaacaaaaattctacaagcccatttgcttagacgatatcttctgccatttgatgttttccttactaaatcattgcttagctggtactcaaactcgggttccatggctgatgcagctaagttgttcgatacaattcctcaaccagatgttgtttcttgtaacattatgatctctggttataaacaacatcggttgtttgaagaatcgttgagatttttttctaagatgcatttcttgggttttgaggctaatgagataagttatgggtctgtgatttcggcttgtagtgctttacaagctcctctgtttagtgagctggtgtgttgtcatactataaagatgggttatttcttctatgaagttgttgaatcggctttgatagacgtattctctaagaatctaagatttgaggatgcttataaagtgttccgtgactctttatctgctaatgtgtattgttggaacactatcatagcaggggcacttagaaaccaaaattatggtgctgtttttgatcttttccatgaaatgtgtgttgggtttcagaaacctgatagttatacatattccagtgttttggctgcttgtgcttcccttgagaagcttaggtttggaaaagtggttcaagctcgggtgatcaaatgcggagcagaagatgtatttgtttgtactgcaattgttgacttatacgccaaatgtgggcatatggctgaagctatggaagtattctcccgtatccctaaccctagtgttgtatcttggacagtaatgctgtctggttacacaaagagtaatgatgctttctctgctcttgaaattttcaaggaaatgagacactcaggtgttgagatcaacaactgtaccgtaactagtgtaatctctgcttgtggtagaccttctatggtctgtgaagcaagccaggtccatgcttgggtctttaagagtggtttctatcttgattcctcagtggctgccgctttgattagtatgtactcaaagagtggagatattgatctttctgaacaggtttttgaggatctggacgatattcagagacaaaatatagttaatgtgatgatcacttcgttttcgcaaagtaagaagcctggtaaagcaataagactgtttactagaatgcttcaggagggtttgagaaccgatgagtttagtgtatgcagtttgttaagtgtattggattgtttgaatttaggtaagcaggttcacggttacacccttaaaagtgggttggttcttgatctcactgttggaagttctctttttacattgtactctaaatgtggtagtttggaagaatcatataaattattccaggggataccttttaaagacaatgcttgctgggcttccatgatttctggtttcaatgagtacggttatctaagagaagctattggactattcagcgagatgctggatgatgggactagccctgatgagagtactctagctgctgttctaactgtgtgttcttctcatccttctctgccaagaggtaaagaaatacatgggtatacgctaagagcgggaattgacaagggaatggatcttggttctgcactagtaaacatgtattcaaagtgtggctcactaaagttggctagacaggtctacgataggctccctgaactggatccagtgtcatgttcatctttaatttcgggatattcacaacacgggttaatccaggatggcttccttctatttcgtgatatggtcatgtctggttttactatggactcctttgcaatttcatccattcttaaagccgctgctctctctgacgaatcatcgctgggagctcaagttcacgcctacatcacaaaaattggattgtgcacagagccttctgtaggaagctcactactgacaatgtattcgaaatttggaagcattgacgactgctgtaaagcattcagccagatcaatggcccagatttaatagcgtggacagcgctgattgcaagttatgctcaacatggaaaggccaatgaagcgttacaagtgtacaatcttatgaaggaaaaaggattcaagcctgataaagtgacttttgtgggagtcttgtctgcttgtagtcatggtggtttggtcgaagaaagctatttccatctcaactcgatggtaaaagactatggtatcgaaccagagaaccgacattatgtctgcatggtcgatgctttagggaggtcaggaagacttagagaagctgagagttttatcaacaatatgcatattaaaccagacgccttggtctggggaacattgcttgctgcttgcaaaattcacggggaagttgaactcgggaaggtagctgcaaaaaaggctatagaattagagccatcagacgctggagcatatatttcactctcgaacatccttgcagaggttggtgagtgggacgaagtggaggaaactcgtaagctgatgaaaggaacaggtgtacagaaagaaccagggtggagttctgtctgatgttatatatttgtgaaaagccgtgaggtgcagaggtcttgcttcgagttaatgatgaaggaacagttgcaacttgaaactgattagagattaaagttggaattgctttcactgtaggagacagctctaagaacaaaaaattatccctcttgaatggtcttttttcaatagtagatatttcgtaagatcattccagagaaaattcgtcgtaaaatagttactaatttccattttcttgggcggcagtaaagtcaaagataattcagtttttatctcttggctctgttccatcaatcttgatcatgaaataaacaaatcgttaatgtaatattaattggaacattcaaagttttgacttttgaccgaataataagacaatgccccttagtctctataaaacaatttgaacaatgaagcacaaaaatcataatccccaaagagattttaagaaaaaggtgtaagaaataaacaaccgagttttgagatatg

SEQ ID NO: 15036 - DNA, 3000 bp, Unknown
  misc_feature (1)..( 3000): cDNA_ID_2729634_gDNA_ID_2684256_Annot_ID_193131 3000 nt of promoter + ATG
atattgactcttttatttccatatataatagctacatgttattgtatgaaactatactcaaccatgtctcaaatcttgcaatgcctcttgggttttacatagctacatcttcgtgtccattatgagagtcttcatggtatatggattttgattatcttatcttatgtgtctgattgtttatctattttaatctaaaggtaaaggtattgctcttgcggcagctctcggcaaagctagagcctgcaatggagtcctcatgttacaaagcaatccaggattctcgctcatgtcaatcctctctccaggaacaggggaactccatgagaagcaatgcaacaaatttcccatcaccaatgtcatcaagttcatgctgagctgtgccgctggacacatccgtcttcctgatccaaatggaagaaccctaaagtctcgacctttaacatcggtttcttcctgaaggaaccgctctggtctgaactcatatgggtttatccagtttgcagggtcccgcccaatcgcctgcacattgacataaactgtggctcccttaggaaccttgtacccacctacccaaacagtttcacttgctttgtgtggaagcattaatggtgttgacgggtgaagccggagagcttctttaaccacacattgcagatatggcagtatggggatatctgattcagtcattaacctttcggatccaaccacagaatcaagctcctgttgcgccttttcttgcacggtcgggcatttgatcatctctgccatagcccattcgataacaactgcagttgtgtcagcacccgcggttaacatgttccagactagtcccccaaccgtctcttcgctcagctctttctgctcttttaacaccaacaatttccgaacaaatcccctgtgatcctctatttctatatcttcttccaccataatagctcctctaaaccactttgttctccgatccttgtgcgctaagaattccttatcactaaagaaccaagaagaaacccatttgagccaccagacgtgatcaagaatcgtccctgagccactgagaagatgttctttctcaacgatggctttaaactcttttccttcctcagacccgaactctttccctatcattaaccttgagatggtattcaaaacaaccgcagctaggtacttcctcacaatcaccggttttcgctcctgatcatcccctgaattgctcattaagtccttcagaatcgacacaaccatcgatcttgcttccatctctctcaaggacctgaaattttcgatgcttttcagagagaagagctcgagtgtacagagtttcctcagtttcacataatgtggactgtaatcggaccaaacaagatcagtaccggtctgagtcatccttgcgatcctgtgtcggttagacaactgatggtctttgtctctcaacacttgtctggctagatcagagctcgagaccacgacagtgagctgtgaccctatccacaccgatatgataggaccataagtctctgaccactccgagaaagaatgcgtccaaagtggtttcatttgatgaaggtttccaagcagaaactttggttttggtcccggcggtatgttggatctccaccatcgttgataaagcatgagggtggcgacgatgatagggagtaatgaaattagatatataatcatttttgcttcgacgatgtgaaacaacagttattgatgtaagtttgatgtacattgtaacatctaccttacactgaagtttttatacgcaaactgtaaaacatagaagaaagtttttgatatttacttacgtaagtgtagagaaacacaactttggtatgcgcatgaaaataccatggtttggccccttaatactctcacactttttgcattttctgtttacttaccaaaactatttcttgtgctttagttctcatgttggacatttgtgaaccaaatgtagaatttatggattaagaattgtcatttgcatataaggtgtgactggactttggttttgataaattttatgagcatgaggttatatgcatacatagcaaatctagaagtcattttgtattctatcatggattgaattacagtaaatgacaataatacataatcggtttagtatgatttaatgttggttgtggtttctagctcacgtatatatttggtttagtattataatgtaggagagggatttttagcacctctcgggttctccggcagcccatgagccaaaactcgacgagttctacaccgtcccacatgacaaaaagaaaagaaaaattaactcgaatctaatgagataaaataagaatccaaaaaaataggaagaaatggagattttatataaatagagaatcacatctggttgaaatcctccttaaatcccactatgtttatcatccgatttactccttgtgatatcataaaaatgtgagtatataaaggatagcgacaaggaggttggtcattttctgtttttgcctatgtaagttttctgaaacatacttgtctgtattctctacacaaactcccacctcgtagtagaagaattatttggtagaagaccatcaccaatcatcttcttataaagatgagttcaagtaagtttttcttcctttcttaatgttttgcaatgctacaattagtagtagttcttggacataaggaagtaaggtatgttgccacaacaacactcactaagcccaatatgaccacgaatgtagaatggtgtgttattattatacggatttaaacggattcgaaattttggtgaataaggttaacggaaagtgttatgcagtttattgttacataatttttttttttaattcaacataataaataaatattgacagaaaaatatgatgaaatcgagtggcaaaactagatgtaaaatagccacacaaaaaaaaaggaaattaaaacagagcttgacgttaatggagaaaagactaatggagtttcccaggaaacaaaacaaaaggagaaatg

SEQ ID NO: 15037 - DNA, 3000 bp, Unknown
  misc_feature (1)..( 3000): cDNA_ID_2686032_gDNA_ID_2684256_Annot_ID_193130 3000 nt of promoter + ATG
aaaactagatgtaaaatagccacacaaaaaaaaaggaaattaaaacagagcttgacgttaatggagaaaagactaatggagtttcccaggaaacaaaacaaaaggagaaatggcgacatcgacaacgtctgcgattagggcaccgaattggagaaccgctgtgttgttctggaccatctctctcactatcttctactctcttttccaaatgggtattcgaaattcgccatccacttcatctccttcatcaggtaaaaatcatttttttaagctcttgagggttgtttatttatcaatcactgacttttcctttccttgtctcgaaattgagtaccttttgatgttttaatttttctaaccccgatctgattaattaactaaattgtgtgtctgtggtttttttaatgaatatgggtttcgtaaatggaagatcgatgttgacttgctaactgaagggttcatcagcactgtctagttatggttgcgtaaagaactagtttttaattttctatgttttttgtacttaagattttgagtttgctattggttctttaagccgaacttagtttttagggatcaaatgggtacttacatcaccgttctttatttgttcatcaacatgtttcttattgataaaagcaaaacttggtatgcttctagaagcttcttaagccaacaagattagtggttcaaatgcagaacattctagattgaatatctgatgcaaagggaaatgcttgatttggggatctagtgcctttgtttaagggttttctttatctgtatcaagattgtatctgaggtaaatggttattcatagcaataattagtcggattggtatgtttcagattcctttgtctcctatgcggagcaaagtactaggttgtacaataagatggaacaggatttacaagaaaacggacccgtgtttcttaaacaaggtgaaacgtctcagtcattgtcactttcagatctcttcacactgaaagatggaaagatagcacctgtccttaaggtagaatgttatatccttacttttactattgttagaatggaataatggtttgtataacgatagctaaatatcatgtatgattgtataaaatattcaggttgcgaatccccctgtgcgagctaatgtattacatctcagcacagaatactctgtcccagtcttgtgagtgtgtaacttgccccttctcaatctcaatgcaaatttaccctcttttcaaaatgttctactgctaaaaggtgtccttctatgttttattgcagggaagtcgtaaaaaatgtgttcagtccttacttcgaaaatagtaagcctgccgctattaccatatatgtgaattatatataatgccgttaattgtattttcttctctcatactttgtttttttttagcaatttggtttcaggactctaagatgtaccacttcagcatgtttcatgcatcgaatcacattttctctgttccagctactgaagttgaggtctgttgtttttactttatcatttatcttatcatcagtccacttttatcttgtgaagattctagtctctgaatctctttttcattatcaggttgaagcagaagcagctgctgttaaagcagttgctaaagagctttgccctttggagattatcttggatagagttctattaacctcgactggtgttcttcttggatgctggaaggtatttttgttgctttctctttgtttcaataaatgcgagtcagatgtccattttgttttgattataccactttgggaatttcatcctccataacaaaaactatgctaccaagttctttagaaatggctaaatcagatatgtgggactaatatcctgtttcatgtttcaccaggttaattctggagatgaccccataacaatccgcttgaaactgagatctgttcttccacgtgcaccggagaagcaacttgtaatatctatttcctaaaatgtatatatctctcaatgaacatgaaccacttgtctgatacttgtgttgatatttgtttcagtatgatgctgcaattcttcatacatcattggcaagactgcttggtccaccaatatctccaactgaggcaagtgtttcacttattgtcaacaaactcagaatccaaagttgcagaatctccatgacttagtggttgtttctttatgtatcaggctggttctgacgaccatctccagcttctccatgagttggtcacaagactaaacaaccaaatccgaggattcaaggtaaaacttccaacaaaagcaaagttttcttgaccaagaactgagaaatctctctgttgttgatacaggcaatagtatcagaactgtggtatgtagaagagttcgatctgctggcgctcgccttgggaggaagaatgaatgttcgatcattcccactcggctgtgcaaagagctaatacttatttcatctttaagatcatcaaaaccctaatgtcatcttcatgtatattttcttcaacttcatagtcaagaaaaatatcttattcaagtcaagacaaaagttctttttaacttgttgcatacatcaaaacggtattttcttatgtcggcaactgaaaaactacttacagtatttcgagagatacagtacattgtaattaacctccccaatacaaatattttgttttccttctatagttaaaacttccttccatatagagaattttagaaaaagattactactttattttcttgtgtcaacgtttactttaagctaatttccattttcgttttggtaacaatttccaaaaagcttttgattattccgaaaggaaagaaattaatgggtagctttttccaattcatatcgttttcacgacatcaattaaaaagttaaaaactttcaacaggtctaccacacaatcattcgttctctctctcaaagtctcaatccatctccagagagtagtgtgtttttagtggaggaagaatcagattcaaaagccaaaatcaaagcttggtgatg

SEQ ID NO: 15038 - DNA, 3000 bp, Unknown
  misc_feature (1)..( 3000): cDNA_ID_4254807_gDNA_ID_2684256_Annot_ID_193124 3000 nt of promoter + ATG
tattagcgacgagttcgttagccttatcggtgggatgatactcatcccaaaacacatacttacttctgtctttacacaatgtcgacgctggaatacacgttagcgcaggccggattctgtagaacgagcaacacggcgaatccgagttatcaaaccctataatcacacaaacatttaaacaagttaatccaatgatcaaagcgatataattaaaaatgcctttattaacaaaaactatccagcttaatttatgtgaggaaaatgaaacttctgattgtttaaaaaaaaaaaaaagatgccgtttgtgaatgcttcttttgattttatcaaagttttatattaccgtatttttttgggttagtgatgacgtcgttgacgaggtcataggcttcaccaaacctgtagcttgcgttagggagcttggtctcgagatctaggagcattgtggtggcagctttgttgaatctcttagcaagattactcgctttgttttgacaatttccatccaggcttagagctctttgcagtgggatacaacccattggtcctaaaccaaacaccattagcttcctcgctcctaaactatgtaacacctaaaacattacatgcatcacaaatttgtatcagttagatcattatatatatgaaagataaataggtacttgaagtgttgaattagtttagaaaataaaccttgagttgagattcaagtgtttccattaagtagtcgacgaaggtttgatcattgtatttccaagagtcgctatagacaggcatcaaatagttgttaatgaagtcattgctgcctaaagcgacgacgtatcgagcatcttgaaagaacttgtctgcttcttttttccctatctttgccacaactacatcttgtgtcccttggaataattctatttgcttccacagcgaaaatctttggatcttcacaaatacaatccccatgaaaaagaaataaacatttttagaaaatcattatcatttctttgatgaatcttattcatttatttttatgcaaataataatgaaaacttattatttcatgagacttacgaaataaccaccagtttcgttcaagattccaccacctcctgaagcatagttcactccattttcaagtattacatcttcattcattgatggatccaagaaggctactggtcttggcaatccaattttatcacctttaaatttcaacaaacccattataagcttgtactaaaacgtaattcacatgatatatatatcattgactaataattaattccatactcatgacttacctataatgtctgaaacagtgcggccattagtgaaccttccattaggcaaaccattgccaaaatcaataccgtaaaagggcagattcgccgtcgctaaactcctaggtagattcttattgttgcctacatcagacaatgaatctccaaatataaattggactatcttgcaatcgtagccgttgattgcaagaacgatgaataacacgaatatcgcgcagaacttcatgtcgccaaatttgaatgtgtgttgattgaaaaagatttgtttgggtggtttttaaaagggttttggaggtgaaaaaataaggactaagtaagaaaggtggaggagtagtgtgagaataaagtggtgaaggtagattttgagttgatgaaccaactgattttgtttttttctttttaattattgtttttggtttatgtttgattcaaacctacttcaactactctttcctcgtgttggtatcgtaagttgtaaccgtttcttgtccgtaaacttgaaattttggtaatattaaaccttgccgtttatgagctcatattatagcgtaaaaccaaaaaaataaactttacctcaatacggaatatttccttgtagtgaattaaataaatttagacctctatcaaacacttgtagtgattttcctcctgcatgtattcttcacttgctatttcgttactttggcttctcttactaaaaatatctaaaatcatatgtaaattgaaaaatactattcatgccgaaacaaaataaattaaaggaaatatttttgttttcttctaaaatttgcatgctcgtttgtaatttgttttttctcatgagctcagattgggtcaaatatgtttaattatgggccaatttcaagcccaatgcaccaaaggtggaattgctcggactggaagaaattcaggcagatgatcgagtggtatactggtaaatgaccaccaaaagtactgtttaagccgttggacactgaagagcagtttttgtaggtcagaggctttttctgactgaaacagagtaacgtgtctaaaacagaggtagttaatattttgatcaaaatgtgatttgaaatccacactaaatcggccggttatactggtaaacccacaatttgaagactaattcggtctgattataagccagtgtttttttttttacctgcttaaacccgatttagcggtttagcggatcaaattaattttggttgaaaacttcttctactttttattttattttttatacagtaaaaaagtaatagagtaaaataaactgaaatatcctttcttcaatcctttttttttttttttttgagcaaaaaaaaaaaatactgaactatccattgaaccatttttgtgtgaaccagaaattctacggatgttttgagcccataaaaaataatcaaaagacaacaaaatagttacataactaacctacgtggtcaaaaatcagccgattgctccaccaaatgggcgccacagataaataaatacccaaacccgtaactttatcctcatctcatcatcaccgtccatttctcaatccaacggtgtacatccctcggaaatctccaacaatatctaatccactaaatcaaaaacagatttaaacaaaagaagatttcacaaactcaaaacacagagaacagagagagagagagagactccattgttgaagtgtgttcactgaactcctcctcaaacaaca

SEQ ID NO: 15039 - DNA, 3000 bp, Unknown
  misc_feature (1)..( 3000): cDNA_ID_1685621_gDNA_ID_2684256_Annot_ID_193122 3000 nt of promoter + ATG
tggttaaaggttgttaatataaaagacaggagatacaaaccactccatttttccaatctttgttgtttatgtataattttctcatcaaagattgttaattatgaataaggttccattttatacggatcggaacttgcattacaatttaaagatatttctttctgatcgattagataaattgtctgtttttgattatagtcgacgtttcttaaagaagaaacacaattagaatagaaaaggcatcatgaattaaaaaagatatacaatcagttacatgttatgaacgctatattatgaagttacaattgtcacaaaaacttggagcaatcttgagagcttgtaacccttctatggacacgccctcctgcaaaaaaaagaattgagaacgaaagtccagatgtgatacaagatcatgatatcgaggccttcatatatagtcaagcaagatgattacattgggtaagctttggagcccaaaacaaaatataggctacaacaaaacaacccttcatatctccgttcttagatgcaatcatcaggctcctaaagaagtaaggtgatagaaaccaaaatctaaaaaaaaaaaacgaatcaagaatatgcctcagaggtagtgacaattgtgatataattcatcactatgaaaatctgatgaaaacacatcaatagatatacatcaccggcacaaaacaaacatcattaacaatttaaaaggtgcatcagagagattcccatctagacttaatcatcattatacttctcccaaaggagaatctgatgtccctgtctttttatcatcacttgcacacacactaaacttgtaataaaaactagaaaaaataaacctattcacatccaaacttcaaactggatttcataaccaaagaaaaaaagaagattctaaatgcctcagatttgttttgttttcctagagacaaagctctcaaagtatatttaataccatcacaggcatcaaaacaaacatacaattaaacagaaataaccacgacacagacaaaagactgaatctttggaaagccctcgaatcgatgagacaatttacagagatacaagactagggtttcaagagaagtggctcccattggagctttaatgaaacgcgatggctttatataagataagcagaggcggcgaaaattagggcaaaaataaggaactgaaaagatatgactgggctcgtaggtaaatatgaatagcccattagataaatcaaaaaggcccaataaaataaaaaagaccattcgtttggataattaattaaacgaaactgcctagttgattaaaggcccaataaaagaacattctctgttttcttcctttacagtggtttctctcttgtctaagagactctgtcattcttgaatcttgagaagtttatttttaagctgttgtatcgtttgagcatacatttttcctcaaatctcaagtacatatgaagtcatgtacttatgttataaaacttatatctttttgttttgaacttagccgaaaacttgagagccttgaggtaactctcttcctttctcataatattattggttttgggaaacatattgagctgaaacatttacttattgtatagggccataggccctcaagaagacttttatgaaaatggatcgtgatgttaatataaatgagttcttcttaggtgcaaggtacttgatacatgagttctatctatgtaaccttaaattcagtaaactatttgtcccgtttggaaaacacttgaactgtggtccttaatttgttatcctgaaggaatcaaactattgaggtaaggatgatggatcatcatgattcttttggatactactaagctcttgacttttgatagctaaaagtatgtattgacatttcatgaacagggtctgactaaccaagtagcattttctcttgttcaggttatggagtgtcataggagactgaggtggaacttttcggttttaattatcattttttttctatacatttgcgtttcaaccgtcttaacttactatggatacctattgcgtcttcttctgttgtgtacttttcagtttttaggcatttggagcatttggaagaatcattgagaaaatcttttgaaagagttaagattcacaaggtatgtcatgacttgatcacacacacacactgacacatatatgaacatgttaagagttaccaatggaggcagcatttgtcttgcgggaacatttcagaaaaaatcaactcacgtcattagaatgtacaacaacacaggttatgtataagttataacagttgcccttcttttctctctcacattcttaaaccagaccaaacattctcatgcagtttcagagcgggctatcatcacctttggtaataaacggtgttcaagaaaaccatttaatctcatggcttcctattaacaataaccagcaaatgatcatacctgctgactcaagttttcatcctcatccgtgagtgaaaactgttaatgcacttaataattaatatgctttggacttatatgctatattcaattgaaagttttatgatcagcagaaagatgaaaccggtttttgagttctggttaaacattagttttgagtaactgtagcaatgtgcacgctagttttcttgtatatacagtgtacctgtctacgtatgtgtgaacctacatgatattcagcagatttgtatatatctttgtgtcagtgtgtgtattgtataatacaacactagtgaataaaaaagaagagttttaattgtgatgagcatcatctgatgtctccaactcaaaaggcttatttccacaatcaacggtagagatctaaagataatgagaaaatttgcacaatcttctttaatatcgatatcttcttccacgataatcttacagatccagaagaagatcacacatggtttttgtataaattagacaaagctttacttgcagaacagagcagaaacagaacatatattctctgtctttttttgtggcaaaagtaa

SEQ ID NO: 15040 - DNA, 3000 bp, Unknown
  misc_feature (1)..( 3000): cDNA_ID_2729657_gDNA_ID_2684256_Annot_ID_193119 3000 nt of promoter + ATG
gacctgaaatgcccgattgttcggtgatgaagctgctccttgttccttccaaaagaccggttacgatgctgagacgacactgagctagaagatgaatccttctcatcaagcataccaatagctaactcaatcaaagtcttcctcgcacgacgaaactgaccttctccaagaggtctcttgccactacttcctcctccattgttgttgaaagcacaaattacaatctcgataagtttctgccattgacggatctgttcaacaccatcacgaatcgcgttacaaacatcaagagctttaacacttctctcgaagtaatctgaaaccaatcgatccatcggtggtttagtaatcatcgaacgatgattgatgactatggaacgaaactcttcttgacaagatagaaacgaatcaagaagcttcccaacccattcgagagacagtagatcttcacaactagacgcattgagatcgataaacctctcagcaacttttctctgaaacgaaacaagctctgcttccatctgagtcaactcgggggtaaccgtcgttgactcaaccgagttcaccgccgtgtctcgccgtaaattcagaaaagacctcccgaatgatctttgatattccgttgctggcatcctcaaaatgaaaacacacagatgaaatatgtgatcgatcaaattcgagagaaaattctcattcaccggaaataaaaatcgttcctttttttctgaatttgggagcagagagagtgatgatgatgatgaaaattaaaaaccctaatgagaaagagattgtctttatattgatagaattgagagagaattttgaccgcgtctatttttttttagtatgtaatttgtgataaatatggaaaaaggatttggactaaagttttatttttttcattccaacgaaaaagatctcttttgtctattttgattttgtttatttttaatttcatgcgttgttactcgtccgaaacacgcagcttacacgtaaattaataatataccaagtaggagaaataaaataaaataggaagatgaataaatctcagccgttggattaagaagtgattcgcgcagacatatatggctgtgagaagagacatgacagcacgtggaagatgtaagaacggaggccacgtggcgagacgtgagatggggaggagtgacggagaaggtgtcaatataacacagctcagtcttagttggcgtgtcatagagacttgttccctgtgattcgttttttgcaactttttctagaaactttaatcaagccaatgacaatttgcttatttatttcttgtggctttacttgctaaataaatactactactacaccaaaaattcaaggagcaagtcaaattaattgtaggcactattacctggttgatatattgtgtgtataatataaagtatggagaccgattgctttgtcatataactagactatagtactaaattacaaatggattatggatagttggatacattaataattgaatatgatgttttcaacttgtcataatagaaattgtgtgtttaagagttgaaaatcatgtttgaaccattctttaagttttgaacgctagcctttttatatatattttaattaatactaggcgtaagttgcacactagactaatgagagtatattttgtaatcaaatactcttatgtatattctgtattacgtaaaatccccaatatctggaaaccgtacctaatttgaataaatttatgatatcaaaagagtatatgatagtattaaaaagagtgaattgtatactaagaaatctgaagtagagagcacgtgtggattacaggttccaagagacatagaacgttggaagtcatgaaggaaatttataaacaaagaagaatatgacagacaaactctcctttgagttttgactatttcttgaaatttggaagttgttaaaagaaaccaatttaaaatccttgcaatttggtgcttaatctctttctcccccgactaagttctacaatttagttatttattaaaaaaaaagaatatttcttacatcatttcctattaagtttttaaactggtgaaaaactaacatggtccaaaacaaaaaattatgtaaaaggcttaataaaaacaaaatggttcagtttcatcattttatgtcgaacaaatatcataaaacagagatacaaaaatgggttacatcatagtttcttaattatacatgaatcataactattgcaaaaaaaaaaaaaaactgcatcttaatttcttagaaatcggaactacatcatgatggctgttatacaaacataagaagatcgtatatttggtcacagaaagatttgttttgagatatgaaccaatttaaaatacaacatttagaccgagattaaaggacgtggtccaggatttggaaggcaaccgtcacaatatctgaagtatatagctgcagccatcactagattaaacggtttttgctcttatattatgagattatcttatacgttaacgtataatgaatattattagctgatggtatgtgaatatggtggcacttgtgcctactttcgtcatttatttggttagagtttttcttttgatgatgactaaactacggtagaaatatgttggtaacataacatgatatctttgtgattttaccgagtttttttaacccacgtgaaaaaaatcatgaattatatcctattgttttactattgacaattctaataaaattacgaaatgaatcacaatttcttattgcttcaaccgctttaagctactgaaattcccttgattattccaaaatcaaaacgcaatcgcaatacttatgacttggtcaacgatcaccacaaaaaagcgtacattagtttgtcaaatatgcgcatgttagcatactctaggtgacgcatcttctaagtaaacgccaataatcccaaaagtctcttcctttcgtctttccaagaaagtctcccactaaagtgtttagagaaaactttaaaccatg

SEQ ID NO: 15041 - DNA, 3000 bp, Unknown
  misc_feature (1)..( 3000): cDNA_ID_4254766_gDNA_ID_2684256_Annot_ID_193118 3000 nt of promoter + ATG
atacaatatatcatctcgtccgaccaaatgattttctaatcgagaaaacaaatcgaaacatgtattcaatcaaaaaatttaaaagaatacaaaataaaataaaaacaacaatgccatgaaatagtcgaaaaattacactagctaatgaataaataaaaggatagatgatatttatgtttgattattgattttgattttcatcggatgccataattgagagaatatggttacaatatattgattagtttttttaataaaaataagatatataaaagattagattaatttaattatagtgattatggtttgggtggaagccataattattttaattaattaaaaaagattattttttttaacctaactgctaccgcccgcgaccgcaaacgcttgcgggaaagagctttcaaaaattggcgatttcgaacggtccaaagcgatatctagcggtttctatgattggtgtcaatcgctaacaaccgttaccaactgcaaacgctgggtttgcgggtggtagagggagaaccaatcaaaccctaaatgtgtgtgaccactgaccacaccagccaaagaggtccccgtgaagtgaaaccgtagcacggccatcatgataagatatcaatataaaatagtaagaacatcgattttttatatcattttgtttaaagaccccatgaaatatatagatagcttttacgaaaataatacttaacacgtcttttggacaaactatcttttcatttatttactaataaatacctaaatcaatttaaaatgtgcattgtggtccgacacaacaacaatccaggatacaatgaaagaaagtctacacataaaaacaaaaacgcgcgagccatgtatatacacacatggtcttgactcttataacctaataataaatttatatatatataaaaaataaatacattgttatataaaaaaatcaaaataaattccgaacataacaaaattgatattgcgtccgatcaacattagctccacaggccacaacatatggatgtcatacaaatatacacataagtactctgagtaattgggtagcaacaattacttcttggatgattcagttctctctctaacaattgtatttttgggtctaattacaatctcacaattgataacattttcattttacctatgtgcaaacaaatttgtgaactattccatgatatattttggtataatcatttctttcaaagtgggattacaaaataaataaataaataagttctccgaaaagacatattcacattaaattagtcaaaagatactgcatactaggcataaagacattatgctaactcaaataaaatcagctgcttaagtaatgtattgaggaggacatatatagcaaaacagttagaatccatcaaaacgaacgtacttgcggataacaattctgaaggttccaattttcttatgtctaaaatggattagggggggtttgggatcgagatgggaaatcaaatacggtatcaccaaaccaccacggccataatatgttttgtagctttcgtaaaagagcaattcatcactttcagtaacattattaatttttgtcttaatagaaatagaggaacaatgttgatcacacaataaaaataatagatgatcatgtaaaaaatctaaacgagtgtaaactactaaccacgtcaatatcaaaaccaaagcaaaaagatgttcacaaatgaagactcaaccgagcgacagtgtcttttgaatgagccattttcccttcttttttttaataaacatattatgaattataaataacagaaagaaaatatcaattcttgagaaaaattcgtaaatgtgtaatcaataaatgttggaaataagttattaaaattatagactggggcatatatagtcccagtgccgcgtaaccccacaaagaaactgtagtatactaatgctgtctttcaatcatttattacaattaagggtcctactatttttgcgtatacagataattgcatatttcacacttaccaaagtacatactttcttcgctattcaccaacgtgtatcatatatcaccttttgaaccggcgttgcctctacaatattgtgcttaagcaatgctacaaaaagaaaagggactattgaaatcgaaatgtaataaagattatttgtttagggctgtttctaaattttcaggaactctcgaggtgaaaatttcatacaacaaaacaaacaaacaaaagtagtacgtagaatttaaaaaccacatgtgttcttgttcgagtaattctgtaaattaaatggtgtgaaacgatttctgtaaattaaattaaatggtttatccaagcataaaataacaattttagctaaacagtatttgtactagtctttgtgctattcctaaacaagtcagaaagttgaagaagcaggaaacaaacatagctttactcaaataaattaaacaataaaattatatattgctctacataacaataaaatttgttaatatgtttaattcttgttcaaatactaagcttgaaaatgagcatttgtatcatgtgatgtgaaattgtgaatacgctattatatgtgtgacttaaccccttggaataagcatgtttgcatattctgaatatatataaaaaaaacgtacaaaataagaatcaagatatgaaaaggaaatatcagcatcaagaatccaacggttgaaataaatcaccaaaaaaaaaaagaaaaaaaaggaagggactatatatacacataaacatcccccattccccactttataaaagaccattctacttctatatatatatatagtgtgagtgagacagagcctcacataaataaaaagtctcctaatctgaatacaactattactaacaataattcacttatctaaagaccatcatctgactgactctacgctgaatcatcacgaggaagacttgaatcgaccggagaagagatacgtgtagagatctgattggctcaccggagagaacaaaacaagaa

SEQ ID NO: 15042 - DNA, 3000 bp, Unknown
  misc_feature (1)..( 3000): cDNA_ID_2994977_gDNA_ID_2684256_Annot_ID_193116 3000 nt of promoter + ATG
attagccactaacttcccattacttcgtgttctgggactttttcgtggggaaaaccagctcatgtctgtaagaatgtcaggaacactggactcctgtaaacaccaagtacttaagctcagtgattttctgttatcatgtcatatgacaaagtatactgcagtcttgcagatcatgttcagggcttggaaaagttctggtctgcgaagaaacatggacacaatttttgcaaactataatcctaaaagttacagtttatcacttattcaagaaatgagaagacatcattaccagaaacaagacggttgcacagtacttgacaacttcaagattcatccggacatcatctaagctcctggtgaatcatatccattgtttagtcccatattgaaacaactgttgaatcgctaaaaggctcagggcatcgtttagatttacctgtgagcttgatctcctagcccgaagtatgtagcaagtgatgccatctacattagttaaaaggagtaaactttagcaactctgatgtgaatctaacaagaaagctacaggcattgaggtttatcattgagaatcgggaaaaagagagaccttcatgtcaccagctctcttcccaaacttctgagacaacaatgaaagcgaatcaattgtagctttcggctctggcggagagagaccaatttctgcaaatgcttctcttattcttacacaatcgaatcgaattatgttatgtcccgcccaaattcgtcctacaaaaacaccaaaatcaacacttttagcttcgtgagaaagaaagcgaggaagagagagaatcccttaccgtgaagaatgtcatagaccttatcggcgatttcagagaatgtatgtgcagagagaactccgtcgcgcgtaatgccgctacgtcgctttgtgagcgtagagattaaggaaagatcagtaggtcgaaccaaagtggagtaactatagagctcctctagcctccttgggcaaactaagatggccccaaactccaaaatcgcgaaaggctcccctgatttggtcggaaccgccgtctcaaggtcgaaaaacgctatctcgcttctctcatcgccgcccagactcgaagccattgttgaaaagtgaaaactgatagaaagaaggagaagctaataggtgggttttaaagcgaatgagcttcacgcgccacgtcctctttttacggaaaaaatctaaactttgagagacgcaactgtagaatgaggtttatcttgcgtcatctgcattcacttggagtgatcaacaaatttgattcctttcttctacattttcacaccaaatcgcttaaatctaaccacactttgaagcaatatcttgaatctggggaaccaatcaaagctcttttagatttccggcaccgattcagacaaagtcctagttttgttgacagtttttctgttttgtttgccattaaagtttcgtcagctcagaaagcttcctcacttgatggtagacagatccacgctcttgtaagaaaactaggtttcaatgccgttattcaaattcaaacatctttagtgggattctactcttccgtgggtgatgtcgattatgcacgccaagtgttcgacgaaacgcctgagaaacagaacattgtcttgtggacagcgatgatttcagcttacactgagaatgagaactctgtggaagctattgagctgtttaaacgaatggaagcggaaaagatcgaacttgatggagtgattgtgactgtggctttatcagcttgtgctgatctcggggcggtgcagatgggagaagagatttattcgcgtagtatcaagagaaaacgaagattggctatggatttaactctgagaaattcacttcttaacatgtacgtgaaatctggggaaactgagaaagctaggaaactctttgatgaaagtatgagaaaagatgtgactacttacacatctatgatcttcgggtatgctttaaacggtcaagctcaagaatctttagaactcttcaagaaaatgaagacgattgatcagagccaagatactgtcattactccaaatgatgtgactttcatcggcgtcttgatggcttgtagtcacagtggcttagtagaagaaggaaaacgacatttcaagagcatgattatggattacaatctgaaacctagagaagctcatttcggatgtatggtggatttgttttgtcggtcaggtcatttgaaagatgctcacgagttcatcaatcagatgccgataaagccaaacacagtgatatggagaacactgctaggcgcttgcagtcttcacgggaatgttgagctcggagaagaagttcagagacggatctttgagttagatcgtgatcatgtcggagattatgttgcgttgtcaaatatctacgcttcaaaaggaatgtgggatgagaaatcaaagatgagggatcgtgtgaggaagagaagaatgcctggtaaaagctggattgaactcggaagcattatcaatgagtttgtctcaggacctgataataacgatgagcagctgatgatgggagagattagtgaggttttgagatgtttagtttcttgtatgacaagttttgattgtgtaatagggaaaaaaatgtagaccaaaagagtctagtggaagttaatcaaagcccacttgtaggagcctgtggcccaacaaattaaatcaaaattgataacttaaataattttaagttttcacttttatcaaaaaggggcctgggaaaaaaacaaatatcaaagaaagcccaaaaaagacggagaaatcagatttttttgaatttaagaaattaaaaaaaaaaaaggagagctccgtcttcgttgctttttcgagcggtgcctagtctcaacttccatggctgacatcttaccttcaaattttctcaaaccaaccaaaaagcttcttctccttttctaaaatttcatcaaaccctatagggttttctcaatacaattgattttttttttcttcttcttctct

SEQ ID NO: 15043 - DNA, 3000 bp, Unknown; identical to SEQ ID NO: 15041
  misc_feature (1)..( 3000): cDNA_ID_4254766_gDNA_ID_2684256_Annot_ID_138095 3000 nt of promoter + ATG

SEQ ID NO: 15044 - DNA, 3000 bp, Unknown; identical to SEQ ID NO: 15040
  misc_feature (1)..( 3000): cDNA_ID_2729657_gDNA_ID_2684256_Annot_ID_138096 3000 nt of promoter + ATG

SEQ ID NO: 15045 - DNA, 3000 bp, Unknown; identical to SEQ ID NO: 15038
  misc_feature (1)..( 3000): cDNA_ID_4254807_gDNA_ID_2684256_Annot_ID_138099 3000 nt of promoter + ATG

SEQ ID NO: 15046 - DNA, 3000 bp, Unknown; identical to SEQ ID NO: 15037
  misc_feature (1)..( 3000): cDNA_ID_2686032_gDNA_ID_2684256_Annot_ID_138104 3000 nt of promoter + ATG

SEQ ID NO: 15047 - DNA, 3000 bp, Unknown; identical to SEQ ID NO: 15036
  misc_feature (1)..( 3000): cDNA_ID_2729634_gDNA_ID_2684256_Annot_ID_138105 3000 nt of promoter + ATG

SEQ ID NO: 15048 - DNA, 3000 bp, Unknown; identical to SEQ ID NO: 15035
  misc_feature (1)..( 3000): cDNA_ID_4266672_gDNA_ID_2684256_Annot_ID_138110 3000 nt of promoter + ATG

SEQ ID NO: 15049 - DNA, 3000 bp, Unknown
  misc_feature (1)..( 3000): cDNA_ID_4254758_gDNA_ID_2684256_Annot_ID_138117 3000 nt of promoter + ATG
aatttcatcattgtattataaaaattaacctaaaagacaaaagtgtaattaggtctgcttttatatatttttaaacggactaacaaatatgaaattacgaataaagagagagatagaaagatgagagactattgaaaggactctatgtttctcaccaaccgtgccctactcgtgtagtttagagtcatataaaccccttaaaaattgacttattatttgttgatttatatacatattagtcaaaatgttgtctttccaacataaattggtgatcaatatcagagtgagactagtaaattgtttataatctcatgtttgattgtagatacacagatatttatctaaactagcagcaatgaaaaatcagaagattaaacgtgaaagggcacacaatgattattaaacaattgactagaattaattaaaacactaactaatatatgggaaactaaacatcaaatctacttttttcagtgtccctctgtctgtcacttgtggaaataaaaatgaaaaatcgcaaaattaaccaaacattaaacctttttaatttgattatgttactctttgtctatgtttccatatgtccccttttcaccgtttgggtgatatggatatcttaaaaggtattgggctttactgtcctctctttcagttctttcggccttcttcctcagaattattatatcaataaaattcattggatcacacttcggcttgggcctttgttcattcatgaacatcttatcgagtggtatatttttggtaaagggtttatcaagtaagatttcttaaaactacataaatcttctatccttaaccaatagtaaacaaatattcggaaataactctaaaaatcataacgataaacaatcatatttgttggaacccatttaaatttcatgacaacaaggaataagaaaaaataattagtataagcttaaaagttatgaaatttcgccgtgaagtaaataacacaatgaacaaaactaacgtggttaaaccatctccatcaatggtttctcattgagaaactgtttaatataaaaataaaatataattaaaatgtatgagagagagtagaattagtctctcaaatgagaaactctgagaaacccataagaacacttgtatatttggtcaaatattattttattattaaaatttaattatataactaatatttattaaaatactaatatttcttttttttgagaaaccaagaaagtatctcactgatggagatgcacttagtataaaattcaacgttggaataatacaaaacgaaataaattaatacttatagatttcagcttcctttttaaaatgcttagattgataaattttctacttttttttcggtgtgccagtctttgtttcagtttcagtgaaagagaaaaaggttatctcttgagcggtgtaggaaggtgaagtaataaatgaagaggatacatcaatcgagtggacacgtacttgaagttgtctgatccacttcaactttgaattgtgagtgtcgtaacaagatgccgtatctattaaaacgttaaacacaaacaatttttaatcacaaatgctattttattggacgaccaaaataactaatgaaagaaaaaactagtatcctgttactagtttgacaaaagttattcagagatgaattgtctgcatgttggtttatactacgtcttaaaatttatataaagatattaaactttgtcatggatatagtaattgtgtatccacaaaatgcaaagatagaaaaaagtcgttatgtttgttgaaagcattagatagatatatgtctcccatgtgagtgcacatggagttatgcatgcacgaaaactgcctctacccttttgtctctctctcgattcttcaatcaattccccaccttaagtttgcatgatctctatatccacctctgagatctagacacgttgctcctcctcttcatcgaacggttctctttgatcatcttgctaagagataagaggaaaagtggcataaatccatgccgagattgctcttatcggtccctttatttgttggttggtcccaatcacttgcactggatatgtaactgtttctccatgttactccttctcttttaccaatatacccttcattttcttcaatttgggtgtagtcccaaatgtgactcttttggcctaattgtatcaacttgtttactttttcttatatatgttcatcaatgttacgacgaatgtaaaaaaaaaaatattatttggaatttgataccgaatctcgacactattagtatattattggacccgtcatatgtatttatcaccagagagatgtgagttttacgatacatagtttttttctttcatctgaaaagaaaattaaacacatgtaaaataatttctgcctgtagtcttttaatcactgaagtaactcgaatttgatgttagataattttttcacaaaaatattcaaattcaacagattaagttgttgatgacagatagctctctgggaggaaaaaaagaagaaaagataatggtccgtattaatatagttgaaaacttgaaactactttttagtttgtatataatacagtagactagggatccagttgagtttctttctttattttgagtttgtgtttatgtttgattttacgtttttatatgtaaataagatattttacgaattatggttttatttgggtagaagttgtagaatgacttaaacaatcaagtggcagaatgagatatataaagtaatataatatatgtaccgttattaacttattgtacatgtgaatgaggaagcttacacacacacaccttctataaatagctgacaaaactggttgttacacacaacacattcataaatctctcaaagtaagaactaagagctttactacagtcctactctctacacatcttctctctctctcaagagctagtcatggccaaactcataacttcttttctcttactcacaattttattcactttcgtttgtctcact

SEQ ID NO: 15050 - DNA, 3000 bp, Unknown; identical to SEQ ID NO: 15033
  misc_feature (1)..( 3000): cDNA_ID_1989204_gDNA_ID_2684256_Annot_ID_138118 3000 nt of promoter + ATG

SEQ ID NO: 15051 - DNA, 3000 bp, Unknown
  misc_feature (1)..( 3000): cDNA_ID_2783357_gDNA_ID_2685554_Annot_ID_138126 3000 nt of promoter + ATG
agtgtgtgtgtctatcttaacagtgatggttttgatgctatcaatttctaaagttacgaaaggtaataatgatcatgcgccggctccaatgtcagagaaagggttgctgccaaatccaatatcatgtgtagcggacgcaagaaaaattccagattgtgtagaggcaataaaacagggccatttgaaaattataaaaaaagaatgttgtatcattctactcagtcttcccgaagattgttttgggattttatttcctatacgtttctactatcgtatcatacttaagattacatgcaaattaattggcatcttttaatcacaatttttttttaatctttagatattttttcatgtaacggtattcatattatttcataataaaaccatttttctttcagtgatttgttaataattacctaaatgattatgttaaatataaaataatgggttttctatactaactaagaattaggctagtgttcgtgagacccttcgtttggagctagaagattaatccctagttcggttattggttgggaaggatttcatattccgggccaggagatatatgagtctcacctggtaattccttagagttgtagttaattaacgaatcaaaaagaacatgcattgattattttattggccctttgttatatgttttcttaaaaatgtgtaacgcttaaaatttcttgcaaattacttgtagtttcaatagtttaaaaattttaaagacttattgaatgactttgtatcacttcattttatattcaaagactctgtatcaatatgagattattattttttctttattttgtggtgtctaaagaatcacttcaaatagatcttcattgtaaatattcataggtgaaaagttagacatgctcgagcaccactgaattattttaagatcatatccatgtacttttaatttgcaatataaaaggaaaaatattagttaaaaaaaaggaaaaagtatttctataagtcttcaaatgcacaagattttctgaattgaatgttttatgattagagtttttctcccattttatcatatatactgataatattaataacaaaatgatttgaaccccttacatgtgctcgaggagctgatgcacatggtccatccaacatttttttttataagtaaatctgttacaattagggtccaaatttttattaaaaaataaaatataggaaatgatgaccaattcttttttttagcacatgatttttaattattttgagccagccctaagtaaaaaacgtataggcttttgtcgacgattatgttataaacttataactagataagaactcgcatctagtgtgggatgaaacgattaaaataaattatttgataaaattattgatatttaatatttgtctgtatataataaaacatgtaattaatgtttttattttattttaatttatgtttgttttgtgtaaaaatacgtttcacccgtgattgttaaagctctaattcttgagtgggtcggaacttggtttaatttgcaacataatacaaacatcgatatatcagatcttttttagtttgtgttatagtgtgctcagtggggcggctgttgtacggatagatttgaaaggattctttgttatgattccaacgtttttgcaatcactagagaaaaccaatgagattgtaaaagaaaaacggaaacaaaacaaaacaaaagagaagaaagctagagaacaaaaaaatgatattcactagacatggtttcgacgaagaaactggaaaccagccatcaaacaaatacaacaaagatgatctgagcttagtcgagaaaaaaggatcctgaattgctcggatgataaaatcagacgtggttgggatttctctctaaaatgttctcatcatttaatttggccatttggatatgatttaaatcctaatttctagctttagtttcttgtttttttttttaaattaatcaagcacaataaaaaccttagacttagaaccctccattttttttccaacaattttgaaaactatataagttcattatttttatctctatatatatatataagcttaagaaaatgtacgtataattatgtttgttcaaatgttcatccagaatattttacgatgtcatattggttttgttttgttatcatgttgtgaagtaagtaatcattttttttattgtcatttccgttcttgtattaaaaattatatattgatgtggttgttaaaccgaaaaagaaggtgaatttggtagatcgcaatatttattgatgaaattaagaaaatatcaataatatgatttgggttcattacatagtttttttttttacatgtgtaaccccttctcacggccacggtgaaattttcataatatacacaaaaagggcaacaaataagaaattttcattacatagtatattccttaattttgtttttattctcatttagtttttactagaaacattaaaatgaacttatatttgtaacgtgctattttgttttctgaactatcaaatgaacgtctaacaaaatcaaactcaaaaacttataatttataactctaatttccatttaataaataatatacccactaaattaaaagttaaaagttaactagtaaaatcgactataattgcagaaaattagaaactgttttatcctttctttacattgtcggttttcaccgtccaatactccaatccatttttagtttactaactaaaatttttttattttaatttacttatcaagtttacccaagaataatattaagtcttaccaagtcaagacagggcagtacgtatgaagtgggacttgggatttaatgtcacatttaaagcttaaacgtcagtgtttactagaaactttgacaagttcttgattgcaacacaacaatgattgcgacaatattaatagatatatagttatattttccaccacatatctaattcttcatcttctcaactaaacaaatcagtcaccgggaaaaatataaagag

SEQ ID NO: 15052 - DNA, 3000 bp, Unknown
  misc_feature (1)..( 3000): cDNA_ID_3080366_gDNA_ID_2685554_Annot_ID_193346 3000 nt of promoter + ATG
cattctgtgacgctttagctgaagagagtgctagatttgtctcagttccaccagcacccgcatatttgaacaatgccctggatgtggaagtcaaccatggaaatatcaaccaaaatcatcaacaacgacagcttaatactacttcgtcacaattggaccaacctggttttaataccaatcgcaataacattgcctttttgggacaaaccttaccaaccaacgtttttgcgtcctcatcatctccatcacctcgtagtgcatccgactcccttcaaaatctatggcatttacaaggacaatcatctcaccaatggcttctcaacgaaaacaacaacaacaacaacaacattctccaaaggggaatctccaaaaatcaagaagaacatgagatgaagaatgtgattagtaatggttctttgttctcttcggaagcacgaaacaacactaataattataaccaaaacggtggacaaatagcatcaatgtcagccacggcattgctacaaaaggcagctcaaatgggatcaaagagatcatcatcaagctcaagcaatagcaagacttttggtctaatgacctctatcttcaacaacaaacaagcagagaatatcaaaactaaggaagttgatgaaagaggtttcacgagagactttcttggtgtgggaagtcaacaccgttcttggccgttattgatggtcaaccataatcttccagactcgtctcctccggcctccacggacggcacaccaaccgccgacatgaaccagtaatcttgtattgttcatgtatactataaggtaaattacattatgttatatgagttttgagaaatatcgagattcctctgtttatgatattctctaagtgcagagacgtgaagtatgagattcaagtgacgagaggatggtttaagcacggcgaagaaaacggtgaaatatgagacttttgactcaggagagaatctctgagtcaactcggtgttgcagatgggtccactcggttgatgaagatgggaagctattcgggtccacttctgcatgcatgacgaaacctctgaccatgcatgcacagcaaaacatacgctatgtcttttcttattcttcttattcttctttttctttttcttgtaattatttcatgttttaattttgaaagaccctaaaagaaactatgaaaagttcgtagtttgttactttttattttttcatcgtagaaaggttaaacttttttttgaaactttgatatctaaaatttttttttttttttttttaataaaatttaaaatttattcgaaaaacttttgtacaacaagtgcatcgtttgagtagaaagtttgtatttaaaacatagaaatcaaaagaatagagactaatgagctacgactctattatgatttatcttgaggagaaccatacgctcatgcatgcatcgtaggtgcgattcccttgctctcttattgatgagatgcggttttgaacttgcttgccaagatttcggactagatggactgatggtgtttcagcttcaccatgttttcgacaatttctttctttccaaattgagtaaatcgccaactgaaagacataccttattaagaagaggttgatttttccaatggttttgtctatgagtgtcttgtggacttcactccatcttgttgtgaattttgtgccaagaagagtacgacttagcccggaccacacctcctcagagttcttgcatctaaagaaaagatgatctcggtcttctaatggtgcttgacagagaacgcataatgggcactccagtccgccaacgtagcattctgtcacctgtggccaatctgttccttgttgcaagccatgagataaaagagtattttggggttgaatgggcgaaccatatacccttataccattctgttcgtggcttggcttctcggattgcgtcccaagtttctctcgtactaaaaaccggtttaaaccggtcgtctctccctttccagagtactacatcattttctccagcgactcttttttgtcgtgtttcctgcaacgcagtctcaatatcattcaaataaccaagtctgtgtcgccttcttcgatgacattcaaatgcatctgccaccgaggagtgaaggcttatccccatatctatgcatcctctatgtcccgcaatgtcaattagtttcccaagtagggaccaattgtcaaaccagaaagaggtgccaagtccattcttcactgttactctaacaaaaccagccgctgaatcacgatacttaagcaactttttccacatccaagatcccagtgtagtagtttcgcttattgaccagaaagaagccctcttgataagataaatgtgtatccatctcgcccaaagagagtttgatgatagtaacctccagattagtttatagcagctgaccttatttgcctcattgatcgatcgtaggcctaaacctccctgctctttaggtgtgcaaacatcttgccaggctacttttgcttttttttggctgagagcgggtcccgaccataagaaagcagagcagagttggtctatctgttttgtgcagataaaattacgagttgtgccaggccaattcgcatggctttttatgagtatgtccagcccaaagtctcttatgtatatatgtcctacttatataattaaaatattttttattcaaaaaaaaagagtgctcaaggatagacccaacatttgtgacataaaccactgcaccataagacttatcataattgatgcatagagcaccagtttgctgaattttatataagggtcaaacctgcttacgagcttttagtatattggaaactccgtaagggccaaacctgcttaagagcttaacaaaagtattccactggagacagtttttctatgggctcttaatatatttttttatgattaaaattcaaaaaaatagttgtaagatagcttctttttttttttttttttttttttttttttttttttacgggtactggattgagaatg

SEQ ID NO: 15053 - DNA, 3000 bp, Unknown
  misc_feature (1)..( 3000): cDNA_ID_2783365_gDNA_ID_2685554_Annot_ID_138128 3000 nt of promoter + ATG
ctttatataaagcaacaagagggtttaacaaagatggtcgtcttggaagaggaggttttggagaagtgtataaaggtactctgcctattctaggagatatagctgtgaagagactatcacacgatgcagagcaagggatgaaacagtttgtggctgaagttgtgacaatgggaagcttacaacacaagaatctggttcctcttctcgggtattgtaggcgaaaaggcgagttattgctggtctctaagtacatggaaggaggtagtgttgatcagtacttatttcacggtgataaaccgcctctttcttggtctcaaagagtatcaatattgagagatatcgcatctgcgctctgttacttgcatacaggagctagtcaagttgttttacaccgagatatcaaagcttctaatgtcatgttaaatggaaatctccaagggtttttaggagattttggaatggctaggtttgatgatcatgggtctaacctctctgcaactgcagctgtaggaaccataggctacatggcgctcgagctaacgtcaacaggaacttccactagaacagatgtgtatgcatttggtgcattcatgcttgaagtaacatgtgggagaagaccatttgatcctgcgatgccggttgagaaacgacatttggtcaagtgggtttgtgaatgctggagagaaggttctctagtcaatgctgtggatacaagactgagaggtaaatttgtacccggggaagttgaaatggttctgaagctagggttgctttgtacaagcattataccagaagcaagacctaacatggaacaagtggtccaatacataaacagacaccaaagattgcctgagttctctccaaatactcccgggatcggagtttcaactccggtgttaatgggtttaccttccttggcaattacttctagttcagtgacttcatcagtttcaggaccatcagcctctccttcctctgctaacaactcaatgttcatttctcacaccattatatatggtgatggaagatgacattggacaatgtgcttcacatttctttattaatgtttaaactttctatcagttctgttgtaaacaagtttttatttatgtaacactcaagatgtagcagaaatgtctaaatattttttttgtttatacatggtttttgtgtctgtgattaaaagagaataaggatcatgttgtaataacaaatcagggctcttatgaaaacagaaccaaagataacaatgaatattattgtctttagagtagtgcataatgaaagagagacaaataaaaagcaaagactatgactataaggatcaagtggatccatttgtgagcagtttagtcttatttcttccttcaatttccatgagcatgcctaaagaacctggagaggaaccctctcttttaccatcagcagcgccaatcacgatcctaatcgcaatctcttctgcatcactttccttcaaaacttgacaatttgaggaaggagaagatgtaacagaacaagtaccagctttagtgtgatcaacaacttttttggctattgttggtgactgaacaatccacatgaggttgtaacctttggtcttatgcagaagtattacggtcgtggagatgagaagttggatgatccaaggtaaggtaatgagtactgttccggaaatggcaaagaagtggatgaaaccggacttgtggccattggtggttgcgagacggaagaagaggattccgataatagttgtccaaagagagtggaataggattgaccagaaagagatgccacgagaaccagaggttctactctccatctccattttttgtttttagtctaacgttgagagagatgtgagatcatatgaagttaaaggttaagagaggtatgtattgttggagagatcaatggtgattttgattttgttagttatctagtggatttgtttttttctttgttcatttgactaggcgattttcttgtagtaattaaactattttttttttctaacaaagttattttcgtaaaaataaattttactttaaattttgaaattagaaaacatccatttgatgtttaaaaaaaaaaaaaaagaagagtttccatttaaattgtttcggaaattcttaaaatttgtttaaatcttctcagtgtgtatttagaaatagggttgtctgcccagttcccctgttatatagtgtttcaactaggtttactctatacttttattctctatccttttcactctatacaatttattttcttgtgtgaatggcaattgtcgaagccatataaattttaaattagaaggttattacttgttatgcatattatgtttgttatatggattcctattataagtccaatagaatattttataaaaatttatattacttgtttcgcaagctaaaaatcctaactttgtatctcaatgtataatgcttgtttgggttaactgatcgggtttattatgattgtttactatttgtcattcgttttgaatacatttgttgaatacacaaaattcctatcttttattgatttattatttatttgattcacatatcaatgtttagcacgttttgaacaagcaaagaaataacagcaaaagctggtcaagagggctttgggctctatcattcacctaaaatctctcacacaaaagatttgacaacatataaaattcatggtctccactgaacatgtacctcactattaaatgatccaaaaaataacagaaatatttggtaaaattattttttattagcccttattttaatttatcttgtcacagattcctatttccaacacgataaagtaataactaaacaatgttccgttataaatgtcaacgtcacaatacacgtcagtaatccaattattaaagccaaaagtttaaccaataaaagctcaccacgtgtaaactggcatcttcttcttcttctacttcttgacttcgaagcttttgttagagtaaagaaccagagagaagccatg

SEQ ID NO: 15054 - DNA, 3000 bp, Unknown
  misc_feature (1)..( 3000): cDNA_ID_3080363_gDNA_ID_2685554_Annot_ID_193347 3000 nt of promoter + ATG
tctagaaggatcacatcccgtcttcggcagcaactgaagatacaggggagcatgataagaagccaaacaagggagatgtgtcaccgtagcctcctgccatttcagcctaaagtgagcacaacatagaatccgatccaatcttttagcaatgtaaaactgttgggatttccctctcttccatgtgaatcgatttcctttaaatcccatatctatcagggacaactcgtttatccaatctccaaatgctacagaatccggggacaaacaaccattaccgcccgttctttcatcaagtcggactattgtgttgaaatctccacctatcaccactggtccatctattcccctgattacttcacgaagcttctcccacaaaccactccttcggctaaccgtaggagcagcgtacacaactatcaaattaagtatctcgaactcattctctatacgcgcatagacgaactgctctgaagactccttaatctcaactttcccaatttccgacctccatagtacccaaatgccacccctctggccaactgcgtcgattctgaaactattttcaaaccccaaaccatgacaaatccgatctgctctcgcccctcctgcgtgcgtctcaaacaccgccaacaaatctgtcttgtatttcttcaaaagataacaaactgatcttcgaaagttaggtttattcgccccccggcaattccacataatgcaattcatcattaataatcgataaagaaaaagaataaccggggcaacccgtcacagaagagtgagctccgtcgataacgctggcgcggccccctgagtccctcccgccacaaccactacattatcctccaaactcggcctaatctcctccgccacttccatgccgaccaaatcgggtttctcatgtccaggttctccgtcaactccattgaagaatgaccctcctggtcgacccagacttatctcttctatcctcacacgtttaccgttggccgaaagctcattactctcatgggctttatgactccaggcccgcctatcccgtagcccttctctaattactcctttcccttttccctccgttgtagcgacaaatttggtaaccttaacttgctccccactcctatcttggaccactgaattcatgggatattcattctccttattatccgtaacaccaataatttctttccttctcccctctgtttccacatcctctcccaacttaccaaatgagttcgacgtcacaaccaactcatttccttttttcctcacatgatcccttgatttgcgattcacattaactctagccccaccttgtgcattcacattccggttaacctgagccaccgtcttcctttgtcttaccggggtgaatccatccccatcatgtgtaggaacaaccggattctgaacatttttggtcacttccacactcatgctctcctcccctattccatgcgagacccccctaggacacttatgaacaaggtgcccatacataccacactgtgagcagatgttcgctaacccctcgtatgagacatagaatctctccccgttaaccaccactgttcctttaagaggtttctgcagatttacttctacacaaatcctggcaaaacgtcccctttcaaaactgagtgtgtttaagtccaccttaataggtttccccaagctattagcaatccctagtaggatgtacttatgatacagattccatggaaagtttgaaatccgcacccacaccggcgtcgtaacaatctcatcccgcaagggatcaaaatcaggcgaccaagcttgtgcgatgagatagttcccaaacgccttccacgggcccccagtaagcgctgccagatactcctcttccatctcaaaacgaatcatgaaaaattgtcgtggaagatccatgacgtacattgcaccgcaaggcttccacaattctcttaactttcgattcaacaccggcaacgaaatatgacgacccaacactttcactaccatacaccttttccacagaccattcatcgcatccaccacttcttgaccaatcgtaatgaccggctcaccatcctcaccattaggaaactccacccgtagtctctctgcaacaaactcctctgagatgacttcttctgggatcgggactcctcccacactagtccccttaactttctgcacccatactcccggatcatctggtggtgctcccggtggacgagacttcacaccaatatccaccatggtagcatcccgctcccctgcgctcgaaaccctagactcgcccattctcaatccagtacccgtaaaaaaaaaaaaaaaaaaaaaaaaaaaaaaaaaaagaagctatcttacaactatttttttgaattttaatcataaaaaaatatattaagagcccatagaaaaactgtctccagtggaatacttttgttaagctcttaagcaggtttggcccttacggagtttccaatatactaaaagctcgtaagcaggtttgacccttatataaaattcagcaaactggtgctctatgcatcaattatgataagtcttatggtgcagtggtttatgtcacaaatgttgggtctatccttgagcactctttttttttgaataaaaaatattttaattatataagtaggacatatatacataagagactttgggctggacatactcataaaaagccatgcgaattggcctggcacaactcgtaattttatctgcacaaaacagatagaccaactctgctctgctttcttatggtcgggacccgctctcagccaaaaaaaagcaaaagtagcctggcaagatgtttgcacacctaaagagcagggaggtttaggcctacgatcgatcaatgaggcaaataaggtcagctgctataaactaatctggaggttactatcatcaaactctctttgggcgagatggatacacatttatcttatcaagagggcttctttctggtcaataagcgaaactactacactgggatcttgg

SEQ ID NO: 15055 - DNA, 3000 bp, Unknown; identical to SEQ ID NO: 15051
  misc_feature (1)..( 3000): cDNA_ID_3080351_gDNA_ID_2685554_Annot_ID_193351 3000 nt of promoter + ATG

SEQ ID NO: 15056 - DNA, 3000 bp, Unknown
  misc_feature (1)..( 3000): cDNA_ID_2783413_gDNA_ID_2685557_Annot_ID_138141 3000 nt of promoter + ATG
acctaaattgacatacctttacttgaatctctttcctctagcatcgtgcccctaaaactgtcatattttttgctcaaattataatgtctcttcctcatacgtaatgtacaagttaacttgtatttttccattttagtttttagggtctgacggataacacaaaaacgatataaactgtttagcggcaaacgataaaaaatagttaaaaacgttacaaagtagtggtgtaaaaagccgaaaatatcgattttaataatgcttttatgattggtaattatcaaaacattatacttcacattccatcgatacagtgttatatcaaactgtaaaccctgtttttttcgcgactccgtttcaagcttatttcttttcttgatatttaattttagttcttaaaacaacaacactacatataaatacctagataggagagaacttaataaattagatttttaattaagagttgacccatgatgaaggtttgatttttatttttgctagcagtgtgaaattagtctcttaggtgtgaaattatatgtatgaagtcatcaactttgatgttgagactttaattttgttcaccacttcaatgcaattgcttctccttttcctttttgttttattcttagaagaaaattgacgcaaaatagtggtggagctagacattaaaatttcacttcaagacaaacaacggtgaaaaatcttccatgcaacaaccttttttgttgttgttaaagaccatggaacgctctttctaggatcaacgttctcgatcaatatagagagtcagcggtttgtgtcaatatattcaattcttaagatccttgctcgtcgatgttactggccagttggatttttttcatttaatataaggattttccggaaaaaaaaaaagctttcaaatcgtcatattttacaattctacctttcatctctaataatatatcaatcacaatgtaaaaaataaatacacaatataacttttataggtcatttataagatggacttgaactcctcgttacaaaacttcattttgatctattatttttatcaaaattttaagaaaagaatgacaacagacttaattgtgtattattttatattttatgtgatttatcttcatttcagaagatataataaaattgcaaaatggcgatttggagggcttcaattttacttcacatgtttgtttacataaaaacaatgttgtagtaactagacacaaatatgaaatccgaagacaaccttgttatgaagttcttgtgaataggaataattgtattagtatattaaaaaaaatattcaatattattgtgtgcaaaaattacaggactcacttagttttgccatcgtggtgtggtttcgtaagcacatagtatcatatgctaaacaaaaatcgtggataaattgacggtgttatgtgtggtgtaattgtttgaatgcagaattgcgtatgcatgatcataatgttaacttcaaaatttgctcgtcatagatgccccctgacctcttaaatattttgttttttatgcactgtcacaaaattctagatgggcaatcatgtcaaaattcggttttgaatttagattataacgtgttttcagaattttagtgcctagaatgttcatcacccatttttcgttttaaacttataaaagaaaagacttttgtgatcgttcaatataatcgtcgacaagaaagaaaacaataataataataataattttctatataaggtacacttgctacattgatatatatacttgtctaatattcatatcttttggttcattcttcatcttctaccttgtctcacatattgttaaggtaaaaaaagttcgtcctcgtcttcatatctaaatccttaagctttaattcttagataactaggctagctggcaagaaagaaaaaataacttcgatgacaagtttatgctattctccaaagtgtcaagcttttttggcaacatctatttttaaaataaactttcatttctataatgagtagttatttacaaagtggggaaaacaaggaacaagaattgataaaatatgtaaaacagagatcttgttttgattctttgttaaggaggacaaacttgaaaccatatttatttgcagtatcccttttaatattatttctagaaaaatatcaaacgataagtatttcaataattaaattagcaaaaaatttacatatatttaaatgacctgcatgacattgttttctgactgttttgttcgcggttacaatagaagtaataattttaaatacgtttttaggaaaattttacatctactgactactagaagaatatgaactttattagcatactactttccatatagaaaatgtattatttagtatttttctttcttattttatatcatctttataaattaaaattttattagatgtaaatatctattttaatatatatatatatatattaaagcctcttttgaaaataaaaagtattcaactattttgtttgtttttgtaaaacattatcgtaaatacaattgttaaacgatgtatttgatatatatatatatatatatgtacatacatgatatataaaatgatggaatactatttttgaagagaaacaaaatgccaatagataagtgtggaccaagatgaccacgttctgttaactttagtgctaatacatacaaaagagtatactacaaattgaatttagaaaatatatagtaaatgtttaaatgcaagaaacaatgattaaaaatttagaatgacatcttaatcctgcataataacattaattaaatctaacttcaattgatttttcttttctgttttacgatttcattttgatttattgtttatgcttttacaatagtagatatgaatttaaatttttatatataaattatgcaaagacacattatatttcctcatgtgctttctagaaagtgttagccaacttttcattaatagttatgcatctaacaaaggatgcatgaattttgtgaag

SEQ ID NO: 15057 - DNA, 3000 bp, Unknown
  misc_feature (1)..( 3000): cDNA_ID_2783420_gDNA_ID_2685557_Annot_ID_138143 3000 nt of promoter + ATG
tgcctgtcattgcaagctgatgcacatgcatgcttgattacttattgtctgatcacatatttcagttatgtaaaacataaatattctcacctaaatttctttctagctgtaacttgatcgttttgtcatttgaaagccactttgatccacaagagttcaaagagagatacacattttggtttattgttcgatcagtttagatgaacaattaaaggatcgataggggtatattgcaataattataattcaattaaatcggctctacttatatatatatatatatatatcaaaacttcgaaactacaagtgtcatttcaaaatattggtagagttcgggtgcagtttaaatgggcttacattggtaaacttggaagaatatatgcaaaacattagttgttatggaattcaaatttggcacgtttgataattaattaagggttttccacaagagaatgataaaaaaaccattacaatatctttataccaatctggcataaagataggcaagcgataaactctcctttctatcgatgttagagcataatattatcttggtttataatggaaaaaggtcttcataaatatgtgggtaagtgggttcaaagacttccatctcaatttggagaaatcaatggatccccgatgattagacacggtcgacacaaagacgggaacacatatatccccccgagtcttttagcatatcatatgatttttgatcaattggcaaaagaatagaatattaacatgttataaaacaatttctcactcagcagaaatcttgctgattcgtggaattctgattattaaagtttataaagtagataaaattagttacacgtttaagaaaataaataaattctatagtcaaatcaggttactgtgtagcacacaacatacactaattttatgataactgacatcaggttgcgttagcggtaaatttaagactataatcttgaagaatagattgtgatacacaatttatgatatgtggaatgggggaacaaatcattaaccatgccttatgtgcatgcttaccatcactacaaaacgtaccccgtggcaaatccgagcttggtaactttctccgcggactattgtcgagaactgaatatatttgaacgttattttcatgttactttttaacgattagtctcgctctattttggggctactatatatgaaaccaatcatatcaaagtatatcgttggtaacttagtgacgatttaacataacttaaatatatatactttgatatgatttactttgatatatgaaacatcaaaatatactttctgagataagatagcccagaaaggtgttagaacactctgggaggtaactcggatcatgagagggatcataatgagtaagatagagaacgtacaaaaaggactacgagaggtctcacacatccttttattttcaggtgtagagtcgagagtgttgagtttgttaggtcttggagaccaacaacttggtcatttcttggtccacaagcaaccaagctctcctcctcaacttcttgatatttagagtaccgaactagagggtcgggtcatcctataggtgtaagggctataattgtgaaccgtgtgctactggttgtggtgatgggactgaacatcgatggttgacatgcttcgccaagatggaacgtcatattttggtggagtaacatgcgaaatttgtggctggcacaattgttgggtacagaatgcctttttggtcttgctttgtctcaggttgcgcctaagttgatagctggcccggttcaaaacatcatcctcttgtctcccgggattctattctatgggaacttacaccgtccaattcatgatgaagatgattccagatgactctcttgaatcgtttcatatgtggcaaagacacatgtcggtttcttatatggtaacggaaaatcacccaaaacaaaatattagtataatactaatattagttttcagtgtcatttcttaacggaaaataaaataaaatcattcttgcattaccatccacatgtttttgtttactcatgaatttttgaactttatctctctaaattattaaataatattcataaaacaataggattttagtttaaaagacttaagtttacaatttcttgaaaaggtattagttcacaaattcactctaatttaagactattctactatttgttttttggttttatttattctactaatttttccttgatgttttgcagggacgttgtagagttgacatttaacttagactaatcaaatgatataatataatttttacaaaacaaaaaaaaggttctcgcgttacttcttcagccgcaggacaaggtagctagcacgattaatcaaaaaagatagctagctcaaatacaaatgtacttgaaaccaaactcgtcctgtcctttcttattcgtttaccgtttccgttgtcttatattatataataacaagcaaattacactattacaatatcataacaaactcaaatggctaagaaataaaataaatgtagtttccactgaaatctactaaatatcaatttgcgtttgttgcacatattatttggcaagccatctcctatttaaacttatataagatcatgtattatcttgtccatttattctcagttttgtccttctgtttgtgggctcaacttgatctgtttggtaagaaaaatatgagtttccgttgtgtgctacttatagttttcaatatatctttccattagttgtatgtcttctctcttaaacaatcttcaacttgatctcttgtaatgaacggaagttttctcaactgtctccgtatgtcaaaaggataattagctgtaagtatggattattagctccaaccaaggctcaaaattttcacgatttctaaacacaattacaagcatcaccaaaacttgtgatatgaaatagctctactcttctatattttgtagggaattaaaatattttactaatacaaaatttgttttttctttttcagatg

SEQ ID NO: 15058 - DNA, 3000 bp, Unknown
  misc_feature (1)..( 3000): cDNA_ID_2783434_gDNA_ID_2685557_Annot_ID_138147 3000 nt of promoter + ATG
caaattttaggtacttctgaataaccgatgctacatatagttgaaaaaaactaactccatattggctatggttgttgatacaggtctgttcgatctgtctgtgtccgctgaatatctcagtcaggaaatcatcaattgccttgttcttgcggaagatggactacatgctgtggtgttagttctgtcggtgaggactcggatttcgcaagaagaagaagccacacttaataccttacaagttatttttgggagtcaaatcattgactatttagtagtattattcactggtggtgatgagttggaagcaaacaatatgacattggatgattacttgtccaaaggttgccctgaatttctgaaggtcttatatatccctttgatttaatcttaagaacttggatagtgccaatagaggttcaacatcacttatatgtttttttttaataaaaatattggattgtgcaattttagacagttcttagattgtgtgggggcagaaggatcctctttgataacaggacaacggacgaaggcaagaaggtcaaacaagttcaggaacttctcgcccatgttgcagccattgaaaagagcactagtgggattccgtttacggacgaaatgcaccgtaaaatacaggtggatatgcttaccatctacatccatttttagtgtgctttgcgatagctagaataattgttatatgattaaatctacggggtctcagaaagaggcggagacgcttagggagcagcaaaaagaggtcgaatctaaggaccttgcagctgccgagattgaaaaatggaagaagcattatcaaacagagcatgacaaaaatatgaacatgatggcagagatggtaattatcttattcccccctaatctttgtatattggcaacaattgtttaatttaatccaaggagacgttagtgtcatgaagtttgaaactctcctataaagtatatttctaactaatcggttcttgtttctctatcagctagggaataggctaagagaggattccgaaagacaggagaaaatgttgcttgcgctgagagataaccttgagatttcacaaagacaaaacaaattgaacgaacttactgataatgagcctgatctcatacattgtggggtttcacttaggcggatgccatgcaacatgttatgattggtgtatccatttcaggtgaggataagctaaccaaagatttaagcagacacggttcacatcatcatttcgtccaaaaggcctggtcgttatttctttcctctttcgtttgatttacgtttgcttcgtggtttctttatttaataataaaaagaataagaatatgtatcattgttgtatgttgtaatctttgagtttcttaaactctcatctttgtactcgttcttctttggttgaatgaaaacaaggtttgacaaaaaaaaaaaaaaaaaaagaatatgtatcattgttgtattaatataaaactttcatggtgcatggcaagcggaacttgatagaaaccttgtctcgttgattctgggaatagccgagagaagggtttgtcacttgctcgtttattcttaagaatggccgaacaatagacgaacttgaagatcattgattcacagtgaatggccgattatcaagagaaagaagaaaagcttaaagctctgaatattattcaataaaaggttgagttctgcaactacaaaagagcctttatatagaggcaacaagaagaaaaaaaatcctaacacgtttgggaaaaaacaccgactaagacatagcttaaagcccaaataagtaaaaggagagaaataaaagaaagcccaaaaagaaaattaaaaacagagcataagtataaggatgcgctgcatcagtgcataagttttataacgagatgttaagagcatcctcattggtgacctttttagagatgtctttactatactttattataaaaattaatattattttaatttgagtcatttattagtcaagtgttttttttttgtgcaatgaggatggtcttatagtgattgagtagtgatttcttctactaaaattgtaagcaaattgaacccaaaaaaatccgacctaaaactaggtcattttatttgctaaaacgttagacgatttaacccgcaaaagggtcaaccataaaaacattaaaagactcgatttttattatttgatcactctgaatatattaacaatttcatatgaaaatattaataaaggaataaaaaatttgatgaaaatgttagtaaataaatatcataaaaacaaagaaaacaaattctttcatatgatcatattggagaaggattaatcatagaaaaaaaagagacatatatatatatatatatatatatatatatataattatatttaatcaactacattcattacaaaaacatcaaaaactattatatttcttttaccgttgatgtatgtaatcaaaaacctcaaaaacattttatagatatgctcttctccgccgatatatgtaattttatttctttttaatatatagtagatgccaaaaattatcaaactttaagaactttgatatgcgggtagtcgtaataatatagtttaatttgagttgaaactcgaaaactattatatattcccaaaagacttcgtcagttaattaagaatggaaaagaaaagaaacaagaaaaaaaaaactcaagtggaacacgaaaagatggtaaaatttaaacttaattcttaaaaatttcaaaatgacttagcattcaagagaagatcgcacgacgagaaaacgtgttgcacaggtgatcttcgtcaatcattttgagtttgtcttttgtcattttttgatatttgaagaaagtttcttctcaattatttgagcttccccgggtaaatatgtatgaataattttgctcagagttgttccctttcttgatcaaggcttttatgttgacctaacaatctgttatctaatatttacatgtaatttgtttgtcaaagcagctaaaat

SEQ ID NO: 15059 - DNA, 3000 bp, Unknown
  misc_feature (1)..( 3000): cDNA_ID_2783436_gDNA_ID_2685557_Annot_ID_138148 3000 nt of promoter + ATG
catgctaatatatcccttatgaggatttgtgatgcgggatggtagggctagaagtatgttttgaaacatgtgggtaaaatggattattttcactgagtaaaattatttaattatgtcgtcatggatgcatgtttcttttctcaggagtaatagtacacaaaagcactgcttattggtaaggtttccgagaggcacacatggcatgccttgtgcacaaagtcagcgaatcgggtgtcacaaaacaaaccaaattgataagattcaattgtctttagttgcttcatctctctattctcatcaatccttgtcaaaatagggaacacgcctttggtggcaatgagctacattagctattgtagttaagatgttgaatgatatatttgatacaaatgaaactacaaactatatatatatatatatatatatatatatatatatattagaaaattgtctacgcaatacgtagattatatattcggttttggttttgaatatagaataacttatacattaaattatatataaatttatctataatgttaatatatcgcttgaaaataattgaaaatattaattttgatgtttacaaattatgatgggtttaaaaagacactttagttaattagatgttttcaatgcactcaatttttatttttggtgaaaacggtatgttttattataaaaaaaaacttaaaatattcagtgtttttatttttgatgaaaattgaaatgcatgtattaccaattattttgaaagtctaaacaatagataaaacttcttcatatttaaaaatttaaagcatgtgatttaagatgattttcaatggaaaaccctccaacttgactaacgatctcagaatgtcggttcaaaaaaaaaaataagtcatataaaatctgataaatgtacagaacaacgtcaaattatatatataacttagcattaattgttaatatatggctcgaaaataattaaaatataaactttgatctttataaattatgatgtgttttaaaaagacattttagttgattaaaagttttcaatgcactattttttttttttttttgtgaaaacggtatgttttactgtaaaggaaacttaaaatattcagtctgttttttctttttctattttttgttgaaatggaaacacatgtattaccaattgtcttgaaattcaaaacaatagatgaaccttcttcacatttaaaaatttaaaagcctatgatttaagataaaaatcaatggaaaaacctccaaactgactaaagatctcagaatgtcagttcaagggaaaaataagtcatataaaatctgataaatatattcaaagacgtcatgtcactacccaatgtttactcaatgaacaatactttatgtaaatgtaagataaattaaagtaaataaaatattctctttaagaacttaaaataacaaaaagaattgatattatatatccatataatgcataacaaaattaggagtttaaagttaacatatcatattattgagttttttccttaaatttgatttgtatataatgtaaaaaaaattaagagcaaataaaacagttgtcacctcaaaagtcttttttaacggattttccctcaaaagtcatgttaacaaaattaatacataacatgtataataatactttagatacataattttgagttatacaaataaaattctttttcgttatggttatttgcctccaacagtttaagattaatgttataaaaaaatttattagatatttacatgaatccattacacatgagtttcaatatgggttaactggaaatatatattcttgtttttcattataataaatgaaatgtcaaacaacttttattattagaactccaaacagataagccaatgaaataaaattaaaaaacaaattgaaacttgtttgatttatttttgacttcaaatgatggaaaaagtagagatatatgtctcgaagttaaatattataagcttttataaattgaaaccttaattttttatataagcaatttaagattatgtaagcaattttttatataagcaatttaaactaatctcaaacatttactaaaatgtgtgtctaatgctccgactggtaacacgaattatcaaaattgagttgcagtatatgtttaaatttgatataacttgcagtaaaaattatgtggtataactgcagattgatgtagtgaatttgctgtagaaatatgagttaataccagtaaagaaatcagtcaaaactttagttaggaatgatgaatagcaaactcatcatcgctctggtattcatggtcttcgatcctcatgtaatccaaaaggtatcctacagcatagtgccggttttatcctaataataagaaagttttcttggcctaaaaatcgtctttcttgtgttgattttttttttgagataaacaacattttattttgatatgccatttgagtttctttatgtgtattgtgctatagttaattaatttgtgtgaaactagcaaagtcaaccctaaaaagtcgtctcattcagaaacatgtcttgggcttctggttcgtttaccgtgtccagttcaacataaattatacagaataatattctatggaaattaacaaactaaacacataaacaaacgcaaatggcatataaaacaatattgtttatcttaaacaaaaaatcaaaacataatgttgggcaggtaatcgtccatttagtcttgaattgtttggtttcgattcttcttacaaaaaaaaaaactttgtcaattcgttttgtttcttcactcacaaaacgataagagagcttgcaagtttccatttggtacgatactatttcacatttttgttcgtcatttttgtttggagtatataatttgtcaacaacaaaactgttctttattgtcggtttttaaaagctatgtatcatttcatgaattgtttctttggtcaacatgggtacgtccaggaatttagcaaataattgctggtgatcaaaac

SEQ ID NO: 15060 - DNA, 3000 bp, Unknown
  misc_feature (1)..( 3000): cDNA_ID_3080397_gDNA_ID_2685557_Annot_ID_138149 3000 nt of promoter + ATG
atgccatttgagtttctttatgtgtattgtgctatagttaattaatttgtgtgaaactagcaaagtcaaccctaaaaagtcgtctcattcagaaacatgtcttgggcttctggttcgtttaccgtgtccagttcaacataaattatacagaataatattctatggaaattaacaaactaaacacataaacaaacgcaaatggcatataaaacaatattgtttatcttaaacaaaaaatcaaaacataatgttgggcaggtaatcgtccatttagtcttgaattgtttggtttcgattcttcttacaaaaaaaaaaactttgtcaattcgttttgtttcttcactcacaaaacgataagagagcttgcaagtttccatttggtacgatactatttcacatttttgttcgtcatttttgtttggagtatataatttgtcaacaacaaaactgttctttattgtcggtttttaaaagctatgtatcatttcatgaattgtttctttggtcaacatgggtacgtccaggaatttagcaaataattgctggtgatcaaaacatgggtacgtccgtgtctaagccggtttctgatgataagaaaaaaggtacgtcagtgtctaagccggttaaaaacattgttctagtggggcgttctgtcaatggaatatgcaccactgggaacaatatcctcggtcaaaacaagttcggctccgaaggtgctttcatgcactgtcagatgtatagtaccacgacaccagatggtcaaatgatcaatgtaattaaaactcctggtatgtgctcaattaaaacttgagatttagcctaaccactcataatcttccattgtatcttttcttacccacttcccaaataactcaacaaaatcattaataggaaataaacataaatggatatccttaacaatattcataatatagttaattctaagagtttccttactgaattggccaaggttaaattgatcaaagtcttgatttattattgtatgtacgtgatacaggtatgttcgatttgtctgtgtccgaagactacataagtaaagaaataatcaattgcttaactttagcagaagaaggcgtgcatgctgtgttgtttgttctatctatgaagaatcggatcacacaagaggaagagtatgcacttaataccctacaacgtatatttgggagtaaaatccttgaatatttgatatttttgctcattgacggggaaaagtttgaggcgaaggagttcgaagattattttcccgaatgttgtcctgaatttcttatggtctgatttctttcaaaatgaaaagaattccttgcccacacacatcatttcttctttttgatttttgttttccttttttattctgtcttgagtaaaaatttttttggaatttcagagagttctcaggttctgcaatggccgaaaggtcttgtttaataacatgactaatgatgaaggcgtcaaggctgaacaagtcaatcaggttatggcccatgttgcagcaattagcaagaaaaatgatgaaaaaccatatactgaagatatgtatcgtaatataaaggtaaacacatttttctctctaattgcattcatttaaaattcatagttattgatacaatactatgacctttttaaagagagatagaggaattaaaaaaatatatatatacacttagtctagttcatgagcaagaaaagatgatgtagaattagctaatggagaatagggagaaagctagagaaaagcaagatcattagagatccctagtggtggttaccatgactgcctcaaccaccatggtcaattgtccattgcatctcttcttttttgatattttgaccagttgtttctctctctctctcaagaaacgctgagcatatttggtatgttgaaatagctttatttctctcgggttctaatgtatcaatagattagttttgtaaagtagttatatacttttactataatacatatataccattacttatttatccatattttgtttttgctgttattgtttaacaattcggttaagcaaataatttgtttgaaatcatatgtgttataacagagtgtagcaacaaatggagaagagtttcattcgctagacgacacatttcagcatgatccatatttgtctccattccccatatcaggtacacaattcaagtgcaacaatgttttattgtcaatagtaacatatgtgatgccgggtttgaatttgattatcaatactttgaagcttaagccatctccattggtgagatactttgaaagtttctaaaaaaaaaatataataatattttattatgatttagtttctgtccaattataaacacacacatacacacatagtctctcaatcattactctaaagtttctctgcagagaaactattctcattctctctcctatctctctcctactttattattattttatattttttagttaatgagaaactatgtgagaaactactgatggagatgctttaatatcacatacgatttggaaatatgtcataatctaaatatttttgggtctgcgacggtggattgttatctaccccaaaactaagatattcaagtctgctaatcgtttagtctactatgtctccaagatccgttaaagccatagaaatatgagaaagtcaaataagaaaccaaataaaattcttacaacatctttcacattaaaataaaatgactaacacacctacgcataatcttaggcccgagcaagcaatctaatagtaaaactctaattacttggtcaattattttgtcatttattctaattcttctttttctttttctttacttagaaagatcaaggaaactcgtgagtttgagtttgcctttcgtatacactgctaattaacattttcattctcattttcaatactgtcagagccagttaaaaacatagttctagtagggcgtactggaaatggaaaaagcgcaacagggaacaccatcctaggtcagaaa

SEQ ID NO: 15061 - DNA, 3000 bp, Unknown; identical to SEQ ID NO: 9082
  misc_feature (1)..( 3000): cDNA_ID_2180117_gDNA_ID_2685557_Annot_ID_193384 3000 nt of promoter + ATG

SEQ ID NO: 15062 - DNA, 3000 bp, Unknown; identical to SEQ ID NO: 15059
  misc_feature (1)..( 3000): cDNA_ID_3080397_gDNA_ID_2685557_Annot_ID_193381 3000 nt of promoter + ATG

SEQ ID NO: 15063 - DNA, 3000 bp, Unknown; identical to SEQ ID NO: 15058
  misc_feature (1)..( 3000): cDNA_ID_2783434_gDNA_ID_2685557_Annot_ID_193380 3000 nt of promoter + ATG

SEQ ID NO: 15064 - DNA, 3000 bp, Unknown; identical to SEQ ID NO: 15057
  misc_feature (1)..( 3000): cDNA_ID_2783420_gDNA_ID_2685557_Annot_ID_193375 3000 nt of promoter + ATG

SEQ ID NO: 15065 - DNA, 3000 bp, Unknown
  misc_feature (1)..( 3000): cDNA_ID_2783413_gDNA_ID_2685557_Annot_ID_193373 3000 nt of promoter + ATG
tgtcagttttgaagaaaacaaaagtcacataaaatatgataagtgtactaaaaaaacaaactatatataaaatttatctataattattaatagaaaactcgaaagtaattaaaaatattaattttgatgtttacaaattgtgatgtctttaaaaaagataatttagtttttaagagttttcaatgcactatagtttattttccgttttttcgtgaaaaatgtatgtttttttttttttaacttaaaatattattttttgtgaaaatgcaaatacatgtattaccaattgtcttgaaagtcgaaataataaataaaccttcttcacatatgaaaatttaaagcatatgatttaagatgtctctcaatgaaaaattctcttacttgactaaagatctcagaatatcggttcaaagggaaaattaaatcatataaaatttgataaatatagtgaaagacgtcatgtcactacccaatttccaaatgatcaacaatactttaagtaaatgtaagttaaattagaataaattaaatattctttttaagaacttaaacaacaaaaataaattgatatttgatattacataaaaaatttgtcaccttgaagatttttttttactggatttttcctcaaaagttatattaaaacaattaatacgcagcatgtttaataaaacatttgattcatgattttgaattatacaaattaaaatttttcattatggtaatttgctttcaacagtttaagattactgttaaacttttttttatttatcttttattagatatttccatgaatccattacacatgagtttcaatataggttgaatagaaataaatatttttattttttattataataaatgaaatgtcaaacaattgttattattagatttccaaacagataagacggtgaaataaaattctaattgtttttgttttattatttagcataaatatagttttatttatgtttaacttcaaatgatgggaaaaagtagggaaaatatgtctctaagttaaatgttataagcttttataaattgaaaccataatgtttttatataattaatttaatattatataacaattgttattatttatatgtgatgtaatggcaacaataaatgaaaccaaaaacttaggaatcatatatataaaagtaaagtttcactctttccttaatggtccacttggcaatataagtttttttaaaatttatataaataataaataacttatttaacacacagtttaatataaaactgaaatcaaaaaaatatgtatcaactatatttttccactctactttattcaacacacaattaattaaaaattaactaccacaatttatttacaaacctgaaatcataaatatatataaattaattatatttctccacaccattttattcaacacaaaataaattaaaaattaactcccacaatttatttttaaattgtaacttccatcacttctcatcctataaatatatacattctctcattctctcatttcttcatccccttccaccgtatcttaaatattgttttgtttagttttaagtttttttcttgttgttgttatgagtttaaaaaatattattgtaaacacttaattctaaattttaattttagattatgaaccttacactgttattcttttttgtttaaatacatctcgataatcaatttttcattaccatcttataaataatcattctctcatcattttgcactatattcatgtatatatatcttatgttgttatatgggtaaaacacaataaatttaaaagatagaagttgtccttggggtttaaaaaaaaaaacttttatattaaaattcatatgattttataagaaaacaaattagtttgtcacttacaaaataaaatgaattggaactattatgtatgagtttatatcaacaaattattttgtaatttactttatcatacatttattttgtaaaaataagatatgatatgtttattaatatatacatgcataaataacatagaaaaagaaaaactgttaaaatatgagcaaaagtaagatatcaaattttaacatatttttaattttttaatcatataatattgatacaaaattattttaattaattaaggttttaaaaaaaaaaaactaaagatggaaaattttcttataaaattggaggataatttatagtagtgaactattaatgtgcagtcttattggttcctaatttacaaggaattttgatgacttcaattaaatccttgaaaataaagaaatgaaagattttaaacgattgttagagagttttttataatcttgttgattagtttttcataatcttgtaaagtttctcaaacaatctctttattttgataatactttccatgacttttcatgacttcattttgtgaagaaaaatgtaggaaatcataaccaataacacaataatttaaatcattaacaatcattaacaatcaaagatttttttgttttaattgaataacacaaaacttttaatgactttataaaagtatgaatctaataacccaaaatttatgaagagtttagattactttttacaaatcttaaatgaataacacaaaaatttaacatacttttaaaaaatcttgattgaataacaacagattttacatgacaatttaaatcactaaaactcttttgaaatcatacacgaataacaccccctaaaacataatatcatgtcaaaattttaaagatttgattttgtaattagttaagggagttgcaattatgctagaagaaaattcatttcaaaattgtagtttaatatgaagtaatttcaaagtttaatgactatttttctaaatatttaatatatctattaataaattattttagtcaaactacaattaatgataagtacatgtgtcatcaaagtatagtgccaaatgtcgcattagtaggcaaagttaggaaaaaccttctcttattatataagattttgaattacaggaagtg

SEQ ID NO: 15066 - DNA, 3000 bp, Unknown
  misc_feature (1)..( 3000): cDNA_ID_2783451_gDNA_ID_2685557_Annot_ID_138153 3000 nt of promoter + ATG
gaaaagctcaaagcgtttaagatattgaaagctttggtgaaagttattggatgatatatatagaacctctggttcgatagattcaaattcattcactatgttatctattttatttctcaagtgtatgtctagtgtctttatattgtaattcatgttaaatatatcttgactcaatttcaatagatgtaatagaaacaacctatgtaaagatttaaatattgaaaatccttggtttttcaggaagagaatgataagctgcgggaacaagaaagtaatatagatgctaagaaacttgcagaagaagactcagcaatgatgaagcagaaattacgagtggatcatgatcaaaccatgaacatgatgattcaaccggtaaaactatacacataaaaaagctccatgctaatattgattacgtaatgcatgcagttaattcaatattgaattgttatcatgtatgtgaagattatgttaaaacaaagtacaacgacacatgaaagagagatgactcatatcgaagacacacaaaccatgaaaatgatggtacgtatggtaaacttgaattcataaactttgaaaacttgaatactatttttccaacattcaattaatttcttattctctggcttccatataggtggagaatgctttaaaacaaagtgctatggcacatgaaagagagatgagccagcttaaagacacactcctattgaaagacacacaaaccatgaacatggtgaaacaaatggttaattcgtgttcataaacttgtagacgtcaattcttattcttatctccatgattttttttagtatttatggttatatttcagatggagactgcattcaaagagaatgcgatggtacatgaaagagacatgtgtcaactaaaagacacactccagctgaaagacacacaaaccatcaacatgatgacgcaaatggtacattcttatttataacatttgttagtatgaatactttttcatttcacgcagttaatttagtattctttggttttatttctggtcaaaatgtgttaatacatgcagagtgcagaaacatatgaacgacagatgcgtcaaatgaaagacattattcaacagaaagacagactaaccatggaaatgatggaaaaaatggtaatttcatatagattttctgtaatcttgaaatgtttatctttcactggatactattaacttgatatattttggttatctttcagatggaaaatgcattaaaacagagtgaaatagcacatgaaagaggaatgcatcatcaatccccccgaaagggtaagacatgtggatgcaacattatgtgatgtcgccaactctattaataaatatcaagaacaaagtttctgtgtgattgattcaaaacttccagtatccatactttcattttgtgtgctatttttatataattctctacaactctctcatattgcaagaaacgaaggacatatttaacacatgtgcaaaacgtttttccaatattgtgtgtataaatgtagttatacattatttctcttaataaaggaggaagacatatggatgatggtaattttgtggtatattgtgtggtgagcctagtgtcacagacttttcttagaataccatgagactgtcgacactctccacaattgaccatcttcgactagttttaccctactttgggttcatcaggtgatcggctccaacaaaacagacttacccttgataacttagtagctatgttcgacatttataataataaactcgcaaaagtaaaagtgaaagaacggaacctaaatatattcatcacagtggcatatttagtcatgttcatcgtaaaccctaaaagtcaaatgtcaactctttcctcgttgcctttttaggctcttaaaacatgcagatgcatgagataagattaaattaaaaatttcatataatgcaacttgaaatacagattcgttttgtttgagaaaataatcggacttcacataatgcaacttgaacaaagtttttaaaatagggtctatagctatccagtagctagttttaacattcttacaatatatatgtaatttcctgaccgcccatgctagtgagcacctacgtcctttctcgggtccatgggtcctatcctgtctgacattcggtccgctacgtccaaaaggttttaaagacttggtttcagaccctacaaatcaatatatgatttttctttgtgttttttcctcacttacacagttccgacaatataatcgcaaaaaaatgattttcttttgaaaaagatgatttaatagtgccgaaacagttagtacaaatttacgaaatggtctatatatacatatttatgtttaaacttagttaacaacaaaaaaaattactttaataaaacagtagataaatatttttgcgaaataagaagatgaaataacagaacctaaatattcaatgcagattcattaagagccatgttccttcatgttcatcctaaacccttaaaagtcaaaaatcaaatgtcaaccctctcctcgtggccttctcagacacctaattgatatgccgatcaatatgtatgtgacgtagtgtttttagtgttttttaattgtttttaagattacaatagtgacatatccatataatgaatgcaattggaaagaaatattcattctttttctttgaaaataaaataatataatgcaacttaaacaaaaaaaactcatacaatgcaactgtcttttggccacgaaaagttctacatatggctagcccatgttccaagttagtttaataactaaatatattactcaattggaaacaaagtaggagcttattgacatttctcgagcagctatttaattgataaataaatttctttgtatttaaacaatagctcttagtaaatactgattacatactttttcgataaattactggtgtttcggacttttggtacataatctcgttcattatccggagctaccctttagtccattcctatttaatga

SEQ ID NO: 15067 - DNA, 16 bp, Unknown
  misc_feature (1)..( 16): cDNA_ID_3080506_gDNA_ID_2685558_Annot_ID_193393 3000 nt of promoter + ATG
gaattcagctgagatg

SEQ ID NO: 15068 - DNA, 3000 bp, Unknown
  misc_feature (1)..( 3000): cDNA_ID_3080487_gDNA_ID_2685558_Annot_ID_193399 3000 nt of promoter + ATG
ggcttgtgagagtattgtgagtagtgaccccttttatctaaaggggttgctgaaaacatttagatcttcttgtctcagcagtgtatgttgaagtgaatctccccacatggtttttatcgtataacctgtagtagtatatagcaccattttatattctacacatagattcgtatagttcaattataggagttacagaattttgtcaggagaatatcatcataactcttatgttcttaatgaaaaaaaaactggaccaccagggagtgacaatgagaactgaaaaagggttcctttccgaatctcatattgggagatacaaatacatacatacttaaaatgtgtaatgtatgtcgacagatcgatatgtgtatatgatgttattgatatgatatggatgtgtgtggttggtattgtgtaactactggtgtttgtatgtgggagattattgaataagagagacatgcgtcattatgagtctctctctctctgctttttgggcctttggattcataggataaaaggaaaaagaatctcatgaaccaaccaaaagctggaaaaagaaaatagaagaagataagagttctagaagaaaattacaaaaacttttaccgatgatagagaccagatgattatcattttcgatattctaagctttgatacccctgaatattttattttcttactgttaggtttctcactttgtcttaaaaggtaacccaaaatttttatttggaaaggagagaaatgcttgaatatgtatttttaagtaaataatcaaatcttggacttactttaccagataatttaactaaggtgagagatgggggttggttgcacagtaaaatccaataattcaggcattatccgagtcaactgaaaccaagataatggtgaaatatttggggctatcgatggtgaaaatggagatgattactaaaaggtggcattcacatggcagccattgtagcatatgatgggtcaagagagaggtgaaatcatcactatataacttttttggattaaaaaataatttacttttaccaagacaagtgttgattttccagagagtatgaagatacaacaaaggacttaaacttgtttctacatacgagtagcaattagggaaatgtttagaggattatgaaagattattagttgatagtatgtgatagtaagtacttgaccaataattagtgccatttattttcaaaactactaaattaatggtgtgctagagaaatgactctaatctttcgagtctcaacgagtagtaacaatgattttgtttgtgtactcttcgttcttccccttttctccatgtaataatctgcaagtgggtctattattgagtttgattatgccacctttttgctccttttatattctttttttcttaatgatttttttttggtttatttatctagtagatatatataaaaaaaaactaatataaatattataaattctgaatttaggcagtaaaacacaattaaacgatgatttttagaatttgtcttaaatatacagtatatgacaaatcgaaacaaaatgtactacttaaaaatctttttattgtttgaatagtaaacttgtttgttttcaatagagttacgaattaatcgagatggaaccctacccataactaccttcttttgaaaaagatgggagtttgattagcttttggatttgtttggttatgaaaacataaaaaaataaaaaaaatctcatcaacttctaattccgtaaaaggtgtcatcgtcccaacgacaaatttgcttctcttcttttcgtttattccacagttaactaaaattacgagtttatttgactataaattaacgaaataagtgtctaaaatggggataacaaatttttgacaaaaaaaataacatgatgtgggaataacaacatacgtatttgatgcagtacgatacgacagtacgttggatattatttagtttcttcttattgtactttttaacgaattaaaaataccgtattatattagattaaccaataaatattaatacacatcaaatatcattttcacgaatacttttcacattgttgcactttctaacaaccgtgaaagattgattatacgtaatcaaaaacgattaaaaccaataataaattaattcagtatggaacatattatattttcctattggccatgaaagcttttacatggcaatttagtaataacataaaaagacaagggcattgtacatgtcccttgctctgacactaatgcatcacttcaccctttctctttggcgaaaggtctcgtaaaccagtggtgagcaacacatgccataaccaattaaccataccactcctcaacggtcaagattcctttttatgctatccattgaaccattctcctccgttggatcatccaacacccaacaagctttaacttaaccatggttagttttttggtcagctaggttaaagcttctctcctcttgattaaattgttccattacagagtttctggttttttttggcttgcgtgatctctctcttctcttctctctctcactcatccaaatctttgatcatctcatcatcattggacttgaagctaactccagagttttatccagattcatcattttccaacgtttttcttcaatcgaatcatcagcgagtttggttccgacgacgatcttagtagcttcataagctcaaggtctcgaaactctttctagatctagctcatttactttcttgtagatctgaatcttaatctctgtgtttagtttatcgagtttcaggatctgttgtttctaaattagtttgtataatttgaatctcgctttgttgcagattcttcaggtttcggtggattttcttgagctcttctaagcttctccattttgtgagcctccgatttcgaacctggtagtgttgtggatctcactggaccacgaagctttcttcactgagctaagcttgaagtcaattcctctgttcgacaatcaatagaggaagatg

SEQ ID NO: 15069 - DNA, 3000 bp, Unknown
  misc_feature (1)..( 3000): cDNA_ID_3080498_gDNA_ID_2685558_Annot_ID_193396 3000 nt of promoter + ATG
taaaaagacaagaaccttccttagaagatcagcaaagcactcagagaactaaatctaaggattaatacgaatctcttgctctaaaatttcgataattggccaccaaacaaaatgataaagaagtcaagtcagggttcacaacggaactcttgagtttcacattatggcttatccataaatcaactcaaaggaatctggttctgatcaggatcatagtattcccaaattccataaaccaaaacactagttcaatgaaccctgagcattaatcagtgatccaacataaaagctaacaagattgaccaaaaaaaacacagagaatcgaatcagtgcactcacaacaatgaaagtaaacgaaaattaaaaggcggcaagtggtagagaaagaaacgaaccagccacggatgaaagagaagcaaccagagtcagaatcttggtaatggtgatgatcatgatggcagtggtcgtaattttgcggcggaggaggaggtggtggtccgtgatgctgatgaggataacctcctccggcgaagtagccttgataaccgccttcgtaaggacgtgaagacggtggtggatatcctccgtaaggctgaggtggaggatatccttcgtgatgcgacggaggagaaggatatcccggcggtggcggtgctgatggataacccggaggtggatagtgagattggtatcctaattcgtccgatcaaaaacaggatcttagtacttttagaatagatcaaaataagagaatcagaatttagaatcgaagagaagagaatcataagaaggagaagtgattacgaacgaacctggaggaggatacgattccggtgggactctgtcgtagctcattttttttttgtcaaaatcaaatttcacttttcgaatcagagagtttttttttgagattattggaaaatataaatatattttaagtgccaggcttttcttttcatttaagtaaattcacgtgtcactaaaatcatgttgctcacgttcttattggatttgggccgataataatttttatttattcgtttgtttgctattgggcctatccacttatttggtaaacatgaaattctatccatcattcagaaaaacagtgttaagaagaattattttttcaagtaaatgttagaaaaacgagagctacaactaataaagttcccatgcatatactattgcgcatgcattttgatcgctaaacacaaacgctttgttttttttacggcgagaagcagtggaacacaaaggcaaagctatcataaacacccccgccagtgacccggaactcattatctggcggagattccgatatccgagggtaactatttctcttctctggtgtcttgcttgaagctgagccaaacctcatgctttttccggcaacggtggcagcttttttctccaatctccggcggttgatatactcttccgatataaagacatccatttgataaaaagggatttaagaagtggaaaacctttgagggtgtaatttatggaaatgattatgaaataaagagatatatgttttgattcatagtttgttgtttgttgagctagggaattgaagtgaaaggctgaaagtacatatattttatagatggggaaaaactgtgggcgttaggttccatgttttggcacatatattaactaacttatacatatttattttaaatgttttccataaaagtttttttccccccgttatagatgtgtactcgtgttgaatgctatatggttattagttttgtgaaataatttaatagataactaattagtagaacctagttttcgtggattcgatggattctctttttggtgcaacttttggctgaatacatattaaaataactttattacatcacgtgtatgcatcatatgatgatgtgcatgatattggtaatctcgagattcgagaatctatctactgaagtatgtgaaaatacaaatagtcattatttataattatataaattcctcaaaaatccaaacgaggagccgtaaactatgcaagccacagattatatcgaacgacaattgtatgatgttctcagcatgaaaaccgctatagaacgtaacgcctatttatactttcagctctttgtcccttttctcgtctcacatgtgttcgtccttgctaaactacacttttgccactgtactaacatcgatttattgtatggaacgagaagaataaaatggactaattcatagtcgatatttgacaatcagtggattaaccaattaatgttcgttaaagtgcacgagttatttgatgcatgcgtgaattcaacttatttaaaactttaggtagagccgatatgcaaaactataactctagctagtccgtttcctttttcaataaaaaaaaactctagtcccttttatgacgaacccacaaaatccaaaccctaatcgatatcaaaataaataacaatgttaagtaaactgaaacaatgaaatagcctcagtgcattagatatttagatatatcagtgtttatctatatatacagatataataaacttctgcatacataaaaaaacatggattatttggtagagttttcttctttgagtttctttcccatccttctattgggccaattttaggcccatgatagcccaatcttacgcgtgtatgaaaagatttgacgttaaagcaaatttcaaaaaacgacgtgtagttcatctctaaaacgaaacaacggcaagacgttaaaatgcaatcttttttttgtagttgctccttcatcaaccacgtgtcttcaccttactggttcaaccaggaagcgaaatattgagctaaactgataaagctccttcctccgccatagccatttcttcctctctgtagttcacatagggggagagtaagagacagagctcaagcaacagtctcactcgagataaaataaagtcgtgattttgattggacccatgattctcattcgtataaattatcatctttcggcttaatcggaaaatg

SEQ ID NO: 15070 - DNA, 3000 bp, Unknown
  misc_feature (1)..( 3000): cDNA_ID_3080438_gDNA_ID_2685558_Annot_ID_193415 3000 nt of promoter + ATG
tctccatttacatgatcccacaaatctttgcctacgctatcaacttcccaacggcgaagtttttgcaatcacaaagcaagatcatggtcatggctggaatatccggtgtggttcttgtgatccatagtttcttcacgtggctagtcatgtctaggttacactggggacttcctggtttagctttagtgcttaacacgtcgtggtgggtcatcgttgttgcacaacttgtgtatatctttaattgtacgtgtggagaggcttggtctggatttacgtgggaggcttttcacaatttgtgggggtttgttaaattgtctttggcttctgctgccatgctctggtgagtgcaaaccttttttctcttccaattattttggtccgatttgatccaaccccattaatgaattcatattttaaatacaatttatttacttttgtagtttggagatttggtattttatggcactcgtattatttgctggatatttgaagaatgctgaagtctccgtagctgcactctccatatggtaaaatttgttatatctcttaaactaattaacatctttacaacatttaaggtttacatgatttgttatttgattcatttatttattatcagagagattctctgaataaagactagacccaacgtgcgtagtagtctcttgttttgtttaataatcaatgtccttaatgtattaagaattcaaaattttgaatacttccactgcaaagaaatttctaatgatttgttttccttaattaatggtgtgtggaatatgaagcatgaacattttgggatgggcagctatggttgcgtttgggacaaacgcagcagtaaggtaaattctagcgtgtgaaataaaactaactctttacaaattctacacatctaacaagtgccaagctaataatacatttttgttggcagtgtgagagtgtcaaatgagctaggagctagccacccaagaacggccaagttttctctagttgtggctgtgatattgtcgacagcaattgggatgtttatagcagccggcctactcttcttccgcaatgagtacccggttttgtttgtggaagatgaagaagttagaaatgtggttagagaactcacgccaatgcttgccttttgcattgtcatcaacaatgttcaacctgtattgtctggtaatatttgtttagtggactccaatagtccaatataatatggttgtacataacgtaaaccgaatgtatatgagattatgataaatttgataacgcaggagtggctgtgggagcgggatggcaagcagttgtagcgtatgtgaacatagcatgctactacttgttcggagtcccatttggtctattattgggatttaagcttgaatatggagtaatggtaatgaaattcacatccttttatctaaaagtaaaacctttatcaaggaaagacgaaagaccggggtttttgatgttttggaaacctattttgatcagggaatttggtgggggatggtgacgggaacttttgttcaatcgatagtcctgacttggatgatctgcaaaaccaattgggagaaagaggtaagaaaccaaaacactttaagaccgaatagtcacgacctcgctcaccgagtttattgttctaatcttttgaatgatatatatatttgtaggcttcaatggcagaggaaaggataaaagaatggggaggagtacctgcagagaaagagactcttttgaactagaaagagttattacttcaagacatattgatgagtctttcagatcacatttttgtatacgaaccttaaaagcaaaatttggttctctctttctaaaaaatctgtaacttgttatgtcatcaaacgctgacaagatatgttataacgctgataattatctataaacaatttgacttttgagaattggggtcttaatgaaaagttaccaaatcatttagaataatactactcgcttgtcagaagttgcttagtatagtagaaacgtgaggacaacagcactaccagcttccttaatcttcttttcatctgtattcgacacaagcttagccttgacaacaacaggtttattctccggcaagaaacctttccctaaaaccttaaaatatccaaattgagtaacatcaatcatagacacatagtgtttcgttgcttagtccataacgtcctgaggaaccatcgaccaaagcttgtcaagattgacgatctggcagtaaaacttgttcctgagcttgtggaaatacctcataccaactttaacaaaatatccaggatgatacttgtcgaagaggatacggtgtgatgcataccaccggcgttaccacgacttccgggaagcttacggtgctttccaaaacgaccatgtccaacagatacgtgttctctaagatttcttgtcttcttcctgctagtcgtcatttctcaccgattgaaattagggtttcacaagaaaaaatgggtattaaggtttatatgtttttacgcggcaagtaataatgggcttatcattgggccttaagagcgagaagagccagaagaatccggttccgattttttagtcaaaccaaataaagccgaaattaaattctgctggatttggtttgaaaattcgttattttaacaggaaataaaaacggtctaataagaataaaaatctattcgaaaaataagaacaatttttataaaataaaataaaaaaatatatttagaaagtgttatcttaggaaaactattcgaaaaaaatatttaatcaatcattatctctgcctgattttatatgattttcacttttctataaatatttgacatttcattgtaattatccaattgttcatcacattaattgtttacaaaatatttcttaccctttttatagataatgagaatgatctagttttgttgtaatttcgtttctttccttcttcactcgttaaattttcgtttaatcagacatcgatctcaaaagctctcatcttcaatctcattgaga

SEQ ID NO: 15071 - DNA, 3000 bp, Unknown
  misc_feature (1)..( 3000): cDNA_ID_3080443_gDNA_ID_2685558_Annot_ID_193413 3000 nt of promoter + ATG
actttcgtctcgactcagttctggatgagctccatgttctctggacccgtcgtgggttcggctaacggaatcgccgccgggtggggtaacctcggaggaggcgcgacgcagctgatcatgcccatcgtgttctcgttgattcgtaatatgggagccaccaagttcaccgcgtggaggatcgcttttttcatccccggtctctttcagactctctctgctttcgccgttctcttgttcggtcaggtaacaaaccaatcacactcaccggttcagttattttggttttttcaactaatccggttttgagaatttatcaccaagttattttttgttttggttaaatttactttctttgtatagtcagtttatcctgttctatataaatgattaaaccgattcgtttaggtgcaaacccggtttattgataccggtttgggtcgtctagtagagtctttagtcggttaatcatggtcgagtttcagtggatatggacaataactgtttaatcatctaagttgtgtctattacaaggaatagtaaaaggatacatttgttttgtcttatgtttgctatatgtttttggaaatgagtaggatcttcctgatggagattattgggcgatgcataaatctggagagagggagaaagatgatgtggggaaagtgatatctaatggaatcaaaaactataggggatggataacagcattagcatatggctattgttttggagtagagcttaccattgacaacatcatcgcagaatatttcttcgatagattccatttaaagctccagacagcagggattatagcagcgagttttggactagccaattttttcgctagacctggaggaggaattttctctgattttatgtcgagacggtttgggatgagaggaaggttgtgggcttggtggattgtgcaaacatcaggaggtgtattatgcgcatgtcttggccagatttcttccttgacagtgtctataattgttatgcttgtcttctctgtattcgtccaagccgcttgtggacttacctttggcgttgttccctttatttctagaaggtaacatacattttggtattgagttgcttgattggttattcaacatttttgcttacaaaagtttgtttatgcagatctcttggggtggtatcgggaatgactggtgcgggaggcaatgtaggcgcggtcttaacacagttgatattcttcaaaggatcgacatacacgagagagacgggtataactctaatgggggtaatgtcaatcgcatgttcattaccaatatgcttgatttactttccgcaatggggaggtatgttttgtggaccctcttccaaaaaagtaactgaagaagactattatctcgccgaatggaacgatgaagagaaagaaaagaacttacatatcggaagccaaaaatttgcggaaaccagcattagcgaaagaggtcgagccacaacgactcatccccaaacttgataaattcatggtgttttttttgtttatatgtatcgactgttgactatgtttttgtcttcttctcttttgtttttcttaagagttttcaagaactcaatttcttgattttatttataattgtgtgataagttgtgtatgttatgtaaaacctactactggttactgctttctttgtaatggaaggcttttgtaaatgtttgttcatcatggaatgaacaaacgtattttcatttagtatacatattttgttttttagttatcttttgttgatcgtgataataatgatttgaccacaagaatacaaaccagtagattcataatttattatacactgttagtctgttaaccttgtaaaccaaaaacgtttcgatattcatatgctcttttacatcaaacactcggttatttgttttatccaaataactatgacaattacatagttactaattggtactttatttcattatcagatattaactgagttgaaaacaaaattagatagcagttgaattaaactttctattagtattacatcattaagtgtttttaggtgaccaaaaaaaacaacaattacattcttcccactttacaaatacttttaaaacaaaacagcttgtcttttatgtcaaagttcattgaaagatgaacttactttggtatattacagataccatgaaaccttaaaatcttcaatagatcacatctttttagcccaacatctttattttatttacttttgggcatatttagcccaacatctttggcagggaagaaaaactttgtaatcttctcgctatgccattgggctagaaaggccattatgggcctattcttatttcattatgtctctagtgggcctactactgtctttactatcttggccaattagaataaaatctttattgtatgtttcccaatctaccacattgtcacaaacactcacaataattgctccgcacgtagcaagaagtaggccatatggagtccacgacacaaagatttgaatggtcaaagatatataacaaaacaaaagaaataaaagagttgtcgcatgttcttatataaacgatttatatattataactgcattttacattattgtattgtttagccgagtcgtgcgaatggaatatcaaatcgtcatccttttgattttgaatgacaattatacagtaatggagacacacacacaaacatataaactattaaattctactgtgaaacgctaagtcaataagattaactggtgtaaagctgtctgattaacaaaaacttaagtgtgaaagctgtcttttaccactcttccaaacactcgtaagtcgtaccaaatctagttctttatttattttttaatcgttctctatattatataaaagagaaaataaaactattaacttctatataattcataaaccattgattcctaaagattacaaaatcattgatctccttcttcttctttaactttaagcactctctttctctctttctctttctcttgtcgtcggaga

SEQ ID NO: 15072 - DNA, 3000 bp, Unknown
  misc_feature (1)..( 3000): cDNA_ID_3080455_gDNA_ID_2685558_Annot_ID_193410 3000 nt of promoter + ATG
tgttcatacacaaaatggtttagtaacatcgatacgcatcaagccaatgaataattaatagttttccccattattattggttttgggtcagaaaccaaatagttttcatctaaaagctttgaatgtgaaaagtgctccaccacagcacgcagagatgaaccctcaaaggaggataagaatacatgttggatatgaatgataactaagccatcttagaaggatttatataccgctcgttttgaagactatcatattatatagtcagctattccaacataagggggagaatgtatacagctggtgaaaaagataaatagaaatgaattatcaatgatcctcggagtaaagaatgtatattaagagtccaaaagataattcaattacagaatttagcgttgtaattgccagacgcatttgctgacccaaataaagtgatgaagtcacttatatcagttgtaaattaaatgctccagaatataatgaatgtcctgtaaggaccaatttcaaactgcttttgagtcttaagatcgcatgaagcgtaatagaccttggttccaaatataaatatcctcgtaaaagtgaaggagcacaaaattaaaaatgaccaaattgaggaaataaatattttgatgatctcttgaagagagtgaatgatctctaaaagagacataaacatgacaaatgaaacattcaagtacttgacaatgaagagatctagctagctatgtcatgtcaaaatataatggaatcaaaagcaaatcgacatcgtaatatatttgcatgctatgagcagttgatattatagacaaaaaggaggatcatgaaagaaagtctattgaaaagtgtacacaaagtaatgattagcaaaaaaaatggaaaagaagaaatagacatataattataatctctagtagagatatttggactagtaatctatgcacatgatgtgtaaaaccagtggaaaataaatgagtctttatgtgaaagaatagtgaaattaatgagattttcacaaagataagaaatgtattatgaagagatatattctcttgtggtggatgtaatattttttttaagtatctaaagtctggcaataagagacggaacactggatatgacatttatataaaattcttgaaagatataatctctgaaggattaattatatgagaattatgttctctagaactctactcgatcgaataaaaagaaatatgtaacatgacatataatcatataaatgtatatttacgttgagtttgtcaaaatatattgatcaaactaatatttgttttgaaaatcattaaaactcctacagagttatcataagtaatacgatgacaataatctatgataaaatatcattagataatgatatttataagtctatatgaaaaccatataattttgatcattaagattatggttattaattccaacgagatactgtatttgattgaaaatcatctcctgaagaagatgtttccgagggggagattgaatgatatgcgtagatgtaccctttttcgttatcatagtttttatcccacatgatttttctatgacaaggtttttaacgagacattaaagaacacgcaaataatacacttgatgaatattaagaaattctatcaatcatccaaatgaatattatacactaatggtatttagagaaataaataagatggtcaagatgaatcatctaaaagattcatgagcagaagaatggcgttgtactttatctaaaaatttgttcaagagaagatttggcagacttattctcaaatactgtttattctctgccacatcttctaattatgcagagattttaccaattcatgaagctagccgcaagtgtgtatggctaagatccatagttcaccatatacaagaagactgtggtatatatgcagggaaaaagactccaaaattatgtacgaagccaatgcagcatgcatcgcacaactcaaagacggatacatcaaaggcgatagaacaaagcacatcctaccaaaattcttctacacacacgatctacaaaagagcggcgatgtacgagttctacagatccgttcgaatgataatctggctgacttattcaccaaggcgctacctactgctactttcaagaagttagtctatcgtatcggattacgccgtctcaaagatctcgacgaatatactcataagggggagtaattgtatgttgcactctttttcccttaaccatggtttttcccattgggttttcctagtaaggtttttaatgaggcaacatttcaaatagtttacgagttatgatactataatggtcatcagggagagtgttatgaataaagatggatgcccattatgaggcccatcatctaagcccatcatctacatgtttttagggttttaccctttccttatacttctatataaataacactttatctcaatggaataacacactcatttcttctatctctttctttggttataacattaattagcattgtagtctatttatgttttaacgtaaacataatatcaactaaaccattatttttatgaaacgactgtgaatcatatatgcttcactgtggactattataacatcaaaaccaacttatagtttttatgaaccaaaaacaaccagctaaaagtgttataattttaaaataagaaaatctataatttctcatattagtttataattttcaaaattttaacataagttttaaagacacttttagagatcctttatctaaaaaacgtacataagtttttttttttaatataatgaattatcgaaatcgaatccaaaaaggaagaaaaagagcagaaactgattggattcttaaaaaaatattaaatttattttactttctcaaaaaacattaagaaaaataaaaaaaattccgaagagtcgaagaagaagaagaagaaaaaaaatagagtggaagaagagagaaagagaagagagtggaatgcaacaaaagaaattgagtgagaatg

SEQ ID NO: 15073 - DNA, 3000 bp, Unknown
  misc_feature (1)..( 3000): cDNA_ID_3080459_gDNA_ID_2685558_Annot_ID_193408 3000 nt of promoter + ATG
tgtctaatctggtctatgctctacttggagttgcagctatgtcaagggtaagatttttgagtaagatctctcaaaaagtagttgatggattatgatatttgattctgtttttgttttaggtccataagtgttcaacgatactgcaacaattagctgcaatctgcagtttatgtgagaggacttcatggaaaggaatgttgtgttggaaatctctccaaggatggctaaactcagcggtttctctctttctcttgtgatcacatcaacaccaaactccgcctctgtgttgtttattctaatggcttttttttgtttgtttgtattcaggtttgggcacttccgagcgagtatctaaagcaaggagaagcagaaagcatagtgagggaatggtcagaagctctaggaggtgcagggatcgattatcttgagaacaaaagctgcaattttggaagcaataacagttcaggaggacatatgcaagggaaacacggtcgaacattgaagcgattagtgagagattttgcggattctcatcgaaacgatccaaatccaaacatcatatgaataaatcaatcgataaactttttttttttgtaatgtttattttattttgttgccttaataatgagggcaatgatccatcatcttcttcatttctgtcgatgctctgtttctaatgtacagtaggagaggaaaagaaacctcatgaagaatcttgagccatttcttttagattcatctgatgagaaggataataatatacatcccattgttaacatttaactctcatttatttattttgaatctatgaggcaaaccaataaacggcacgcagtttgaaggcgtcttggtaatgtagactacagccagttccacttttcacgtaattgggccttttgagttaagataaagcccattagctcgctttccatgtggtttgccacgtgagtatcacgtgattgggttgggagttagaatttggggaaaaccctaggccagtcaattctgggaggagagaggccgccggaggagagagaaaaagaggtacgagcttacgttttgcttgctcgatttcaatctctctgcataatggattcaatctgttcatcgtaatcgtttattcaaaagtttcgatctttacttcacttgaaaccaaaattcgtagtgttgtgtccgaaattcacgctgttcaaagtactcatttttgaaacttgattttgttcttcttgtgtagttgggggattgctttttgatttctccttctccatcttcgacctcgagagaagctaaaaatggcagaagaagcggatacgaacatcgagatctggaagattaagaaactaatcaagggacttgaatcagctagaggtaatggaacgagtatgatctctcttattatgcctcctcgtgatcaagtatctcgtgtcacaaagatgcttggtgatgaatatggaactgcttcaaacattaagagtcgagtcaatcgtcaatctgttttgtctgccattacttctgctcaacaaaggttgaagctttacaacaaggttcctactaatggtcttgttctctataccggcaccattgttaatgatgacggtaaagagaagaaggtgacgtttgatttcgagccctttaggccgattaatgcttccttgtacctttgtgacaacaagttccatactgaggcattgaacgagcttcttgagtctgatgacaagtttggtttcattgttatggatggtaatgggacactgtttggaactttgagtgggaatactagagaggttcttcataagtttactgttgatctcccgaagaagcacggaagaggaggacagtctgcacttcgttttgcccgtcttaggatggagaagagacacaattatgttaggaaaaccgctgagcttgctacacagttttacatcaatccagctacgagtcagcctaatgtctctggtctgatccttgctggttcagctgatttcaaaactgagctcagtcaatcagagttgtttgatcctcgtcttcaagctaagatattgaatgttgttgatgtttcttacggaggtgaaaacggtttcaaccaagcgattgagctgtctgctgagattctatccaatgtgaagttcatacaggagaagaaactgattgggaagtactttgaggagataagtcaagataccgggaaatacgttttcggtgtggaggatactctaaaggctctagaaatgggtgctatcgaaacccttatcgtgtgggagaatctggacataaacaggtatgagctaaagaacagtacgacaggagaaatggtggtgaaacactttgggaaagatcaagagtctgatacaagcaacttccatgattcagagactaacgcggagctagaagtacaggagaagatgcctctactcgaatggtttgcaaatgagtacaaacgtttcggctgcactcttgagtttgtgactaacaaatcccaagaagggtcacagttttgcagaggttttggtgggattggtggtatgttacgttaccagcttgacatgaggacatttgatgagttatcagatactgaagtttacgaagattctgattaaagtgggaaaacttttggtgatggtttcagatcgatacagtgagggaaaatgtggcataaagatggtcttttatcaacaaagaagagagatttaagtttcttgttttctatagaacattaaaaagcttgactctttctttctgttagacaatttgtgttgtaatttttgaggattttaaacatctttttgttgttcttctggttttatattttccgagaaaatcattggtgaagaagagacggagataacgatgttagccatgttactctgttttccttaaacggtgtcgttttcgtcaattattaaaataaactggatgactggaatatccatttgcttttgagcgagtgatagaagcggaggcgattttctagggtttttgctcggaatcgatttcacgatg

SEQ ID NO: 15074 - DNA, 3000 bp, Unknown
  misc_feature (1)..( 3000): cDNA_ID_3080467_gDNA_ID_2685558_Annot_ID_193406 3000 nt of promoter + ATG
aaagaagaagagataggatcagcaacaaaatggttgttttcaaaaggctgatcttgaagaagacagagactagaagatccccaagtcatatgaggctccaaagactgttgtggatgtctttctaaagaggtgttttcagtgtagaagaagtttgttgtagctagagagccgctgatggatcgagcagcaacgtcatatgcaaaagcagcttcttcggctgtatcaaacgttccaagccaatgtctttctttagtaaaagggtttctgatttcagctgcatatcttccccatggacgtctcctcactccaaggtacttcccttcttgtaacttcttctcttctttgctttttctcttgttacttgatttcaacatgttcacaatattcagagatcaatgtttctctctctttaagtctcttgagctttgaggttccttatgctgctatataaactctatattgagtaagaagagcaaaagagtgtgtgaacttgattgatgcctttttggatttggcattaaatttaaggaaactgttgggagttcaaaaatttaactccaaagacttatttctccttcgtaaactgtgtcagcagaaacaaggaagtgtttcatattttctctatttttgtccttttgcttaatattttccacactttagtctgtgaggtgattcatattaaggaatgtatggagcaaagccaagttgtgacaaggacattgtcattatagactcagacaaaaactgtacaaatgtcaagaaacctaactaaacatgtgacataagcttagggatttggattcttaagtgtattcagttgattttgaagtcaagccttaagcattgatttgtgtgtgattaggtaatttcttctatgtcctttgtctttttgcatttggtgtcccaattgcatataaagacaactctatctttatcacttcaaacagacagatatcaagattcaagacagatgatttgagattatatcatgtcacatgtgttgcagtcactttacttctcattttttcaatttgtttacgttagctaaagaatatgaaaaactagttaactacaaaacagtaccaaggatctatttgactctcctcctctagctttgaagaatcatgcactgtctcttcctctgttctcaatcttctttcatcttccattactctcaaaaactcttcaagtgctctctgcatccactcataccgacaaagctccaacgcttctttaacagtcaactgcacattttcgagtaatctcagagttaaaacattgtacttacttatatgaataactacacatttgaatcttaagctttacccatcttcgttcacgattctttcgctctggccaatcctcgagttcttcggtaacttttaatgcaaacatatatcctttacatccacctaaacattcatcctccactgtgctacttttgcttctaaattcccaaactcctaaaggaagttcctataaacaaaaacatgaccaaaacacatctaattcaaaaaactttaaaatagctttcttagtgttttgtttaataaaggtgtaaacttactctaagtattcctttaactcctgcttcttcaatggcttcacgagaagcagcttcaagaacagtctcatcatcttcccatcctccctgataataatatacacaacaaattaacatgagcaattacaaatgatagtacagaggatgatttttcaattcaaaaaaagacctttgggaagacaagatcatgacgattaggagatgaaaccataagaacttcaagtttgtttacaaagtcaacacctgagtcttcttcagtttcgtcagctttcatcagcctataaggaatgcatctgttcataatgtatagagaaacaaacaacaagaaaatcaacaattttgttttctgatttttggggtttcttgaaaattttcaagatttgcaagaaacaaaaaaacaaaacaaaatgattttttgttgtgtaagttgttggtacccagaaacgagacggaagttgttgtcgtaacgttgacgatctcgtcctgtccgagaagaaagaaccgacatttgatgaatctgccaacacaaaaaaaatcaaaagggattgagacaacagaaacagagaatgctactttcttgaaaagccctgttcttgtttgtatgaaacatgttgatcatagcctagcttttatgacgaatccatattcttgttttgaaaataaacaaattttccagaattaacgaatctcaaaagtcacaaaaaaataaaatcgtttatatgaatttttttgtttgttaaataacttgctatttttgcggagaagaatgaggagttgtaccaacgagcattcactgctaactatcacctgtctctctatataatcagttttaatatttatacatgaaaataaataaattatttttgttagagctcaaaaacaagaagaaccttaagaacgcaaattcgaagcaagtcactaaaaggatctgattctgtatttgacttattactgttttatctcacgagtattctccactatagagaagaactattcgataattgattctataaaacttatcttgagacgtgttttaaacaagactgctgaaaaccgaattcatataggttcaaactttcaattcgtttctagtgtcttttttttttttttttgttgggtcttggttttagttttagccaatcagaattgtttgttagcaaatcttgtatttttttcgtttttgctaaaatcactcaaattagagaataaataaattgtttctgaaaaaaatgtatttccatttccttagtcgaaattggcttttatttccttttctattattttaatttaaacataaattttgtgggatgataaacttcctttttcataaccggctaatccttatcaatccttaacagagtagaatttggagataagtgtgtgtataaaaagacaaaaccaattcactcgtatcaataagaagaagaaaaacaatg

SEQ ID NO: 15075 - DNA, 3000 bp, Unknown
  misc_feature (1)..( 3000): cDNA_ID_4254342_gDNA_ID_2685558_Annot_ID_193394 3000 nt of promoter + ATG
tactcaatcgttagagtctaggatttgcaaaattttggtgtcgattttatagctgtgattcaaatcaaatctaggaaacttgaattcgactctgtatctgctcaatttcttatgtagaaatgtcgataagttctcaaattaggcgatatgtgttttgatttgattactgcgaaatttgaatgatgagtctaatgtttagtagattcatgttactgagaatctgcgattggattaatttacgataatctctgacaggaaatgttgctggtgtttgtataatgagcaatgcatggaaagttgaacaagaaccttcactgatcaatttcatatctgcgtttcttagcgcaaactctttccgccttaactttgtctctatcccccctgtatgtgccttctttctctgtttagattcttttggagaattggattatctaaaatttagcttaaagaattcactttatgctgtgataggatctcatcttcaattgtggaggtgtttctattgcttttgtttttgtgactaaatgggatttttccaatgttgcttccatcttcagcaggtctatataataaagtttcaagctctctctctatcgcaaactcctatatgtcttctgatttctttgacttaaacttttttagagtaaagaggctgaaagggcaatttgcgcaactttatgttgttgctacactttcaactaaagagcagagtgattcttttatgcgatcttacttccagtgagtggtcttctactcttcttttttcactttgcatcattttgcttatctgtgttgtcggaaatgaagctcgataaatctttttcgtagatatgagatggagtttgggaaacctgcgtttgtacaagtcactgatgctgagatgggatttgagaagattgttaagattgctcactctcgtggaggtataagattcatttgttttgtgttagttaatatactctacggtttttttagtgattgactgataagatttgaaacttgagcttcagtgtgcaagcaacagaaggtggcctctaagctcaaggttgaggtaggttctcatttgttataatgatctgtctcaacatttgtttttgacaatctctaaagcttctttcgttttctttcatgtgaagagaaagcgaactgtgcaggatacaaacatcttcatcagatttgtcacatccatacccaatattaacaaacatgatgcgaacacggtaatgtttacttatgagcaggttcaagtggtaaacttgcacttttgatactattaaaatacaattccaacttcaaacttcaaaccttattgtgaatcatgtcactgcaccatgaattctacttgcttgcttatgttctcatcggttacagctgtaccaggctattggttcaattgaagcaatcgctaaagcatccaaagaagacattttagcaaacacagatctctcttctaaaaaggctgatacactcaccaggtttttccaagatcctgagttctacctcagtcccaaattcaactgacgactgcagaaatagttgtaagatactaagatcacaattcttataaaatccgtaacgtcgtaagacttatctatcttattcttggccgtaacagtttctaaaggtaccactcaaagacttttcgtagtcctttgctatggctacaagactacaatacatacacctataggagccagtaccgggtaagtaaaatggctcacttttttatctttgctagctctgtctgaatactagtacttttattacatccgttcctgttaaagtgtttagcatctgaactttaatcaataaagatcggtaccaagactttttttgatgtttgcagtaacaccaaactgcatcgtgaaaacgtttggtagattgattgataagtttgagggttaagcacaataaatgaccacacttgtttttcttttggttgatagttacgggtttttgggtttctttgatcttaagcaaaaatgacaagctaacaaaacccatgtgaaatggctttgcatttataaattcttgtattcttacttatgttatccggatttaaaaatcatctacatcacacattatcttaagtaaaagattttacccgcaatttgtgacaaatcgaagaatttgccatttctacttgcaaattgatgcaaaattcatgttatgaatatatttcaaaatttatctacataaagacatattttgttataaaaaaaaacatacgaaacatatattccttctcaaaacaaaatcctattagctaactctagtaccaaaacatttcaacatttacccaaattggatacctaaataaagttgtagatacacgtcatcaatttgatcataacgttatcggtaggtctctgctgtctctgtcacaatcttaggtatcgttaaaagataaatattaagtggacaactttaacgaaaaaacacaaaaaagttgattggacaacgttactatccagtttttagcgtgttatccaacccatagaaaatttatctctctgtattcccataatcctcgtagattttggtcatcactagtcatttatttacaaaaataggttaaaaatgtcattgcgtaaaaaaaaaagaagacttaatcttacattatttcccttttaattattaaaatccgccgagaaaagtttcaccatcaatgcgtaactgaaaatcgacgaatcaaagctataatacacttaaacggatcatcatcatcatcatcgttgtcatgatcatcactgccgtatttatagaaaccaacaaaaacatgaaagagcccactcatttttcctatttttcgctttgcgtgccttcttatcaacttgtaaacaaagctacaaatatctttaaataaggacccaactctttttcaattcctcccatcaatcttcttcatttgttcttctgttggtggtggtgatctagttttcaaagaatcgattttgccaagtgggttcttcttgataacctttcttcttctttgaaatg

SEQ ID NO: 15076 - DNA, 3000 bp, Unknown
  misc_feature (1)..( 3000): cDNA_ID_2783455_gDNA_ID_2685559_Annot_ID_138156 3000 nt of promoter + ATG
ataaatagtttctattttgggctaatttgcagtgaatattgaataaggtcaggagctgcatatattcatgcagacatatatgataataaaaagtaattaaggacctaccaagtacccacccttcgccataattatataactgaatagacatcttgctgaaagatttacgaacaggatcttctccttccatgtctccatagcaaccttctgttcctcctcttcctctgcagtatccatcttcccacatcaacatcctgtagccccaaacatcaatatatcaatacgtagcgcatatttgtaaatctactcatcataaatcattcattttcattttcattaatttatttattaattaaaggaagcaatggttattagacaagatcatctaaaagagatgacttgatgtgtttttttccagcaaatcatgattcacaacttaaacgaatggtagatacagtctcatcgcatatatatagatgcatagagctacgtgatcatgatcatgtctaggatctccatgcaacattttttggatttttgttttgttttgttaattcaagcctagagtactaatactagtctgtctagttagtttctttccggggaaagtttccggtgactataatacgataaaccataagggaaaatgttgactttttaatcatgtttcataaagactaactatagtacgctaagtctcttgactatacgggtaacctaatttttttttgtaagaagtgtaacttacaagcttccattgtcgtcgccaactttgcagccgttgccaccgcctcgaactctcctgaagaacaaaaaagacatcgttttgaggagagatagatagatcatgtcaataaaaaaaaaagagaggagctgaggagagagatacgtacggacggggacggatggaccagaagacagagtaagtccagtcggtgttgagacaaacagttctcagggcgtcgtggagagccaccatccctaaagcttctttgctcctttgttgctgctgctgatggttttgatgatgatgttgttgatgatggtgatgatgttccgagcccaccatctatatgaatatgtcggtgtgtgttatatgggtttctcctctagttttggccttctaggttttctttgctgccttccttgctcaagcttctcatggactcttttatgttctaaatttcttttattttcaatgtttataatttttttttctaatttagactaattatatgattaccaaaccaacatttactgtttgtctacacaataatatgctattttagttcttattacttttttgataaaatcttacaatcttgtggcaaggatacgaatttcttggggtttggtatagttaacaataagtaatatataattaattatcagagaaccaattgaacacaaggttaaagttttttgcatgtaaaagttttttatctcttaggccaagaaagtcaaagatacttgaaaatcttcctgaaaaaatcattttagttcgctttatatttgtttgaatggaatccaattatcaaccattgattttctatacttcatattgcttttctgaaagagaaataatcatatggtttcgagtggataaactgttgttgttatgattaaagatacaattacaatgacataattagtcagtcgacatttttatccactaaaaaacacagtcttttagttttagtattatatataactctagtgatacaattaaaaccatgaaatgtgaaagtgttttttcttaagaagaaaaaggcttttatttagttgtcgtcaaacttgggattcggtttaggaccaagattcatattactacgggtgtgacacgcacgcaaattaagggggcacgacaaagagaatatataggaagaagagatttaggagtcacgtgtgcacgtgccgtgtgtaagactcgagtggctttgtcatcaaccatgacccagcgtctggttttgacctcgtggcgcgtataaactacgcatagaaacacagagacaaaccaggaagaagaaacaaaatcgtctgatgaatacaccaaagggtggcgagtgagaagtgtgagtgacgtaaacttaaaaaaataggacaggagtaacagagagttggtctggattgcatcagtctgaaaccctgacgagtcttagctccgcattgaccggctctgttctttacttacaatttttcttttgcgggacccaccgtttattaggaaaaagaaaaacaatttgtgggtaaagaaagtcgaatatgagatcatgttaattgctgcaaaggccgaaacaatggttggtttctagttctacttcctagtatatgggccgttaaatgagcttcaaagcttattgggcttttagtgcttttaacagttgggttgggttgttcttcgtaacaaatggtttccataatgaaacttggaaggaaaaacaacatgaaaaataaattcgacttcatctcccaaacagtttctgtcgatctctttggtgctcgagagagtgctttctggcaaaatgacatagcaaacgaaaggaaagagcaacagagagatctgtagtatcccatttcgtcttctctgtcgaattaccaggtaatttggatcgatcccttgaactttagagaatttgattatgattattttcgtttaagtctgattttgatcgaacgggagaaaaacatcagtgaagatgtttctcttcagtgtcctagagtgacgaatattctcggctacttgcaaatttttattggtcagctgtcacttgctccaatccacctaacttttttgctgattttgtttgctttgagtataagggatttagtttaagtttggtgctttcttctgggtacttatttatgaggggagagtttagatgtaatgaaaaggggagggagtggtaaaaagtattatagtttgttctgactctgttgttatcttcgtaatatagtggttggagcgggagagaaggtggtttttccttgtatgtggagatg

SEQ ID NO: 15077 - DNA, 3000 bp, Unknown; identical to SEQ ID NO: 8743
  misc_feature (1)..( 3000): cDNA_ID_2178530_gDNA_ID_2685559_Annot_ID_193440 3000 nt of promoter + ATG

SEQ ID NO: 15078 - DNA, 3000 bp, Unknown; identical to SEQ ID NO: 8745
  misc_feature (1)..( 3000): cDNA_ID_2105435_gDNA_ID_2685559_Annot_ID_193433 3000 nt of promoter + ATG

SEQ ID NO: 15079 - DNA, 3000 bp, Unknown; identical to SEQ ID NO: 8741
  misc_feature (1)..( 3000): cDNA_ID_2178556_gDNA_ID_2685559_Annot_ID_193446 3000 nt of promoter + ATG

SEQ ID NO: 15080 - DNA, 3000 bp, Unknown; identical to SEQ ID NO: 8742
  misc_feature (1)..( 3000): cDNA_ID_2178541_gDNA_ID_2685559_Annot_ID_193442 3000 nt of promoter + ATG

SEQ ID NO: 15081 - DNA, 3000 bp, Unknown; identical to SEQ ID NO: 8739
  misc_feature (1)..( 3000): cDNA_ID_2178537_gDNA_ID_2685559_Annot_ID_193441 3000 nt of promoter + ATG

SEQ ID NO: 15082 - DNA, 3000 bp, Unknown
  misc_feature (1)..( 3000): cDNA_ID_2178493_gDNA_ID_2685559_Annot_ID_138158 3000 nt of promoter + ATG
tacgagtataatggacgaacagaaaataaaaaaaagtcaagagtgtgataaatacttacgctttatagacatcaccaaaagagcctcttccaatcaactcaatctggctaaatctggctccagctgcctcttgtaaacccgcaacatcgtccatctccacatacaaggaaaaaccaccttctctcccgctccaaccactatattacgaagataacaacagagtcagaacaaactataatactttttaccactccctccccttttcattacatctaaactctcccctcataaataagtacccagaagaaagcaccaaacttaaactaaatcccttatactcaaagcaaacaaaatcagcaaaaaagttaggtggattggagcaagtgacagctgaccaataaaaatttgcaagtagccgagaatattcgtcactctaggacactgaagagaaacatcttcactgatgtttttctcccgttcgatcaaaatcagacttaaacgaaaataatcataatcaaattctctaaagttcaagggatcgatccaaattacctggtaattcgacagagaagacgaaatgggatactacagatctctctgttgctctttcctttcgtttgctatgtcattttgccagaaagcactctctcgagcaccaaagagatcgacagaaactgtttgggagatgaagtcgaatttatttttcatgttgtttttccttccaagtttcattatggaaaccatttgttacgaagaacaacccaacccaactgttaaaagcactaaaagcccaataagctttgaagctcatttaacggcccatatactaggaagtagaactagaaaccaaccattgtttcggcctttgcagcaattaacatgatctcatattcgactttctttacccacaaattgtttttctttttcctaataaacggtgggtcccgcaaaagaaaaattgtaagtaaagaacagagccggtcaatgcggagctaagactcgtcagggtttcagactgatgcaatccagaccaactctctgttactcctgtcctatttttttaagtttacgtcactcacacttctcactcgccaccctttggtgtattcatcagacgattttgtttcttcttcctggtttgtctctgtgtttctatgcgtagtttatacgcgccacgaggtcaaaaccagacgctgggtcatggttgatgacaaagccactcgagtcttacacacggcacgtgcacacgtgactcctaaatctcttcttcctatatattctctttgtcgtgcccccttaatttgcgtgcgtgtcacacccgtagtaatatgaatcttggtcctaaaccgaatcccaagtttgacgacaactaaataaaagcctttttcttcttaagaaaaaacactttcacatttcatggttttaattgtatcactagagttatatataatactaaaactaaaagactgtgttttttagtggataaaaatgtcgactgactaattatgtcattgtaattgtatctttaatcataacaacaacagtttatccactcgaaaccatatgattatttctctttcagaaaagcaatatgaagtatagaaaatcaatggttgataattggattccattcaaacaaatataaagcgaactaaaatgattttttcaggaagattttcaagtatctttgactttcttggcctaagagataaaaaacttttacatgcaaaaaactttaaccttgtgttcaattggttctctgataattaattatatattacttattgttaactataccaaaccccaagaaattcgtatccttgccacaagattgtaagattttatcaaaaaagtaataagaactaaaatagcatattattgtgtagacaaacagtaaatgttggtttggtaatcatataattagtctaaattagaaaaaaaaattataaacattgaaaataaaagaaatttagaacataaaagagtccatgagaagcttgagcaaggaaggcagcaaagaaaacctagaaggccaaaactagaggagaaacccatataacacacaccgacatattcatatagatggtgggctcggaacatcatcaccatcatcaacaacatcatcatcaaaaccatcagcagcagcaacaaaggagcaaagaagctttagggatggtggctctccacgacgccctgagaactgtttgtctcaacaccgactggacttactctgtcttctggtccatccgtccccgtccgtacgtatctctctcctcagctcctctcttttttttttattgacatgatctatctatctctcctcaaaacgatgtcttttttgttcttcaggagagttcgaggcggtggcaacggctgcaaagttggcgacgacaatggaagcttgtaagttacacttcttacaaaaaaaaattaggttacccgtatagtcaagagacttagcgtactatagttagtctttatgaaacatgattaaaaagtcaacattttcccttatggtttatcgtattatagtcaccggaaactttccccggaaagaaactaactagacagactagtattagtactctaggcttgaattaacaaaacaaaacaaaaatccaaaaaatgttgcatggagatcctagacatgatcatgatcacgtagctctatgcatctatatatatgcgatgagactgtatctaccattcgtttaagttgtgaatcatgatttgctggaaaaaaacacatcaagtcatctcttttagatgatcttgtctaataaccattgcttcctttaattaataaataaattaatgaaaatgaaaatgaatgatttatgatgagtagatttacaaatatgcgctacgtattgatatattgatgtttggggctacaggatgttgatgtgggaagatggatactgcagaggaagaggaggaacagaaggttgctatggagacatggaaggagaagatcctgttcgtaaatctttcagcaag

SEQ ID NO: 15083 - DNA, 3000 bp, Unknown; identical to SEQ ID NO: 8744
  misc_feature (1)..( 3000): cDNA_ID_2178501_gDNA_ID_2685559_Annot_ID_138159 3000 nt of promoter + ATG

SEQ ID NO: 15084 - DNA, 3000 bp, Unknown; identical to SEQ ID NO: 8738
  misc_feature (1)..( 3000): cDNA_ID_2178493_gDNA_ID_2685559_Annot_ID_193430 3000 nt of promoter + ATG

SEQ ID NO: 15085 - DNA, 3000 bp, Unknown; identical to SEQ ID NO: 8744
  misc_feature (1)..( 3000): cDNA_ID_2178501_gDNA_ID_2685559_Annot_ID_193431 3000 nt of promoter + ATG

SEQ ID NO: 15086 - DNA, 3000 bp, Unknown; identical to SEQ ID NO: 8745
  misc_feature (1)..( 3000): cDNA_ID_2105435_gDNA_ID_2685559_Annot_ID_138161 3000 nt of promoter + ATG

SEQ ID NO: 15087 - DNA, 3000 bp, Unknown; identical to SEQ ID NO: 8739
  misc_feature (1)..( 3000): cDNA_ID_2178537_gDNA_ID_2685559_Annot_ID_138169 3000 nt of

SEQ ID NO: 15088 - DNA, 3000 bp, Unknown
  misc_feature (1)..( 3000): cDNA_ID_2783486_gDNA_ID_2685560_Annot_ID_138173 3000 nt of promoter + ATG
agcgtgatttgggttgtggtgtctaaagaggtgaatgtagagaatattctagatgaaatcgctcagaaagttcatattagtggagagaagtgggacacaaaatataaataccaaaagggcgtttatttatacaatttcttaaggaaaatgagatttgtattgtttttggatgacatatgggagaaggttaatttagttgagatcggagtcccctttccaacaataaaaaacaaatgtaaagtggtattcaccactcggtccttagatgtatgcacaagcatgggggttgaaaaaccaatggaagtccaatgcctggcggacaacgacgcatatgatttgttccaaaaaaaggttggacaaataacactaggaagcgacccagagatccgtgaactttctagagtagttgctaaaaaatgttgtggtttaccattggcgctcaatgtggtaagtgagaccatgtcatgcaagaggacggtacaagaatggcgtcatgcgatatatgttttaaattcatatgctgcaaagttttctggcatggacgataagatccttccgcttttaaagtatagctatgatagtctcaaaggggaggatgtcaaaatgtgtttgctatattgcgctttgtttccagaagatgctaaaataaggaaggagaatctgatagagtactggatatgcgaggaaattatagatggaagtgaaggtattgataaggctgagaaccaaggttatgagataattggtagtcttgttcgtgcatcattgttgatggaagaggttgaattggatggagcaaatattgtttgtctgcatgatgttgttcgtgaaatggctttatggatcgcatctgatttgggaaaacaaaatgaggcgtttattgtgcgtgcaagtgttgggctacgtgaaattctaaaggttgagaattggaacgtcgtgagaaggatgtcattgatgaagaataatattgctcatcttgatggccgtcttgattgtatggaactcacaactttgctactacaaagcacacatttggaaaagatctcgagtgaattcttcaactccatgccaaagctagctgttttggatctatcaggcaattattacctctctgaattgccaaacggaatatcagaactagtttccttgcaatatctcaacttgtcaagtactggtatacgtcatttgcctaagggtctacaagagttgaagaaactaattcacttgtacttggagcgaacaagtcagcttggaagtatggttgggatatcatgccttcataatttgaaagttttgaaattatctggttctagttatgcatgggatctcgacacagtgaaggagttggaagccttggaacacttggaagttttaaccacaactatcgatgactgtactctaggtacggatcaattcttgagctctcataggttgatgagttgcatacggtttctaaagatatcgaataatagtaatagaaataggaactcatctagaatatcacttccagtaactatggacaggcttcaagaatttaccattgagcattgccatacctctgagataaagatgggaaggatatgcagcttctccagcctcatcgaagtgaatctaagcaattgtagacgcctgagggaattgacatttctgatgttcgctccaaatcttaaacggcttcatgttgtctcttcaaatcaactagaagatataataaacaaagagaaagctcatgatggtgaaaaatcagggattgttcctttcccaaagctgaatgaacttcacttatataatctacgggagctgaagaatatctattggagtcctctaccatttccatgtctagagaaaatcaatgtaatgggctgtccaaatctgaaaaagcttccactcgattctaaaagtggaaagcatggtggaaatggactcatcataacacaccgtgagatggaatggattacacgtgtggaatgggaggacgaagctactaaaacccgcttcttagccaacaggtctagtttctcatcttctcttatttgtttttcaaatgatttagtttctcgtgatatgaactgcttccatctttaatgtctctgtctctttttgtgtgtgttaggttgattatagtcagaactcacaaggttaaatgggcttctcaggcagaaacttcaaagtggatgatgcaatttggattgtgtctttttgtgtttaagtctttctctatgcgttgtttttctgtgaactattttttagatttgtgtcggcactgaactctactattgctatgtttggaatttattggaatatatccatgtgccatttgcaaatttgtcctttaaagaacttttctaataacagaaatgcggatacgattaaattatgttggattccttgtgcttcaagtattgcgtataacgttttgatgtccgttatcatcatatcttatttagaattaaatgtaatccaacttaacaaaacactcgcgatccacttgctttgcagctcaattataggaaacaactcaatcatatgtgaaatcttcatgttgaagccaaattaaactagttattttgcatctattttctaatgaaaagctgtctgaattttccgacagaatattagagtttgtttccttgcaatatctcacttgttacttgtcagatgacgaaactataggatttggaggaaataagtcatctcccgagtattgtgataggatatcaaatttgaggatattgaaattttttgttctggtaagcagggtgaaaataggcataccataagatactgcagactgggaaaatggattgatggtgtcttagcttcatctgaaatatgaaatttataatattttaaggggatcagctgacccttcttctctttgtgggtccgcccaattgacatcatctccacaaagtctatatgaccaaagatttgaaaacactttataatcacatattaattaacatgacacaaaaatcccattacatatcctaactaatt

SEQ ID NO: 15089 - DNA, 3000 bp, Unknown
  misc_feature (1)..( 3000): cDNA_ID_3080566_gDNA_ID_2685560_Annot_ID_193474 3000 nt of promoter + ATG
tacttttataagcaattcatattggttggtaaaataaaatcaataactattctctgtaactgatagtagtatattatatattaacgcgtaaataattagatgtcaagttaaataaataattatttcgaagagccaaattatttgagagtcaacggtgtgatcacaggaatcgacggatcggagagacccacgcgagcactccacccgtttcggctaaataacaatattacccttaaatcatgttcccatttgtgaaaacgtcgtgacttctgtttctcactttaccaaaacgataaaacatgctccacgatgacggtgagactatagtaaagaggaataatcaaactcattgcaattgaagtttgatttacgaaaagaaaaccctaaaacacctcagcaaaaattatgttattaatcaacacactaaatatagacataaagttacttttagtgtttttcttcttatatttcgttacttaataatagaaatttgtgaacttggaacgatgaagaaaaagatcatggttatataataattacgtataaactaaaaaattgtattatacgtttgaactttcttatagtcaaaggagaggttagtttcgtcaatagaggttaccaatatttaatggacttgagagaaatttcgttcgtttccttacaagtccattgtcacgatcccgtaattaatataaatcttaagcttaactcatcgacatcaacaaaagattagtcaagaaaaaaaaaaactcttacggagagaaaacattcaaaacaaaatgaaagtttggagccaaagattatcgtttctaatcgtcatgatcttcattttggccgggcttcattcctcttccgccggccgcaagctccctagtatgacgacgacggaggagttccagcgattaagttttgacggcaagagaatattatcggaagtgaccgccgacaagaagtatgatcggatctacggagcttctgctagattagttcccaaaggtcctaacccgcttcacaacaaatgatatatttctatactattatagttacattttgtcgccaataattatactatcttaattaagtttgtttagggttttgtttagaataatttaatctaccttgtgtctcaacaaattctgttattgctggttctttaatttcttgtattttgtagatatattgtatgatagatatacgtacagagacttatgtaactttcttttttcatatttacatttatttatacgatgttgaaaatatgtatcaaatattgatttgcacgagatgagaggggtgattattttatattttgattatagttcattataataaatatgacatgttactagtttgacagagttattaatatattcaattcagatcatgtacgtatttctgcagtatagtttccgttcctaacacagtaacatgacatgatcaaagttatttccgttgttacgagtctatctatggtatatcttctcaaataagactagctagactattgaatttcgattttctttgcagtaaatcgatccgtcactcatatcagaaaaaaagacaaaaaaaaaatcgatccgtcaacaatcaacatgtatatatatgatgaaaacattacgcaaaagaataaattcagtcgtccattcaacaacgatagaatcatagaatataagtcaacatctatacttgtaaaataaatttatttttacaacaataaaatgataataatgagttttatgagtcaacagaaggggtaggcaaggaacgacacggcaatgcgttgaccctgttttatgttctatatttaagaaacgaaaaatgtaaacacatctctaaataaaactgattttttttggggtaaggtctgttttttgaaatgtttatagacgcttaggacacttagagcctttcaggtttaatgctattggctgaacaatctctcttagattgcttcaagttacagtcttttttagatttcaatgttgcagtttgttggttctcaagttggcagattttctaggataggatcaatcttcttttactaggttcaggtctcttcacactttggtaagcaagaagctctcttaacacaggcataaaatgcaagttttaagttcagttacgaagctttgttttcgtttgctgtttttattgagaagttaagaagattgactttcaaacactgctaccatggtttggcctcttctctggtggttgatcatcgagcatccagacttttcccttttgatgtttatagtcttgattcagttctttttaatttctttctttagacgtctttggattgtataatatgctctctgtatcatgaatggtttgtacgatatgtttcatataaataataataccctttggcaaaaaaacaaaataaaataaaactgattaaaaccatttacgtaccgatttaatatattgatggtcatcaatataaaaacaagagtgcaaaagagtcaaaataaaacaaaaataaaccccatcacaatcaagataaagacaactaattttctgtgtttcttcaacaatcatagctttattaatgtaaaagatgtttcacacagacattcaacaaaaaacacaaacatacaatttttaacaaaagggaaagtaaatacaaacaaatacatagaacaaatataaatgtttaattagccggcaaaaacttatcaatttgacttcattttcaataaaaaaaccacttcaatgtcaatattttggccactttctttccaactcgatgggatggctaaagcttatgaccttgacattccaataacaaaactttggggttaataccattaaaaagcattatttagggattaacatgcaaagttttcagatattatgtcacgtgtcacgtaaaactccacgacaacgaaatgttatcacttcttcttctgtcgttctcagaaacacagagtgtcaaaacctggtcaccggaaaaaaaataaactctgttttcagaccgaattttctcaccggaaa

SEQ ID NO: 15090 - DNA, 3000 bp, Unknown
  misc_feature (1)..( 3000): cDNA_ID_1015175_gDNA_ID_2685560_Annot_ID_193469 3000 nt of promoter + ATG
gtgagtttcttttttttctttctttcgcttttatgctttgacagtttttgttttcacaacgttcaacattatcatagcatcttggcatcttggagaactaaagatgtgtaaatctcatcatttcatatcaagaaaataaaaggagaaaacgtgggaacattttacctttgtctaataatttgataaagaattgcatacataacatagacggttatatctacaagaaaaagaaaaaacacaacaaatagattttagtaagttagattttactcaaaattaaattacaacgtaattaaatgttagctgaaacatataaaatctaactttgtattctcttaagcagcaattgtgattgtgatggaaacacaaacaaagggagcatccataaaagccattcatgcttaaataagaacacacgtaaaacttcgacgtcataagacatgcataacggatacaatttttgaatggagttggtaatagggatttggaaaattcaaattatatagaaacttaagtgacatgaagtagagagaaatatgattttaattacacatgtttcaaacatatttagtgaaaagatcatatgtttatcctaaactgataacgatttagatatagtttcatttttggaagcaaatatgtaattttaaaatactaaatttctttttcctcatatctatcttacactttttatttcttattttgaaactgataacaagataagtcgttccaccagtttagttttggctattataatttggtaaaacatattttacacatacctgaagtttttatgtttacaatcttaatccaatttctatacaaaacttaagattcctttatacagtacgaactgaatcattaacccagtacttggagcttcctttaagcacctttttgtgaatatattaactaatcgtaaatgttttccattcacctaccataaacagttaattgattacttggagtaaaaaaaatcgatgacatacatgtaaaatatatgtaatatattgggcatcagggcatgtatatattgataagattcgagcataaaactcccacacctaactcaaagtcatcatcaaacctataagatcttcacttcttttaatttccttgtctttaatttatctttaaaaggtaattatatttctatctttctgtttaattatgccctttcaatcatttgagttactagtttctactaactgcagtttttacttttatttttctgtaaaaatctcacaaaagtacaaaggaagaaggacggacgagaagagaaaccctaacatgcatatgggacaaaataaaccagtccagaaaaagtctccattatatgaagaaagtactatcatttttgcttcaagtcaaagtatgtttgtgtgtaatatatttatacatttatagtaagtttctttcttggttccaaaattttgctaccagaaaaataaaggactacaattttttgtgaacaagtaaacatgaatagcgtcatgactcaacgacctattaaatatacatctctttcactaatattacgcttataattaacaatgttcaagggtggaattggatttttgcatttagattataagttctttcaaataattttattttgtatgtagatgaaaaacttgttgagatagagaaagagaagagacttgcgttaatagatgcatgggaagagaacgagaaggcaaaagctcaaaccaagtaagatttgccaatccaaatatatataatccttagttattaatgaggctagctagaaccataaagatcaacattgttctgcattcaaaattactaacaaatatctcacagaaatattgacgtgaccataattaaactcaaaacatacagttatatatatgtcgcaagaaatgcgagattacccgtttttatactttatattatcaatataatatttacattttgttattttgaatcaatgaaagcagggcttacaaagaactttgctcgattgaatcatgggaaaacaacatgaagacagctctagagttagatttgaagaaaatggaggtatatagagaattttagctatatcaatatattttctctttaacttcttttagctattcaatttatttaacgtttatagtgaaatacaaacaatatcatagaaaagtacttttatttataacttttattcatatagtctctcctctatgaatgcacatgtgtctatgttatatagttttactacgataatttatttctgttgatttttttttcaggagaatttacaagtggagaaaactgaattctcaaaaaaattcaagaaaaaaatacctgaaattgagaagattgcagaagccaaaagagaaaaaatagagaaacaaaaggagcaagaatctatcaaagtcgaaaaaataagtgagaagctaattgcaactccaaatgcctatccacccaataccaaaacttgtggatgtttctaaaacattttatatcctcctttcatgggtcaattctcggcccattaaattatcttattgggctttacttgtacccaaacatattaacgaaaaaatctgtgtaatgtgtgaactttcaagcatcaatgatcaatgttatcattcatgtgtgtatttaatatgactctatgcattcatatgcccaattaactcacaagcatcaatgatcaatgtatcattcatatgtgtatgtaatatgactctatgcctgatgcattcatatgctcaatttctctactaatacctttagttgttgtagataagatgttcgacaaaatgtgtaagtgaagttcttagaagtggttatgtattagtttgccttggtgtttggtgccacgtcatcaggtttggtcgtatcaagctagctgggtcgggttgagattcgggttaacgggttgacccaattacccattggtcgctttttctgatttcttctcttctcacagtgctctcacctaacgcagattcttcttctctaccatattcgttgaaaccagagaag

SEQ ID NO: 15091 - DNA, 3000 bp, Unknown
  misc_feature (1)..( 3000): cDNA_ID_2783498_gDNA_ID_2685560_Annot_ID_193466 3000 nt of promoter + ATG
tggaaaatctatgttgtaatcaccgatttaccgtaatttatcaaaattataaattatctacacgcatactgaaataaatgtatgtgaagctcattgtttgaacgatatagttacaagactaaaaacggtaaataacctcttttacagatttacatataacttgtaaatatatataacttcttttagataagcatataaaattaaaacaatatttacattacagataaatgtatgcgaacctcattgttttatttatatatttttctctaaaatggctccatctcttataaattaatccattgatcaagttggccaaataaaaaaaggcaaagaaaaagggggtgtatgagtaggcacgcatgagtggcacgtgtgaagaacaaataaagcaatggctaattttcaaagccaagtatgctcctcagaactaacaagaacaaggtgtgtcaaagaaccattacttttatgtaccgtcaaagaaccaatcttgcatttacacaagttcttactaacaaacaaaacaaaaaagttcgtactaactcaatatggtataaaccatagtaattaatacgtgtatatatactatatagatatcgcatgaactatattcgttgttaagttctttagaatgtagcaagaagaacaagttctttcagaatggtttatcatacacgggcgcacatttggaattacccttacgttaatgaggaaaaaataactaatactactaaactgaaaagatacttcgaaattaaaatttctgatgtattttgttttgatgttgataagtacatgtcaataagacaaccattgtagtttgtactttgtactttgtagtaccatttcatatatcctggttgaaccaatctcattttattttttcccctcggtaattaatcaacaattcgtttcaggaaaaaacgaaaaaaaaaactatattatattaccactttctttttatcattggtaatgaatttacatatcaattaaagtaacattatgtatgtttggtatataagttaggcagatatatattgtatacgtattcaagttgttagttttatttcaaacacactcgaacaaaccaccatttcgttacgagagtacccaatttggtttgatgtatctgtttttgattgtgatgtacgcatacatgttgtacatacatataaaataatgtgcatactgatatacatgtataccggtatacgttacgcataatctaatttctagggtcagtaacaagaaaagactaatttataaaattgagatagaaaaagtaaaaacatgatctaagctaaggttacagatatataaatgataaaatgtatgctttttcatggccatgtgtaacatatcttataacgtagttcaaactcataaatgttaaacaaaaattcaaactcatggtggtttgatttttttttttctagctgtttggtcctattgaatattgatcctattcttcatcgagaattcctaacaacgtaaaatctaattattcttataccttaaaacaaatttaggaaattatataacatttttggtgatgagataatacaataatagtatatagtacataggataccattttttatatttccacaatctcaatggacctaatcagaaaaaagaagaatgaatttgtttttattttttgcttttctaatataagctaacaaaatatacagcttgcttagatatatccgcaatagaagcttcaggtggggactgtgtaaggacaacaagacatatacattaaggtgtttagtttgattttcgaaaacatattatgaaattcgcatgttccatgcccgaggatgaaatttctattttacaattattctttcatgacagcttatatatactgactcaaatagatggaccggcgggcgatcggcatcatgtcctacccacgtcaaaattgagtgaatatctaagattttgaattgaatctaataaacatgtaggttcaatatgatactttgttatacgataaaaaaagtgagagagttttgaagaacattatgataaaaaatagtatctataagttccacatatttttctttgatttaaagaataaggctatatactgattcgttgagaaataacttttgttaagcaatacatttgttggttaaaacatcattttctcattctcagctacatttctaagtaaataagtatcaacgtcaaacttgaccgttggatctctactttttatattatctttagtttatcggggactcagctttgtaagctgtgacctatttattgactataatacccataaaaaggtcgcgtatcactcataactgaaggagggcagacatgtaaatttaattgcgtatcgatcactgttcccaaacccaaaacaaactttttattaataagatcatgtttacaaatttgtcggactatttttcattttaattatgaaatgcatttaataaaatgtataagatataaaagtttgatcttcttctttaatatactactaactgattactgatggagtacttttttaaggcataatagcacaactatgaaaattatattagtttttaacatatcataccaaattgaaacgtaaagagtttcctatacgatacagacaaaaattaattaaccgattaaaatatacactactaattaataacaattaacgtatagtccttttacttttgctaaattgtttattaatctcatctctcttttagatctctctacttacttttcctttttgtcccatttatataaaaatccaccgctcaagcttaacgttcgcgtcttcttctttcttcttcttcttcgccttctctctgagtcgaactcgctccgatcgactgagccaactcgcccgccttctgtaatgatcatttcctctacattgtactaaaaaagagtgttgtaatgactcgttccgggagacgatggtcggagcgacggtgagagttacagttttctttccggcgaccaatactctcggcggcggagatg

SEQ ID NO: 15092 - DNA, 3000 bp, Unknown
  misc_feature (1)..( 3000): cDNA_ID_2783494_gDNA_ID_2685560_Annot_ID_193463 3000 nt of promoter + ATG
taaacattggaacaaaatattacgcatatgaatgtctatttgaaacattttaatgagactttttgtatgagtaggtacaaatattacttcccatttctcgacacgaaaggcgaagtgaccgttgaggataaccgtgttggaccattatataagcatgttttcccaccagctctttctccgggactttcattcatcggattaccatggcaggttaatgatttttacaattgtgattagaatatgaagtaacaaactcttgatgtcaatcaacttattggtcaatgattcggatatttataggtcattctttttccaatgtttgaactccaaagcaaatgggtagccgcggttttggctggtagggttttattcgaagctcgaagcctcatgtattcccaaaagatacacacatcttatggcagaattagattctcaggttcgtactgtattcctttccataacatgtatgaaaacattatccaaaaagaaagcatacattaatttgaatgtgtttttttggttacagtttgtatacgataattggcttgctgatcaatgtgactatcctcgtatcgagaaatggagagagcaaatgttttacaaggtgttcaagagaatacaatcccaatccagtacatataaggacgattgggacgatgatcacctcatcgcagaagcatatgaagatttcgtcaaattcccatctaactatcccagttctttaatcgaaagagaatatacaagctgaaaaacatcacttgaagtctctgaaatgagggtatgtgggtttattacatgcgaaataatgcatattgtattgtaaacatcacttaaggtctctgaaatgttggaaacttacatgtaacaacattacttgaagtctgaaatgttcatgataggagcgagcttcttgtctttgaaggctattcttgtctcaacaagacaacaagtgattgcatcaacttctgtaacctagcaagaaaataacaaatagaattagtcatacagtattttatagtgaccagacattaccacaacgcgtcattagagtaaaagcaaaaaacgttaattcaactcacagcttttaccctcaaggatgatgcaagtgttttaagaaagcatatcgaggaagcttttgtctaatctcccatcatgcaacatattagcgaccaagccaatggttgaagcatctccaacaaacctgcaactcctcatttctctgatgagttcagctgatgctgctttgtcaccatctctcagatgtgccctgataagtgtattatatgtaccactatctggaagaggcccgtcttctttcattttttttagcaaggcataagcttcctgtaataggcgtttactacacaagcctgagatcatggtattgtaggttacaacattaggcttcactcctttaaggctgaggctacaaaatagatcccacccatcatccaccttcccagccttgcacatcccttcaatcatagtagtatatatgtaaatatcaagttttatctcactcttttgcatatagtcgaaaacctccaatgctttctctagcttcccgttattacagagtccatctaacaaaatgctgtatgtcattatatcaggaggtacaccatcagaaaccatctgtttgaaaaccttttgggcattatcacagtcgccatcatgaaaaagcccttggataagagtggtgtaagtgactgtatcgccaaccaatcctctatgagacatctcgcggaagagttccgtaccatcttctactctcttagacttgcaaaatccctttatgagagtattatatgtatctaaatctgggaaacagtccttgctaaccatgaactcaaacatctgcttggccttgtctagacgatcatgcatacagaacccgttgatcaatgaattgtaagtgaaaatatcaggatctatagaccttttgatcatgtcatcgtgcaatttctcagcctctacaaactttccttctttcacaaacgcatcgatcaatgcattgaacgtgactaaattagggttgattttcttctcaatcatatcactcagtagttgagaggcatcactccatcttccataactacaaaggcaacttatgagggagctgtaggtaacaacatttggtctaattcctttggtttccatttctttgaataggttgagtgcatcatccacatgtctatatttgcagagactatcgatgattgtgttgaagataacaacatccgcctctattttcgcagcttccatcttgttgagcagattaaaagccaaatcaatatcacctctcttacataatccatttactaccactccataagtaaccagatttggttgacagcctctttgaaccattcgatcaactaacgccacagcttcagaagctttgttgtggagaaaaagcccatgaatcaaagttgtaaatgtgattgtgtcaggtctataccccatttccaccatttgatcaaccaaagctacagcatctgaaatcctcttaccgtgacagtatccattgagaagagaagaaagcgtgacaatgctgggctcatagccgagtttcatcatcttgccaagaagagctaaagcaagagagatttgagagcgtcggcagaaacagttgatcaaaatattgtaagtatatagattatgtgaaattcctaacctctgcatcttctcacctagagagatgacaagatcaaactttttcatcttagcaatggcactcaacagtttattgaactcaaaaatggaaggtaaaggacgtgacttgaccatgccaccgaacaaaccaattgcatcatctaacttcaaatcctgtaacacttttctactcaagttctctctgtaatcaccactgctaccagaaaaagctcgtccccagcaacagaaaccgtaaagattgaaggagtaaggagcagttggatgattacctttccccaggagattccgacgaacagacaatctcttcgccgtggatgataatac

SEQ ID NO: 15093 - DNA, 3000 bp, Unknown
  misc_feature (1)..( 3000): cDNA_ID_2783490_gDNA_ID_2685560_Annot_ID_193462 3000 nt of promoter + ATG
cttcatcgtattggctaggtcctgccttatctcctcccatgtgggttaaggaagagatcatgttcttaagctcgtgctcgaaatgttgttgtcgcctgtgcttctctgtttcgcctcttgactcgcttagcttcattctttatcacccaaagcagatacgccaaggcaaagcaatccaactatgcatatataagctatatgtgattttatataatctttatgggaataaattatgagaacattgccttgtgttgcaattaaagaattggattttgtctgttactaaagttatagaatgactttccattgagttcaagaatatttttttttttaccgattgtaaaaaatgtgaaattattattataatttaagttgaaattatttatttattagttgaaaattgaaattattattcaagttttgaaaacagagttttgttccaaaagaaaaaaattcccaagctgatgccttgttcagaaaaatgaaagaagatgggcctcttccaggtttactggagatgcctcaacaataagtttggtgactaatatgttaaatgatgggagattgggaaaaagctttttttaaacagtttcatcatcctcgagaaaaacgtagtgaggtgaattaacgtttttgctgctattaatggaaatttctgttttgatggtatgacttagcttcatggaatctgtctgattatatttgttattttcacgctaggttccaggcaagaattgatgatgcaaacactctttacacacaagaatggttgtcaaagtcagagaagctgcgatcatgaaaatttcagacttcaaataatgtttgctatgtaagttctaagcttttcatcttttttgggattgcagtcttgtagtatatattctgctcggtagaattttatagcgggaagtatctctgttacaatcttattgttcaagatcttctgttgtttctcaacggttttaactagcggctatccgctcgttctctcgtctgtgtatgccttatcgatactacgttcccacatcattcccttactcaatcaacaacaacaaaaaataaagtaagtatgatgtgaagaaacacaacaacaacaatagattcatcctgaaatgtaagtcaggatatagtaacatgataagaagatactctactagaagcttgtcggcaacagaaatgacaatgtacttcgacataatcaatttacaatgctagagaaccaagttgtgccctataaaatggaaagtactagcatggaagtaagaatgaaaatttagcagcagcgaggccttcatcaactcgaattaatggagtaggagatacgctggtctctggaagcatgagcaatttaccattcttgatgtgggtctagaactgagcttcattttaaaacaaaaaccacaattatttacatctatcaaattttgtaatttgtgagctttctttatctcctacaagaccaccaaaacagttgtaaccatggttcaatacgagttaaaaagcttttgcagttcacaagaagttcaccaaaaatttcgttttttttcaataaataagcatttgacattacaatgccacatatgaggggagctttgggaagaagaaggaaggtgagaaacaaaacaaaagtctccctcgagcttgaagagagctccttatcaagttattcgcaacctaacggggaaataacaaagattagtatcagtcatgttcaattgttcatgaagcttttacaaaaccgtaaccaaaaatagacacatgagaacacgcgttgagaagtaatcaacagaaaagcaatataaaaagttaatttacctctcaaatgctgctttcaaaggaacatggtttgtccgactattctcacgaagataaactgacttaagaaagcatatcaaggaatctcctatcatgtaacatattagtcaccaagccaaaagttgttagggcacatggttcctcaacaaggataaactgtttaagatagcatttccaaaaatcctttgtccaatctcccatcatgcaacatatctgtgaccaagccataagttgaagcatctccagcaaatctgcaactcctcatttctttgatgagttcagctgatgctgctttgtcaccatctctaagatgcgccctaataagcgtattataagtaccactatctggaagaggcccgtcttctttcatttttctgaataaggtatatgcttcctccttaaaacctttcttacagaatcctgagatcattgttgtgtaggttacaacattaggcttcactcctttaaggctgaggctacaaaatagatcccacccatcttccaccttccctgccttgcacatcccttcaatcataatattatatgtgtaaatataggttccattttactcttttgcatatacccgaataccaccaatgctttctctagcttcccatttttacagagtccatctaacagaatgttgtatgtcatgatatcgggaggcacgccatcagataccatctctttgaatatttcttgagccatatcacaatctccagcttgaaataacccttggataagagtggtgtaagtgactgtgttgccaaccaatcctctttgagacatctcgcggaagagttccataccttcgtctactctcttagccttacaaaatccctttataagagtattataagtcactacgtttgggaaacagtccttgctaatcatcaactcaaacatgtattatcatccacggcgaagagattgtctgttcgtcggaatctcctggggaaaggtaatcatccaactgctccttactccttcaatctttacggtttctgttgctggggacgagctttttctggtagcagtggtgattacagagagaacttgagtagaaaagtgttacaggatttgaagttagatgatgcaattggtttgttcggtggcatggtcaagtcacgtcctttaccttccatttttgagttcaataaactgttgagtgccattgctaagatg

SEQ ID NO: 15094 - DNA, 3000 bp, Unknown; identical to SEQ ID NO: 15088
  misc_feature (1)..( 3000): cDNA_ID_3080583_gDNA_ID_2685560_Annot_ID_193461 3000 nt of promoter + ATG

SEQ ID NO: 15095 - DNA, 3000 bp, Unknown; identical to SEQ ID NO: 14715
  misc_feature (1)..( 3000): cDNA_ID_3018719_gDNA_ID_2685560_Annot_ID_193456 3000 nt of promoter + ATG

SEQ ID NO: 15096 - DNA, 3000 bp, Unknown
  misc_feature (1)..( 3000): cDNA_ID_2783490_gDNA_ID_2685560_Annot_ID_138174 3000 nt of promoter + ATG
cttctttccccttgaactcctcgcaggtatcttcaccgaaggtttctccacatcgcccgaaatgtcaagatgaacgccaggatcatgagtctcgtacttggcccctatcataatcgagttgttcacagcttggaagttgctattaacataagtgcttaggaaatcaagctcgtggtcgccattttggtctctgtctccatgattgttgtcaagctcggtcttcatggtggctccaaggttggatccagaaagtgtgatgactctgataccatcttcctcttcatcgtattggctaggtcctgccttatctcctcccatgtgggttaaggaagagatcatgttcttaagctcgtgctcgaaatgttgttgtcgcctgtgcttctctgtttcgcctcttgactcgcttagcttcattctttatcacccaaagcagatacgccaaggcaaagcaatccaactatgcatatataagctatatgtgattttatataatctttatgggaataaattatgagaacattgccttgtgttgcaattaaagaattggattttgtctgttactaaagttatagaatgactttccattgagttcaagaatatttttttttttaccgattgtaaaaaatgtgaaattattattataatttaagttgaaattatttatttattagttgaaaattgaaattattattcaagttttgaaaacagagttttgttccaaaagaaaaaaattcccaagctgatgccttgttcagaaaaatgaaagaagatgggcctcttccaggtttactggagatgcctcaacaataagtttggtgactaatatgttaaatgatgggagattgggaaaaagctttttttaaacagtttcatcatcctcgagaaaaacgtagtgaggtgaattaacgtttttgctgctattaatggaaatttctgttttgatggtatgacttagcttcatggaatctgtctgattatatttgttattttcacgctaggttccaggcaagaattgatgatgcaaacactctttacacacaagaatggttgtcaaagtcagagaagctgcgatcatgaaaatttcagacttcaaataatgtttgctatgtaagttctaagcttttcatcttttttgggattgcagtcttgtagtatatattctgctcggtagaattttatagcgggaagtatctctgttacaatcttattgttcaagatcttctgttgtttctcaacggttttaactagcggctatccgctcgttctctcgtctgtgtatgccttatcgatactacgttcccacatcattcccttactcaatcaacaacaacaaaaaataaagtaagtatgatgtgaagaaacacaacaacaacaatagattcatcctgaaatgtaagtcaggatatagtaacatgataagaagatactctactagaagcttgtcggcaacagaaatgacaatgtacttcgacataatcaatttacaatgctagagaaccaagttgtgccctataaaatggaaagtactagcatggaagtaagaatgaaaatttagcagcagcgaggccttcatcaactcgaattaatggagtaggagatacgctggtctctggaagcatgagcaatttaccattcttgatgtgggtctagaactgagcttcattttaaaacaaaaaccacaattatttacatctatcaaattttgtaatttgtgagctttctttatctcctacaagaccaccaaaacagttgtaaccatggttcaatacgagttaaaaagcttttgcagttcacaagaagttcaccaaaaatttcgttttttttcaataaataagcatttgacattacaatgccacatatgaggggagctttgggaagaagaaggaaggtgagaaacaaaacaaaagtctccctcgagcttgaagagagctccttatcaagttattcgcaacctaacggggaaataacaaagattagtatcagtcatgttcaattgttcatgaagcttttacaaaaccgtaaccaaaaatagacacatgagaacacgcgttgagaagtaatcaacagaaaagcaatataaaaagttaatttacctctcaaatgctgctttcaaaggaacatggtttgtccgactattctcacgaagataaactgacttaagaaagcatatcaaggaatctcctatcatgtaacatattagtcaccaagccaaaagttgttagggcacatggttcctcaacaaggataaactgtttaagatagcatttccaaaaatcctttgtccaatctcccatcatgcaacatatctgtgaccaagccataagttgaagcatctccagcaaatctgcaactcctcatttctttgatgagttcagctgatgctgctttgtcaccatctctaagatgcgccctaataagcgtattataagtaccactatctggaagaggcccgtcttctttcatttttctgaataaggtatatgcttcctccttaaaacctttcttacagaatcctgagatcattgttgtgtaggttacaacattaggcttcactcctttaaggctgaggctacaaaatagatcccacccatcttccaccttccctgccttgcacatcccttcaatcataatattatatgtgtaaatataggttccattttactcttttgcatatacccgaataccaccaatgctttctctagcttcccatttttacagagtccatctaacagaatgttgtatgtcatgatatcgggaggcacgccatcagataccatctctttgaatatttcttgagccatatcacaatctccagcttgaaataacccttggataagagtggtgtaagtgactgtgttgccaaccaatcctctttgagacatctcgcggaagagttccataccttcgtctactctcttagccttacaaaatccctttataagagtattataagtcactacgtttgggaaacagtccttgctaatcatcaactcaaacatg

SEQ ID NO: 15097 - DNA, 3000 bp, Unknown; identical to SEQ ID NO: 15092
  misc_feature (1)..( 3000): cDNA_ID_2783494_gDNA_ID_2685560_Annot_ID_138175 3000 nt of promoter + ATG

SEQ ID NO: 15098 - DNA, 3000 bp, Unknown; identical to SEQ ID NO: 15091
  misc_feature (1)..( 3000): cDNA_ID_2783498_gDNA_ID_2685560_Annot_ID_138177 3000 nt of promoter + ATG

SEQ ID NO: 15099 - DNA, 3000 bp, Unknown; identical to SEQ ID NO: 15090
  misc_feature (1)..( 3000): cDNA_ID_1015175_gDNA_ID_2685560_Annot_ID_138178 3000 nt of promoter + ATG

SEQ ID NO: 15100 - DNA, 3000 bp, Unknown; identical to SEQ ID NO: 15089
  misc_feature (1)..( 3000): cDNA_ID_2783514_gDNA_ID_2685560_Annot_ID_138183 3000 nt of promoter + ATG

SEQ ID NO: 15101 - DNA, 3000 bp, Unknown; identical to SEQ ID NO: 1384
  misc_feature (1)..( 3000): cDNA_ID_2134913_gDNA_ID_2910745_Annot_ID_193739 3000 nt of promoter + ATG

SEQ ID NO: 15102 - DNA, 3000 bp, Unknown
  misc_feature (1)..( 3000): cDNA_ID_3081395_gDNA_ID_2910745_Annot_ID_193752 3000 nt of promoter + ATG
aaccaaagcaggtctttttaagtaaagtgttaagagtagtcagtgagatagcaatagcagaaaaaggatgtgaacttatgtacgataataatacataaatgtacaatattatcattcccttggactaccagtactttgataattctaataaatattgtgtaatatagtagtctgttcttgttttttggtagcaatactataaaaacctaaaaacaattgaagcacctttttggctgtcaatatgtcataacacgggatcgaatacatttgaataaaccatatgaaaaagtgagaaaccaaaactcttagctatataatttccagccttccttcgttttccatttcaattgtaatttttgtcacagtcattaaacaaaacgcttttatgacgatatcaacggttatagcattcatgtccatgttcctagtatttgttatgtctggtccgatagtggtggagggacgtgcttttttcgtgttcggtgactcgctcgtcgacagtggcaacaacaactatctggtgacaactgcacgtgccgactctccaccgtatggaatcgattttccaactcggagaccaaccggccggttttccaacggtcttaacattccagatcttatcagttacgtttggttactaatctcataaaccggtttagagtaatcttgattcagatgagtatacaaatatttagtcataagaagctatttatttaccaaaaagacataataataaactggttaaatattggttaggtgaggcaatcggtaacgaagagccaccgttaccttaccttagtccagagctaaggggccggagtcttcttaacggtgctaatttcgcctccgctggtatcggaattctcaatgataccggatttcaattcgtaagtatatatataaccgagtctgacatcaaatgaaaattttcatattagtttccggttatttattagatataaattttggcatgcagatcaacattataagaatgtaccaacaactcgattacttccaacaataccaacaacgtgtgagtcgcttgattgggaaaccgcaaactcagcggctcgtgagtcaagcgcttgtattaatcacggtcggtggaaacgattttgtgaacaactatttcttgtttccatattccgctagatcacgccaattcactctaccggattacgtccgactcctaatttctgaatacaaaaaaatactattggtaagtggtaacagtcttattataatttgcttcattattgtaagaccaaaattgaattggaatgatgatatagtcttaggcagttgaactcatatgatttcaagaactttcactctcttgcaatgatttgactatttgagtattgttgcaaacaatttaattgtgtgttatttgtagaggttaaattcacttggagtgggtcgagttctagtgacaggagctggaccactaggatgtgcaccggccgaactggcgagatcaggtacgtcgaatggaagatgctcggccgagctacaacgagctgcatctctatatgatcctcagctacttcaaatgataaatgaacttaacaaaaaaattgggagaaatgtgtttattgctgctaacactaaccaaatgcaagaggattttctaagcactccacgaagatatggtaattaccactagttttccctttctaattatctactttttgtcgagaagaaagggttataacaattatttatttatgttataggatttgtaacatcgaaggttgcttgttgcggacaagggccgtacaatgggatgggtttgtgtacggttctatcaaacttgtgtccgaaccgtgagttatacgtcttttgggatgcgtttcatccgactgagaaagcaaaccgcatgatagtccgacatatcttgaccggtaccaccaagtatatgaaccccatgaaccttagctctgctcttgccctatgagccacacacgttgaagtgggaaactcggttttgtttatttcactcgcaagatatatgtatcgactaccgagtacaagagtatgaaataagataactcagtctcaatttaacttgttctttcttaaaattttaattggataaacttgttttgatttgatttacttatagagtatttgcattttgcacccaatgacatagaatgaaaaacaggtaagtaaatatagcaatgattaaaagaaatttggttaataatagcaaaaaaaaaatatattcttaaagtgggtttattaaatagttgttaaagtttaacccgtgtcacaatccaatcaattaattgacaagtactagatcatattagttaatactaactttgagaaactaaaatttattcataagacacatacatatatcaatatagtttccaaaataaagatattagttttaccaaatttaaagtgactttaaatatgacataatttatttatattaaatatattgtgtgacggatatatcaatgaaaagacattaatgtcattttgcataaaatcttataaaacacgtaatcatttttagaaacgacaaaagtctttaaaaaatatgacaaaaatcataaatacgtaataataaaagtagtctaaaatagttaatcttaaatctagtttaaattatcaaatcttaaaatctaaaaatgtatatatttcttgttatttactttctgattttttcagatttaatatttgtcaaactccctattatatgaactaaatatattcattttgatttaatcctttgaatatatttccaaaaacatagatattactaagtttacaaaactcttaaaaacctttacaaagttaataaagctgtgaggaaaagtcaaattaccaaaagtagccttcccaaaaagactcgaaccttctcactgagaaagaggtataaggtctatttcagagcatgaaactttgaaaacaaaatccctacagagagatagattgggaattgaatttgggaatccaggtttagggatgaatcgatcaacgatg

SEQ ID NO: 15103 - DNA, 3000 bp, Unknown
  misc_feature (1)..( 3000): cDNA_ID_3081387_gDNA_ID_2910745_Annot_ID_193754 3000 nt of promoter + ATG
atatattttttttttgctattattaaccaaatttcttttaatcattgctatatttacttacctgtttttcattctatgtcattgggtgcaaaatgcaaatactctataagtaaatcaaatcaaaacaagtttatccaattaaaattttaagaaagaacaagttaaattgagactgagttatcttatttcatactcttgtactcggtagtcgatacatatatcttgcgagtgaaataaacaaaaccgagtttcccacttcaacgtgtgtggctcatagggcaagagcagagctaaggttcatggggttcatatacttggtggtaccggtcaagatatgtcggactatcatgcggtttgctttctcagtcggatgaaacgcatcccaaaagacgtataactcacggttcggacacaagtttgatagaaccgtacacaaacccatcccattgtacggcccttgtccgcaacaagcaaccttcgatgttacaaatcctataacataaataaataattgttataaccctttcttctcgacaaaaagtagataattagaaagggaaaactagtggtaattaccatatcttcgtggagtgcttagaaaatcctcttgcatttggttagtgttagcagcaataaacacatttctcccaatttttttgttaagttcatttatcatttgaagtagctgaggatcatatagagatgcagctcgttgtagctcggccgagcatcttccattcgacgtacctgatctcgccagttcggccggtgcacatcctagtggtccagctcctgtcactagaactcgacccactccaagtgaatttaacctctacaaataacacacaattaaattgtttgcaacaatactcaaatagtcaaatcattgcaagagagtgaaagttcttgaaatcatatgagttcaactgcctaagactatatcatcattccaattcaattttggtcttacaataatgaagcaaattataataagactgttaccacttaccaatagtatttttttgtattcagaaattaggagtcggacgtaatccggtagagtgaattggcgtgatctagcggaatatggaaacaagaaatagttgttcacaaaatcgtttccaccgaccgtgattaatacaagcgcttgactcacgagccgctgagtttgcggtttcccaatcaagcgactcacacgttgttggtattgttggaagtaatcgagttgttggtacattcttataatgttgatctgcatgccaaaatttatatctaataaataaccggaaactaatatgaaaattttcatttgatgtcagactcggttatatatatacttacgaattgaaatccggtatcattgagaattccgataccagcggaggcgaaattagcaccgttaagaagactccggccccttagctctggactaaggtaaggtaacggtggctcttcgttaccgattgcctcacctaaccaatatttaaccagtttattattatgtctttttggtaaataaatagcttcttatgactaaatatttgtatactcatctgaatcaagattactctaaaccggtttatgagattagtaaccaaacgtaactgataagatctggaatgttaagaccgttggaaaaccggccggttggtctccgagttggaaaatcgattccatacggtggagagtcggcacgtgcagttgtcaccagatagttgttgttgccactgtcgacgagcgagtcaccgaacacgaaaaaagcacgtccctccaccactatcggaccagacataacaaatactaggaacatggacatgaatgctataaccgttgatatcgtcataaaagcgttttgtttaatgactgtgacaaaaattacaattgaaatggaaaacgaaggaaggctggaaattatatagctaagagttttggtttctcactttttcatatggtttattcaaatgtattcgatcccgtgttatgacatattgacagccaaaaaggtgcttcaattgtttttaggtttttatagtattgctaccaaaaaacaagaacagactactatattacacaatatttattagaattatcaaagtactggtagtccaagggaatgataatattgtacatttatgtattattatcgtacataagttcacatcctttttctgctattgctatctcactgactactcttaacactttacttaaaaagacctgctttggttttatacaattgtttgttgtatgttataaactaaattacgaatcatcaaatactagtgttaaacattttcaagttagaaccatttttttgtttgttttccttgtgagattatttctctttttttttaacataatgatgagatcatttccatccaattgttatttaataccacctatatccacctctcaagtttcacaagaaggaacgaacgtaagcgttgggacacaaatgacaaaaccctttactctttaacaagaactcacatgaggcttgcgtaatgtttatgacagaacaatgatattatactgtcctagcgatatttgggtttgattgagttaccaatataacccaattggcccacaagtatccaacattctggcccatttgacgttcagtatattatcagcgtggaccatcaatctgactccgcgccacgtcttcaagcaaattaaccggtttggttcgcggtttaattatgagaatgagatatacaaaacagagtcttcgatttcagagttgatttaggtttcttgattctttcttctttcgcttcaacacagtcgagtgactcgccatagcttcaacgccgacgaaacccactattcaaggtagccaatttcttctacagagcaacgtatcgatttgatttcgacctctttttgtttcttcttacttgcccattatctcaatttgtcactgaacagagatttaagttttagagttcaaaagcaatcctaaaaccctaaaccctaagctgagcaaaatccttcata

SEQ ID NO: 15104 - DNA, 3000 bp, Unknown
  misc_feature (1)..( 3000): cDNA_ID_3081421_gDNA_ID_2910745_Annot_ID_193744 3000 nt of promoter + ATG
  misc_feature (1352)..(1352): n is a, c, g, or t
atcagcttgcgaatatgcgatcttacctggtgcagaagttcctgcacacttcactgaccaagatacttcaggctccctaacgatcaacataactactaagactcttccttcacgcttaagatataaagcttgcatcttgctgtcaaaaggcaatataaatcttgaggatgaggatgaggattcgtttatgtctgtgtcttgtcacgtcacggggaaacagaatatccttattctcccttcaccagttctacgtggatatacagatcacttgtatatatttgattattctttctctctacatgaggatttccctgaagccaaagaagccactttcagcgagcttatgtttgacttcatagtccacactaaatcctggaacgtgaaaagctgcggtgtacatctttttgaggtccctcaccgtaggaaaataaacagaagaagaagactgtctggacagaaacatggagacatataatgaaactgaaggagaagaatctgccggaaaagaatgaggttacgccttgtgtatgtgtgatgtgagtagattttctgattccgtgtgatgtatttttccaagaagagcagctccatgccatccggcacaatcaatctggggtttatccaggtttcaagaatgtcgttagatttgagcagtgatagcaactagcaatcttaagcgtatttcagactgcataaaactcagtttctcgatatggatcaaccaagcactacttacaagctcatcttgatttgcttctgttctagtttttttgataaaagttgtatttaaattgttttgttttttataatggctgccaaaaaaaaaaaaaaaaaaaaacttcaaacatatgtaaaaaatctgattgtttctcctttctcaatttgcaaaagattattatctgattgtttttctttagcctcttagaagtctaaagcagatggatttaagtaagtctgagaatctaaaagagattcctgatctttcaaaagccataaatatcgaggaactctgtctcagttattgtggaagtttggttcctcgatcaagattgtatcacacgtcactgcaagctgccttttctgaatttatcaggatcaatctccagcaagaaagagaatgatttcatctggttggataaataaagatcagtgaagagttgcatgataatgatgagccagatgcagtttcatcatcaaaccctgctcattacaattgttaagttatatcatctgacacccctttggacccatctcagggcactgcaactgttctagtgcatatagttcaacatttctgaaattagaatgaaatctttggtaatgtagaaatttaggttcttgtaagatatagncatagcttatagataatttctttgtattatccgtgtaggttaggcaccttattgttattgacttcaaacatatgtaaaaaaaaactccagattttaaaaccacttaaaaatatatatatatcttattatataaagtatggttttcaaagttgctaattcataagattgtgccacgtgccaagtcaaacgatcaggtgtttacatgtgtcattcaaaatttaatttttttattctctaaaaaaataaaaaatctttaactttaacttttttatttacatcatgcaaattaatattaaatgagttaaaattaataaatgaaaataattgaaaagttaaatcctataagctaagctatttttctcaaaatgttttatttttcacttatgattacatgagttaaagacaaatttgttaattttccttttgttgaataaatgttaattgtttataaatatatagacatataaattagtatatgtaaatttgtttactttttaagattttttatttttttagagaataaaaaagttaaattttgaatgacacatgtaaacacctgatcgtttgacttgacacgtggcacaatcctatgaattagcaactttgaaaaccatactttatataataagatagacatataaattagtatatgtaaatttgtttactttttaagattttcaatttttttagagaataaaaaagttaaattttgaatgacacatgtaaacacctgatcgtttgacttgacacatggcacaatcctatgaattaggaactttgaaaaccatactttatataataagatatattttcaacaatgtttggtttctaaatatttttgtggatttttctttttttaattaattattagccttaggcgtttgggtattcggatcgggtatttcgggtcgggtttttgggtttagaagtttagaacccgttgaggtaatttaagattttaggtcgggttcgggttcaaatttatttatatattgaaatattaaattttgtgtgcaaatctattaaattacttgaaaatttcaaaaattcccaaaacaacacgagtggttttgcttaaatatatataaaaatacacaaaataactaaaatatccaaaacatcctaatattttctatatataagtataaatataactaatatatacttatatttgagatatgtttggatacctattccggttcgggttcgagttttttaggttttgaaatttagacccgttcgagtatttaaaaattttgggtacacccgcctatttaggcgggccttatctagtatatatatataaagagggtatagtaggcctaaacatgatcatacgataagcatggatggaatttagaattatactattgatgaatctgaatttccttgaccaatcaaagtgatctgtcagctaaacaaaagaatttaattcccaaaagcgagtatgacgtgtcatcctatatacacaagtggcatacataattgaaacaaaaatgaattaaatcacagaaataaaaagaagcagaggaagaagaataactgatttacataacagttatttcttggcttctctgattctcgaagtttctagtgttctttgcttttatttctctacgtttatcgagaaatctccgggctgaaaatg

SEQ ID NO: 15105 - DNA, 3000 bp, Unknown
  misc_feature (1)..( 3000): cDNA_ID_1012088_gDNA_ID_2910745_Annot_ID_193741 3000 nt of promoter + ATG
gatgaaaaaaaaaaaacgatattgctatttgatttcctatatttttgtatgaattgattgtagaggattcttcttcttctgaacatattgtagtaatatatatatttttaaagaaatattagatcgaatctcacaaacggaagaatctttccacgttttgaggaatacggtctgtcactgtcacctacacatatgaaatataagtctgtttagggtttttagcgtcggtcttcagattttgttggaataggatgtcctaaacatcaaagatctaaaaattaaatcaaaattgaagaaaaaaccttagatacagatctatttttggacatttagtcactcttttggacgcttctttggacacacaaacacacataccttagacacatttttcaaacatttaaaattttagatcctctatatttggatcccatcattggacaatgtcaaatataaatctagttcaaatgtctatttgtaaattttttattgtaaaatatggatcccattgttgtagatgctctaagggaaaatacgtatggtcaattttgtcaagattgagaaagaaaagttgaaccatatataatataacttaacattgattatgtttttcttgtggtatgttttgttgttttgttgtttttagttgtagttttcagtcttactctcttctttgtttgattgtttccctattaatcgctgatgcaattcaaaaatggtataaatatttaacgttataaattaatataaggtgagcaggaaagctttatatttctttattacttgcaagtttcattacttgtatttcatttcaatatttataggataaagttttataacataaaaaatatagtagcttcaacttttgttattatatagtctatgcaaaaccattttaaaccgacagataaatgcacacaactgacaaatttgttgttggttgaggtatggattggcagcaaaaaggaacttttaaaaatgtgaactttgactgtgaatctcccaaaaactcccaacttcttcaccgtcatcgtcaagcttacgccaaccacttaatttattacacatagactatcatttttctagagacaacccataaacaataaagctactttttcaaatgtaacccccatattctttttgttttgctttgtcaataaatgtaaagccattttttattttgtaactgaaacattttcattactatttggctaaattagctaaacttttcttcaatcgtttggctcacgcttctttttttttttttttaacgcgtgcgtttaattaatctaaatgcaaaccataaatctataaatactttttactaaagagagtcagttactcaaatggtgaatagctttatcattcagtagctacaatttacgggaaaagaagtaatggtatccaaatatttaatttatagtgctctgaaagattcaccatatattgaaaaactagaaatagaatttttctattaccattttaattatggtagacaatgtaaagctcatgttttttttcttcccaaatcttgaaaatgagttgtttagatttttaaactaatagatgtagtattttttccaaagtcaatagccatggtttagttacagaaaataaaatggctacgatttggtcaaatgatttatggcttgtagattaatattcgatatttaaaattacgaggatcataaacaaatggattgaataggactataggagtgattcattttctaattttcccattgggaaaatagcaactaggtcaacgacaaagaaaagtcaagacttgtttatttctgaattctgaccgtatatcactccacgaggccaggctcctgcaactcaaacgtctggtttcagtttggaccaataaataattttagagtttatatcttctaaaatcaaatgtagaatttgcatggattatatatggagatattactagtttaagatatcctataataccaaagtcatcctcaaatgtaaacactgaactgtttccatttattagtatagactcattgattgaaaataatggaaaactatagatgatgataaataaggaaacatcaaagagctaagtatttataatagctaataattaaaaattatatccatcataaacaaaattcaggaattcccatgtgaaaagaaaagtggaccgacaatataatagtcaatcatcacaaatagtaagaacgtaacatagcgttagatgcgtattcatataacattatgaaatgctaactgattgattttttctctttttaataaagtggacatctttgtcaacaaaatgggtagatttttttttaatgaactgtaacgtaaagtaaatgtgtcactgacaaaacctaattaataaaagccgtggactatagcgcgtttcttctctcctttttcacaccttcccctgcactcttcacttttggtttttgtttttcttctattataatggtttaataaaatatatatagtctatataatataatataatatgtaacaatgaagttttgtattcgagtttttatccaacaaaaatcaggaaaatagctaactgttttttactagtaaatttctgattacaacttttaaaaaatatataacacttattgtttactttgaattttcatatcaaggtgacctagtagggattgaactgaagtaaacttataaacacataattttttggaaacgtaagaacttgaatttgtgatctatccaattgtttttttttcaatcaatccaacttagaagagactctactctccactagttgtaattaaaaaaacaaaaacaattaataaaatgaagaaataaaactttgtatatctctcataaagtcgactatttagacttttagaggtaaggacaatatcttctttgcttacataccccactcttgttataaaagacagtaacctttcttgagatcactctttcttatttgtgtgttagtgcattgagagagagagagagagatagaaagagaaagaaatcgtc

SEQ ID NO: 15106 - DNA, 3000 bp, Unknown
  misc_feature (1)..( 3000): cDNA_ID_3081428_gDNA_ID_2910745_Annot_ID_193742 3000 nt of promoter + ATG
actcgaatcctgagtttctagagaacatcgtcacagcattgcacatattctcgacttctgagaagaataaaacactagttgctgaaaaccctcttgtgcttcctctgcttgcaaagtatatgaagcaggggacagttctgactcgaatacactctgcagcgactgtgaattcactttcatacactgattctaacaagattatcatcggtaactcggaagtactcaaggctctcatacatgtaatcgaagagggtgattcattagccaccagtgaagccttttccgcgctttctaacctctgtccagtaaaggagatcagtgaaaaggcggtttcagagggtttgattcgtgcggcaatcaaaaagatcaaagcaggaagcaatgtatctatgttgttatctctcttggcatttgtttctacacagaaccaccaaactaccgaagaaatggataatctagggcttatctatgatctgttcagtatcttgaggaactcaaatagcttggtgaatgatgagaacgctgtagtcatcgtctacaacatttgtaaaagttacaaagccttgcagaatgtggtcctaagagaggagaaacgggatgtggtcctagaagaggagaataaacacgggacatttacgaggcttgagaaccaagaagcaggtcgtgccacgagcctagcaaaaaggattttagagtggattttacggtaaagagccgcagagggcatgtagtaatcatcaagctcacgtttgaattaccactagtggagatgagattttgtaccaagcttattgatcttcttaaacccctaaatattctttttcttctttgttgaacactttctgagagcaatttcaactaaatgggtttttctttttcatcttacacgttacttcttgcataatatcaaagaatgttacatattctcggcttcgactataccaaaaatttgttgacttaggttgctcactccgctctcagacgtagactcgaatcctgagcttcaagagaatatcgtcacatcattgttcaacatctcgactgttgagaaaggataaaaaagtaattgctgaaaaacttcttgtgctctctctgtttacaaaatctttgaggaaggggacaaatcaaacaaaaagagtctctgcagcgactttaacgtcactttcaggcattggttctaacaagatcatcataaggaactcggaagcactcaaggctctgatagatctaatcggtgactcatatgacttatcagccacgggtgaagctgtttacgctgttttaaacctctgttttaatgaattggagaacgtggaaaaggccgtttctattatgcatcaatatttttctcaactatgatgtgtctcctttggtttctcgaatattctgcaaagaatcttgagttgcttttgcaagtatactacttctctctatctttttttataaagaatgttttcttggcttcaggtatttattgatttatttaagagattatacgtttcgttgtttgtcgaccgttaaaagtgatgcagaggagttagttgaacattgggaccaaaagtagcataatcatgacacatggccatattaagacaccgacctgtaaatatgagtcgcacacaatggagactgcgtaaaaaccaaaggaaacagcaagtgatcatgtggatgttttctcttgtattcttccaaatgttctgctgttcgctgtcacattcacgaaacggcacacactttgatccctcccacccatttttattccctctcaagtctcaagccataactcatttgactttgacataactttatataagcctttttttcgtttgacatcatatttttagtgtagcttattttatcgtctaaatcgtgttcactaaagcttatattttggttgggataaacgaactaaacttcttcaaactttatagaccacactcatcagcaagctatacaaaaaaagaaggcattttctttaaatactcgcaaaaaggtaacatactccagcatgttgctcatttttcgtatactcaaactataaccacaagaaattcaaatcgtgtgatttacattacatctttaataaatatttagaagttgttatgaatttttattttttctagaagtatgatatgaaataaaggaataaagtataaaattctatttgtatatatcgatagtaataatctaataatataatatgacgaagaagataattgtttgtatacacaaacaacaatatataaaagtttataataactaatctataatgtgaacatgtccctatttagtagaagcaaatccgaaattaagctcttctctaattttcgtttacacatcagaatagtaaaccgcgtggtgtaagtgaattaagctcttctctaattttctctaactaaacattgccaaaacaagcatataaaaaaatagaaaaatatgttaaataaaatcatatacaaaatataaaaaaaaaggctgtgactttccaataaaggaagtgatcttatttagacgagtataaaataaccttaaacattaaggatatacaaattaccaaccatggtaagactaaaaacaatctaatctagtggactaataaagtgacagtagaacattacacggaattcttaattagatcatataccatagcatgcttaataatatacactgaactaaagaatttttattcaccaacgaatctgaaaatttcctaaccaatgaaagtcgtctgttagctaaactattcccaaaaaagaatgcagagaatgcggatatgacgtggcagttatatacacaggtggcgtacgtaattaaaacaaaaatcaaaaattttaattaaagattaaagaaaaagagccaactgattcacatacatatttgagtttcttcgcttctctctcaaattcccctaattctcgagtttctagggtttttgcttcttttgctttgggtttttgtgtatacacgtgtgcgttcgtcgagaattctccggctgaaatg

SEQ ID NO: 15107 - DNA, 3000 bp, Unknown
  misc_feature (1)..( 3000): cDNA_ID_1393841_gDNA_ID_2910749_Annot_ID_193781 3000 nt of promoter + ATG
agacgtgtggagcacacaatacacatacgattttaatatatttgggcttctgtttaaatattttaaaacccatttcatcaaatcggtaattcatcactaatcaagatccaaaacatacatgtgtaaagagaatcctaagaaatcttttatagaaatatgatctgatttatagagatgacttataccagtaggtcaacggcaccggacgacacgaacggctgtacggcgttcgttggaggtgcaaacggccatgatggagagacagattacaataattatgacaagatgtgttagtaaactcgaaccatcatcgccaccaccaccacaacatgacatactcatcccacccattcttcttgtatccttaagatctgattatgtgtttataagggagatgagatgagaattaaagaggaaatgaatgttagctgagaaggatttgtctttcgagtttttgaattggtactttgtttttttaaatggtatttgttggacttgaattattcaacttactatgatgtatagatattttcaaattgttcttaattattttggtgtgttcttcgaaaatgttaatttgatagacatatgctctattcaatgtgtaattaatagtcgtcgacatgcatgttgttatttaactaatgtgttttcacctaccaaaattacttgatgttatgttttcataaaagatgagttaaagtcttgtggatttgggattgtatcccttctaaatttaaatattttattcgcagcatactattattaatagacttcaaattggtattttcggttattgagaaaaaaaaaatttggaccctatatttattatgtaggacctttaagtttcaaaagactaccatataaccaattatttctctcgaatcatgggttgaagtctcttccctttagaccatttctaagtttatagagaaattgcttaggaccactatgtccaattgactaattctatgatgccccttaggcacacagtgtcacaagtgtcgtttaactaatttggacatgaatgtggcagacgtgtggaagcacacgataatacacatacaatcgtcatatatttgggtttgtgtttaagtattaaaaagcccatttcaccagcatactttcaagtattgtttacaaaacccactccgaacattcgtttgtcaccgcccaccgacaataccataaaagaaatttaaatagattaagaatttggaaaatgtgtgaatcgtatacatcgtcaagtcaagtggcaagaaattgttacttggttccaaatgtttcaaactcaaacccacctaacacggacctaaaggccttttgttggttcccaaacgccgatttcttgtcttaattttagtgacacataaagtgccacgacgcctcttattgcatttttcctataatgcgacaagtttataaaataaaataaaattggtacacataaagttgtttctgaatggtttgagaatttgctatgtgggtggttaactatcatcaatcaaagttcaatatatttggctaataacagctatttataccgcaacttgtaaactagataaatgatagtgaaaatatataaattaccgactgtatagtactttatctctcctttggcatctcatatcaagcccatataaattgaaatttctgtgagaaatcatagctattttttgccaacgatatacaatgcagaagatctacaacttgtccactcaatttattatatttttagaactataatgaaaaccacaaagagagaagcagagagaggatgtggtcgatatgcaaatcaattagtcgcagcttcacagtactatagagaatctaaagggaatatacttgcatggacctgagtcagcatgaattttcttaacctctcatgttacgacacgtgttaacctgtctgaacagtacgttaatttaaaagatccacaccttcgtcgatgacaacttgacatgacgtggctttttctcattaccacgttggtttctcgggacaaaacaatattatccacttactgtttccgtttttgacgtaacatcagttttcgaacaacctatgaatatgattgtgtttttccatttgatgcatggagataattaatttgttgttccttacctctagccaactggccaagcccatcatattattggcaatcaatcattcagtattttagtgcatcattcaccaaatcagaacgtttctggatattgttcgttgaatcttgcaagcataggtttattcagttaacttggataagattccaatcgtctcgatattccaactatttgaacagattggcaagaattatgatggtaatgaaaaatgagtagatcaccgtacgctactcttcttaaacgatgtgatgatgagaaaccataagttgtcattgacgaaggttattaaaactaacataattacatgtatctttacattttccgatttcacgtaattaaaaacgagcattataattgttccatgatcgatattgtattgtcgtttttctcgatttgaactataccactagaaaatactttttaaagtttttttgacaacgatatttttttggatcctccgttgacgaaaataaactaagttttaaatttccttaatagtttcatttttcgtggtcacacttgaagattaaaattgtcattaaatgcaaaagcataaaaatgaaaaagtgaaatattaagcggctacaagtatgagagcattgtggtaacgacacgtgtaatgtccaaataggcaacgtttatccactacctttcatcttatataaacagattaacgtttcttttcttttcttatataaaccaaatccataatcctcaccatatccacaatcctcaagctatctcctttgtgtccataatcgaaacgctttttgcgatttatcctaatcttttttctatcttctgctacaaatttggttcttttttggttgaatttggataaaatcataatctcctcttcaattttcttgtgaaatg

SEQ ID NO: 15108 - DNA, 3000 bp, Unknown
  misc_feature (1)..( 3000): cDNA_ID_3080627_gDNA_ID_2910749_Annot_ID_193786 3000 nt of promoter + ATG
tctaaggcttatgatagagtagaatggccttttttaaaaggtattttaagggccttggggttctgcaaccaatggataggttggataatgggatgtgtctcttctgtttcttattcagtactgattaatggtcaaccttacagtcatttcttaccacaaagaggtataagacagggagatccgttatcaccttttttgtttgtcatctgtactgaagctcttactcatatcttaaaccaagctgaacgatgtggaaaaattactggaattcgatttaatgatgcaggtccttcagtgaatcatctattatttgcggatgatactttgatcatctgtaaagcaagtcaagaggaatgttctcagattatgcattgtttatcacaatatgggcatatttcaggacaaatgatcaatgtggaaaaatcttcggtcacctttggaaacaagattgaagcagaaacaaaagattggattatgcatagatctggaattcatgtggaaggaggaactggcaaatatctaggactaccagaatgtttcagtggctcaaaacaggttttgtttggctttcttaaagaaaaacttttatctagactcaatggttggtatgctaaaaccttatctcaaggtggaaaggaagtgttgttgaaatcaattgctatggcatttccagtttatgccatgtcttgttttaaacttccaaagagtctatgttcaaagttgacttctgtcatgatagatttctggtggaatatgttgcctggaaaaaaaaaaaatacactggattggagctgaaactttaatgctaccaaaagttctgggaggctttggatttaaagatcttcagtgttttaatcaagctctgttagctaaacaagcgtggagactgcttagtgataaagacagccttctttctcagatcttgaaaagcagatattatctgaattcagagttcctatctgcaacaaaaggcacacgtccttcatatgcttggcagagtatcctttatggtcgagaattattgagaaaaggtctgaaaaaggtcataggaaattgagaaaaaacattggtttggatagacaattggctttttgagggtaaaacgagaagacctgagagtgttcaggtgatggtggatattactttaaaggtcagtcaactaattgatccagtttcaaagaactggaacttgaacatgctcagagacttatttccatggaaagatgctcaattaattcttaatcaacgaccaatgctttcaaaagaggatgcttattgctggtcaggtacaaatcatggtttatacacagttaaatcaagatatgatttgagcagtagccagaatcataaggagatgtttcacaaagcacatgaacaaccttctgtcaatcctattttccaaggtatttggagtctatacatagcaccaaaaatcaaaattttcttatggaaagcagttaaaggtgctgtcgcggtggaagagagattaaggacacgaggaattctaatcaatgatggatgttctatttgtcctgaggagaatgagacaataaaccatgtcttgtttcaatgctctttggcccgtcaggtatgggctctatctttgatgcagtcaccaccttctggatttggaaattcgatttttactaatatgaaccatgtgcttcataactgtaagaatcaaagtatattaagactcatgcgatatgctagtccttggatcatatggactctatggaaaaatagaaataaaagtctttttgaaagtgatgtgtctatctctaatagcatagtacagaaagcatttgaggattggaatcattggttatctgctcaagatccaaagactcagtctgaagacacaaagaaagaaatgaaatggattcctccgccttggaatgaattgaaatgcaacattggtgtggcgtggtcaagtaaaactcaattagctggtgtttcatgggtagttagaaatgatacaggagaggtgcttatacacagtaggcgatcttattctcaggtacattctaactttgaagctaaactgaaaagctgggaatgggctttagagagtatggataaactacatgttgatagagttacttttggagcttcttctcatgatattatcaaagcaatgaataaaccaggagagtggccagctttgagaggacatttggatgcattgctagatctcactttggataaaccgcattggtatatggcaatggaattaagacagtgtaacacgggagctaatgagatagcaaaaagcgtgataacaggattgagatggcagagttatgttgctaaaggacctccccaatggctacattatctttttgactctgaattaattcatcagaggagtcgatgtttgtctcctttataggagaattttgtgctgagggtctaaagagtaagtctagttcatacgaaggacttcttgtcagatagtcaacatcagagtgttgatttgttgattagtttgagttgaaaagtgtcttattctacatctccacacgtttacttcagagtaaggaagggtaagatatttgaaatatttagcatgatccattagcttctaagttccctattggaaaggaagtctggctgtctcagaaatgactcagcaaaaaagctaatgacttagctattcagagttcataattagtgacacatgtttgactcaggatcatggctaaataaacgtggccgttggttagaatagctaataaggaggttagtggttcaattatgggggtgatagggatcgggaatttcctttttcttgtcttatatatataagtcggttatgttaagtcctatcatctcttagtatccaaattaggcgagagttctttttaatattttgttagtttaatattattttagtcggttctgttatttctctaagtctttatatatctttcctgctctccttagttagtctatttcccatccctttagttcctagttttcttctctcttatcactatg

SEQ ID NO: 15109 - DNA, 3000 bp, Unknown
  misc_feature (1)..( 3000): cDNA_ID_3080615_gDNA_ID_2910749_Annot_ID_193789 3000 nt of promoter + ATG
gtaagttgtttcagagggattgatagttacctgctgcaagtaggatcttcaccagtgttgtcacaaactttctccaaaccaaaaagaacaaaattcgaaaaactgaaatctttcacccacacctgcatcccggaacacaccattactgctttcttcgttttttcagaaagttaataaaccaagcggagaaatttgtctgatcactactgagtattccagatttttgcaaaattaaaactgctattctgataaacatccagtgcactgagaaagtgatgttacctctgttgggaagtggtggtatgttttttgagggaaatggtaatagtaaggaggcagatgaggaaccatatcacggtcatgcgtgatccggaaggtattgggcacaagcaaactgtaataagatgcaaaagcggcattcccaacacgaggttgcccaaatgtcataacctgtacgttttcttcaccttcatttacctgcgatttgtatccaatataagccattaacaactcaaaggacaaaacaataagataaaaaaaaaattcaatgcaaggatgattacaactaggtctagaccacaaaaggaagccatggctcctcccattgaatgaccggtcactatgatgttgatgttcgccccgtagacttttttcactcgtgttattgcatccaaaaccgcaggccgtaaagttgtattgtgataagcactgtaaaagccatggtgcacctgccaatgtggataactattacaaattccaccgtactacaagaccaactcaatgacaaatacttgttgttaaagtgtaccattgcatctggcatgtcagggtaattcagatcgagctgtttccagaacaagtctgagacccaattttgtatgctgcacaagttttggattgattaagcattaaccaagtttatgcgaaggagtagcttttagattacaatgactagaataaaacctgtgttcttgagttccccgaaatgcaataatgatagcattcaaatccttagccaccccaacatacgcctgttgttacaagttacatgtactgatattaataattgttcaatgaagaaacatcatgagttcatgaccagctgtagcttatgatatcagagcagacctgtaagcagtgttcaacgtcaaatatgacctctattacttcgaaatcctgcaccatcctaacaaacgttagagctcaactcaataattgcggcttcaaagttcaaacagtgatctgcttcaacatgtgttttttacctttgtcaaaccattgcatctttcgcacgtccaagtgaagagttttgtcaaatcagactcatagacctgcatacatcttacaaacttgattcactcatcttatgtacgttatcagcatcatctcttttctctagtagtgcaaataatgataaatgaaaatatgaagaggacaagtgtaatttcttctcacttgcagaacactagatataaatgacattcgttctacagggtattacgttttgaagctaaatcattatcaaaggtcttttactacttcactaatctgccattaacttaccgcagaggcatactccacaagcgtgacggcaagcgtatggttgtaaacaggtcgatcatcatcgctcttcaacttgagaactgcagttagaagaaagaagctaacataaatccacttgcttcagtcttaactccttcgtagcctcacaactcataccaagaacatgaaattgtcgaaaacataaagctttgaaatcaatattttgaccttcatggttccttatgtatatgatgatgctacaaggattatgaattgatttgttccaaacatgatagaacatgtaattaggccttaatgaaaaatcactgtagccagattaaatttccaatttcccaagcacttcacattacacagaaagtttaaaatcttaattaagctcagagagactcaggagaataaaaaaactggaagtcccaataaaggaaacagacatagaatcattatagaagttgcattaccacctctaccatatgaagatgaaacaagaaaagtaaaaactgccagcaagaacaacaatctcttttgtcccatgttctgcaagaagacaataaacacatccacatcatcctctgttcatcaaccaatgttaagggcaaaattgagctaaaacaaagcagaattcggaagcaaattagccaaaaatataccttataaaacgagactcacgaaacccaaactaatgaggattaggacaaaacccgaaagagatttcagcaaccaaaagtcccagataaattaaactgaggatccaaagcctaaattggacttcttttacaacaattcggaaatttccgacgatgatcggagattattcccggcaagaaaattatacggcgagcttatatattattatatagaagtcgtgatcttgcgaaacagaagctaatagaagaaaagaaacggcgattaaaatacgaatattcggttttttttttcttaacttccactttcatcctctatacgcaaaggtgcatgagacaagcgtgtaggctctttcaaagggtattattggaattttaggtgtgtagcgtgtcgcaacttcaagtgctgaggtgtcagatacgtgattcgggcggataaatggataaggccgttccgttataagaacgagaagttgacctttttgactttcgctttcttctaagtttaacttcgagcccatgggcctttaaagcccgaattccaaggcgggaatttccgaaactcttacttctcaagtggcgggagaatctttataagtcaagccaacgtggcacatctcagccgtagatttgatttctcgaaatcaacggggtaaaatagaagctacggtcgtttcaaacgtcgggtttgttgcttttaatttcacttttgtttatttactaaccaaagcaaaaaaaactcaggaaccctcgattcgatctctcagacgaaatcaggattcgtagaggcgcgtcg

SEQ ID NO: 15110 - DNA, 3000 bp, Unknown
  misc_feature (1)..( 3000): cDNA_ID_3080607_gDNA_ID_2910749_Annot_ID_193791 3000 nt of promoter + ATG
tacatcacatgattattataaaaatataatagcgcattttattctatatataggctgttcacgacatattcaaattgcatgacaggaaaatatcacctttaaattctaagaatacattatcttgtatttaagtattgaaagttgacattcttttcctatttttattttgtataacatatcccatacgaagacatatatattgatcaccatatatcttatcctataacgtacatattttctttgtttccgtataatctatatacttcccactatacaagaacccttttaacaatatttgtgtgcaactaatgattttggtccctctaaacttaattcatcaatggccagtataaaccaaaattttaggacttcattggacaatagttttcttaaaataattttatgtaatagtactacaacgcgatatataaattaaatcacatcatttttgttatatctatgtgtgatatactgatatatattttgtaaagtttgacgaaaataaaaaagatctatattatatttagcaaactaagaataacatattgtaggcatttccaccatgcatgcatgaaccaaattttggccattggtcttctagcaggccaaactttgaggtccaagagtcgtacatgcaaccatcatcgaatctgtagttatcgttttatgatatatgtaagcaagtctataaaggagcatctgcagtttggaaaaagaaaggttcttttatgtattggataaatgttcttttcgcgtgcttgtagccatcaacacatcccaaccaaggattcggtggaattattaactaaaaggccaattactttgaagaggttataaataaatcctactaaatcaaggatgacaattgttctatattataaatatataatcgtcagaatgtcaatgaaataatagcatcacgtttgcttcttgaaacaagctttgcagtcacatataccctatttataaacagatttagttatttggaaaattatcacataccagttatatatgtcttcttctgttataaagctgttgagtcgaaccattaattaatatttatatgtacatgtgattaatctcaaaatgtttggcatgttgcaatggaccgtacgtctaggtcacgcatcttatccgacatcatgggaccagatcacgacatggtctagtgagaatatatatgcatatctaaaatgatcttggtctgattgctgatgcattgttttcccacatcttaaagatcatgcatgggccgggtctaacccatcgtcggctaccaattgatcttggggtgattttgaaggggaggggtaatgaccatttcttgggttcgagttctaccaacagataattaacattagtaatttctggtccaaagagactataactcctcggttgccgaaaagaacaaaaaatcatgggcacaatgcatgcttttgatgtttgtgtgcatttaaaaacaaaatacacattgtttaagctaaccaataaaacatgattagcgaaatggaattttaaatagatctcgtgtttgcctgaaaaagttatttaaaggggacctcaagggcatatatacatacaagtctgtatgtgtttttactttcatacgtattctcgattcgttgtccttaaaattcgttagtcaccatgaaagcaaatgaaatgcttagctcatacgtagaatctttctctcttcctctcacttataattattacttctttttttttgatgagttacaaaatgtggaagtggcgagtcgagaatagaatcctcacgttggagaaggggacgtggcctaaagaaaaaaagagccctcgttttggataactatttctccaactcataagatgccttctgataggctttacatattccgtttttagagagaaagaaagagagagactcaaatctaacaaaatgcatatgcaagaaatccaacttaattagctctaaaccttatagttagtaattatggtaggaaacattcggaaacttataatgtttttcgttggtcgtgaaacttaaaaacgattagaggatcctaattagatattaacttaattcgaatttaaagtgcagaatcaaatctcatgaacactttttgatgctaatcctcaaaggactaggtgggagctaggtatcctaattgtacataaaaataattatcgacattagattgagtagaatgctagatttacaggattactattttaaaaaaactcaactgtcgaaaattacttataaatgcgcatgcatgatccagtgacttatcaacgggatgtctatctagttactttttcaaaaaaatccgtgattttatctgatttttcaatatattgtagctacgaaatctagtaaatttttgttgagtcacaatgagttatagccgagaacaatataaaccttattaacaatacaaaccttattaaaaacaatataaaccaacccttctcctttattaatcaatcatttaggtatttatttaatattacttgagattgactattgtctattgatcgactatagatcgctttatggaaccgtacaaaggacattctcaccttttagagatgactatatacataggtctaattctaaatgccaaatggacaataaaaatgaaaagtaaagataagttcgaaaatcattagattctcaatcacttacattttgtgatccaaaataaaattgaacttgttgtcgctttcggacacgatatccttagaaacaaaatcccaacatatttccccatctaatccaataatatcatcgtcttctctgcctctatataaactaacacttactcacctatttcatatatccacacaacatttacacaatacccttattctccacgtagaatcaagagtacttcttttccttaaatctctacaaaaaaaaaatcgatctatatactaagagatcataaatatagattcatagacctatttaagaaacgacttaagaagctgttggatcatataccatataaaatagca

SEQ ID NO: 15111 - DNA, 3000 bp, Unknown
  misc_feature (1)..( 3000): cDNA_ID_3080619_gDNA_ID_2910749_Annot_ID_193788 3000 nt of promoter + ATG
taactcaagcaaatcaagtacagaagatagtaagaagcatgtctaaggaacacgaaaagaaaaaaaaactaagttcaacagactcaagcaagaaagtagtttcaacataggcagaagcaatctgacagaaaaattgaaggatctaaacaattatagatcaaaagatttgacaagtacctgaaggggggttcccgtgataagaagccgatagttggtgctgaaaagtctcatggttttcgaaaggagtgaattctcatttttaattcgatgtgcttcatcaatgattatatatcgccagctaaaacggcgcaatgttgtcttctctttgatagccatctcaaagcttgttacacaaatgtcgaatttccctgcaactagcagttcttcacgaatatgtctctgcattatttaaaatatatctcagaatcctgccaggtgcatataaatgcaaccattcaaatgtaagagctattatgacttactctttcctcgggattaccgagaaatttcacagcacgcaggacaggacaaaatcggcgaatttcattcatccagttaccaagggttgattttggagcaactaccatatgagggccattaattcccctgtactcatgcaggtaagccaacaaagaaatggtttgaagcgtcttccccagaccctagaccatgaacaaaaacaataaagattagcatcagataacattagagagctgaaaaatcttattatatgctaagataattagtggtttaccatttcatctgcaagaatcccatttatgccgttctcatacagccgaatgagccagtttaaaccagctaattggtaatctcttaacttcccctgaatacctgcaatatgaagagtatgaagatcagatctctaaattctacagaatttatgcagtcctacctagaaattgtgagctcgcaactgaagaatatatcaaacaactctaccaatcaaagaagtgggcataaggtgtcaaatcctataataacttcgactcgcaataggacttgagcaaacatacgctatatcaagatattaggagcaaaacaaaggtacttacaagcgggctgagtgagcaaccgtgtgcctccagatccaactataccaccctcttcttcttttaaacactcttcatcttcctcttcctcggttagtttggaagaatggcgacccctgacgataaagtgaaacccaataaattatatttctggaaacttaatatgaataaccacaatttattttgagataagttgcactcaacacaccttccttttcccttcttctgggacggagacgggtcacttttagcaaaatgtgcaaataactcagtttgctgcagaagatactttatcctcccctttcctttattgttctaataaatggaatgattgagttatttcaatacctctggatactaaagacaagcagctcagttatttactaacttaccatatcagcatctatggaagcattttgggagtctaagatttgctgaattttctgcttcttcatcttctgcatttctttgagtctagccttctcacgtttgctgatctcagctttctcctcgtcttcttcgtcctacatataaccatcaaattatgaaaagagtgaccaaatatcctcacgagtcacatgaatgtaccatcataatgagcgaccacccatcattgtaagcacttctaagcataaaccttcaaacaaagagagtcgaaaccaaaagacacccaaatatcgaatatacgctcaaaggaaaccctaatcttacttagaatacattcagatttccaaatacagcaatccccgaattcacagccgacatgcgaatgtaaatcgaagagtggaaaacagaaacgaagacatacctcttcagcgtcatcttctacggggacaacctcgtcgtcagagacaggtgcttcgtcgggcgcaacatcttcctcgtcagagcccgcagagcgagcgacggcctcgagctcgtcatcatcttcttccacattggcctgatcgttaacttgctcctcttcctccgacgagtaagcctcgtctgaagaaacttcccgcttcgaagctctagccatcgacgcgcctctacgaatcctgatttcgtctgagagatcgaatcgagggttcctgagttttttttgctttggttagtaaataaacaaaagtgaaattaaaagcaacaaacccgacgtttgaaacgaccgtagcttctattttaccccgttgatttcgagaaatcaaatctacggctgagatgtgccacgttggcttgacttataaagattctcccgccacttgagaagtaagagtttcggaaattcccgccttggaattcgggctttaaaggcccatgggctcgaagttaaacttagaagaaagcgaaagtcaaaaaggtcaacttctcgttcttataacggaacggccttatccatttatccgcccgaatcacgtatctgacacctcagcacttgaagttgcgacacgctacacacctaaaattccaataataccctttgaaagagcctacacgcttgtctcatgcacctttgcgtatagaggatgaaagtggaagttaagaaaaaaaaaaccgaatattcgtattttaatcgccgtttcttttcttctattagcttctgtttcgcaagatcacgacttctatataataatatataagctcgccgtataattttcttgccgggaataatctccgatcatcgtcggaaatttccgaattgttgtaaaagaagtccaatttaggctttggatcctcagtttaatttatctgggacttttggttgctgaaatctctttcgggttttgtcctaatcctcattagtttgggtttcgtgagtctcgttttataaggtatatttttggctaatttgcttccgaattctgctttgttttagctcaattttgcccttaacattggttgatgaacagaggatgatgtggatgtgtttattgtcttcttgcagaacatg

SEQ ID NO: 15112 - DNA, 3000 bp, Unknown
  misc_feature (1)..( 3000): cDNA_ID_3080634_gDNA_ID_2910749_Annot_ID_193784 3000 nt of promoter + ATG
taggttgataccataataccatgtagcaaaaacaatacactgttcatttgttattcccttaatttaaatccatgatcacatatgtattggattcaaccttgtaaatatgtgaatgaatatccaattgctgtggatggtgaatatctgtattatagaatattctgtctctatctctttagtttttaccacttaagatggtattccataataattctttcgtccagtacaccaccataagttacaagctcataaaatatgagctttttgttcttgccacattataacattttcacactaaaacattttttagttacaaagttcattattcattaactttattggttgtaattaagagtaaaagcttatagtagtaaaaacattttccaagaaaatcttgaaagtattaaaagggatgggggatccgaatgtcaagtggcctacaagaataagatgtacacgaaacgaatatttttgtagcctttgactaacattctcaacatccctacgttattattattattattcttttaaaatgcatgtgagttttatctttactctgttatcataataaagatctcaatatatttgcatgatataaactttagcattttttaagatttcaattaactatttttttttgtgtgcaaattttcaattaactatcaaacatagacaatagtgatgaaaaatgtgtacaaacgatgcatgtagaatgctactgcctgatgattaagagtgacaagtaatttgctcttttctcatgtcttatgtttatagtttagaccataaagttggggtttttgggtaatgtgtcttttgtgtgttgtttatgtctagtttgctgaaagtcagatgagatgattgtgaaggtggttgcgaagatatgatatgaatgaaaatgttgttcaaaaattggcctaaaattgtttaatcctctcatagaaaaagagttcaaaattttttagaagaaccctttaggcattattgccactaaaaatagaaatgggtaaatgatatgtcttcttcctctatgggtaaagcataatcttttttcctttttcggaaattcatgtgagtgtttttttaatatatttaattttcatttttaataatcttaaaatgttataatggataggttcgtggtaccgtcacgtggtccatgggcttggtggggtcaatgtaactgactcaagcaacgaacactttaggttgtgattgtgtttttatcatcataaagttgttaatacatttgcataatacacgatttagcatgttttaaaattttcagttaactactaaaatctactaccatttaccaattttaattcaaatttgacatcatcaccaacaaaaaagacatcatccatataaatttgatgtcttttttgttggtaaatggattaacaaaaggattaacaaaacaaaaggaacaaataaacaaatcatataagcttatattgataataataataataactaataactaaaatccaatatagctacaaattaagtaaatttatttgtttgtttataaacttgagcacttcgtggtactaatttaaaaatatttagctagttaaaaaaatcaccaatggtagaagacaaacatctgctatcaaacaactcatacaacttatatttcaatgtctactgtttcttttatgaatgttaattgaaacaacataatcctttccttttcataaaacaatgattttgtttacacatatattaatttcacaaacccgattttatatttactcttataaatttagtatgattaaaattaatatatctattaaaaattggatataagatgttaaatattatggctttaaaaaaagttcttattagttacttgtgtattcgcacatctttttataataggagtagtatagtatactctctttcgagaaatttgtttaaaaaatgttttgaggaaaaaatagaataaaattggggagtgagaaagtaccaactttagtcatcaaaaacctccaattgggtaaacaaaaaggtcatttattatcgttttactaattttacaacttacaacaaaaataaatgtattaaagaaagtgttgggaaataaatagaaatgtctctaaaagataacgatctagaattgtgattggtcaataaatcggcgctctctgttttacggtttgtatccatgtcatcatcatcccatcttcatcacacaactctcttatctctctctctctctttaattattccccatttctttaaagcttcaaatctatctctcacgaactcccaagctaacaacattcacaaggagagagaaacaataaagggcaaggaaaaagatcaaacctttttctttctttctttctcctgctctctgcaatttagaagaagatcgaagaatttgtttgttgtttatcttcttctataaaaacaaaccgtggggtctgttttcatttctggccttgcgattccgataaaactctcagcttcccattcaatccaatccaattccacttctcaaacatatatataattctatatttttgagagacagtttactttttctccttctctctctctctctctttctctttctctgtctctttggcttttctcctcctgttctcatggaagcttcacccaatgatcgacttcattttggcaaaatgggtttcgggtaaaaaaaacattcctctgttttttactctgtttcttcaaatctctgcttttaacagatctcttgggtttgtacttttgtgggtcgtctcttgttttcacgtatggtccacgacgatttgtctcttgttcttagtgatccgtagattccatatgatttgattcacaaagtttgttcctttttccgtttctgattcaagagtcttcatttgtttccggcttttgattcattatagaataatcgattcgtttctttacttcaaatcatagatctgtcctcgatccacataatttgtcatccattctgatccatgtagatccgtttctcttttcatg

SEQ ID NO: 15113 - DNA, 3000 bp, Unknown
  misc_feature (1)..( 3000): cDNA_ID_3081248_gDNA_ID_2910750_Annot_ID_193799 3000 nt of promoter + ATG
aatgttgtaagagaacccatctatctatgcagcaatttaccctttcaaatccgaactttaagaacagaagagactatctttatactaagtttgtattccgcggaaaccgcacaggccgagaggaataacaaatgcacaacaagtttaagcacattgccatcccgaaacccagtatccctgcaaaaagcattgcatagataaccggcacacgaagctgcaacaaaagatatttacatgagaactttttccaattgtaggtatgtgattatgtgttttaagtaattcaaagcctaaaacatacggtttagtattacttactgtagcatataatagatgaacaagcaatgccactagtgcaaactcaagagctgcgtatgtccatatgtattctctgatcgctgcaagtccggaaagtaacagttaacagttttacataattgtgttgggggaagaacaatatagattggaaatttttcttgagggagtggtattataccgaggatgacggcaaaagttgaggctaagagtgcaagggtgaatgaaaatggcgctgcaacaaatattgcctgtgaattcaagtcacgaatctacagaatagataagattccctgttatgttgtcttcgcaatgaaaggtaagatctttgtaatgaaagatgggatatttgttatgaaataccggaatgtatgtgtttttgaatactcggggtaagaaaaaggaagcattaccagtaaatgttcaaggaagaagaagtagcagacggtgctgatgagtacaagcactacaaactcttgcccaacactgcattaccagtcattcgattatcaattgtcagattctttaaggaactttggacaaggaaaaagggaaaaagtttttaaagcgttctgatttacctgatgctttgtggctctgaactctgctgagtgagttcccgtctattggtaagttgattaattgttgggacacggaggagtatcactggtaagttccggacttcttgtctgcatacatcgcagattcgtgttccttttgtactaaaccacttaatggcacaatgctcgtgaacaagtctgaggtcacctttgcaactgcattccattttcagtgtgttaccttcttcgcacacatcaagacaaatcctgcatactgcttcttcttcaggaatttcttcttctgtttcttctgcaggaactggagtgatttgatctgccaatgaaaacagaagaaataaggaacataggagtgtgaacttgccgtttcattgataaaaaaaaacaattttctttgaagtgataaagcttctcgtgaatcaatctattccatcattatccatgaattctaaaagcagccggcaaaaacaaatagagctcaaaacttcaatgaaagttagaaataataccgccatttgcttcatttgaaatgtgatttttgttgtcgtcaaaagagacagctcgtacaatcactctgttcatggacaaggatcttgaaacagatgcatgaagaccatctttctgcatcaaacaaattccaatcttatactttcgaaaagaagctatttgaagaaaattaaaatacttttgcacactacaattaaaatgagactcacattagacttaggctgttcactatgcaccacagcggaaacaggcgttgtagatacaaccagagacagtttagcagaattactagaaggaagtgacaaacaccttttccagtaaggcgatgtgatcggacttgcaacaagaggcttttcactggtttctgaaacactaggacttagtagcaatcttctctcatagtttggtagagaagctttccttttcagactcagatttctcaaaattcctaaactaggcgtcggttttggtggtatttggatagaaacatccaattggcttccacttggctgagatctggatacatcttcaacagattgttctttaacctgataacaatcattgattaaaacctcatactgataaataaaaaaatgaatctttctacagtgaagcaaccaagttaacaatcatagcaatcagggactgaagaacactaagtatgcaattctccatttcctttttttctgattggttaatttcagataccagtgataaaccctagattattcacaaaatgaaattcatgaaacgataccaaaccaattgagcaagaaatgtaaaaccctttagcgattctgaaaaatatacatttaaaatcacactaacggagactttgtattataaagatttcaactttaacctagaatctagcaaaagaattacaaaaatttaagatttcgaatacctgagaagaagaagaagaagaagaagaaccagtagaagaatctttagcgagaacaaaatttctgggcggttgaattgaagagccttccatcataatcgaaccaatagaaaccaaaacaattttgaagaaatcaagtttgatcgacaaaaaaatctgagccagggagagaagcaatcaatctaaagagatttgagaaatttgtcgtttattaatatgtagctaaaatccgacaagagagattttttttattaatgtgtgtgtgtatgcaactatgcatgcatcagaagaatccagcatttttactgctctttaattacccgcttaattcaattaccagtcaaactcactcttcctctgttcttcagttacccatttactttaattcgactaaaccgaactaaaccaaacaaaaatgcttagaccaaagcctgcttaatttatttcccatcaatatcacttaccaaatacaaaataagagtgtattcaacattcatatcaattgggcgccgacccagtctgtgtccggatagcccattatataacttttgggctaaaaatatttatttgcaaaacaaaaaaaaacaaaaaaaaccgcgagcttgtgagacataagagagaagacgaacagagtgttcacaaaccctaacatttcagaaagacgattactcgataacacagaagagagattaaatg

SEQ ID NO: 15114 - DNA, 3000 bp, Unknown
  misc_feature (1)..( 3000): cDNA_ID_3080658_gDNA_ID_2910750_Annot_ID_193802 3000 nt of promoter + ATG
ggcacattactgcttacaactctttgtcttctgtgattctcattatggctcattactctttcttcttgtgcacaagaggtgttttcggttccttctgattcatcaggtccctcatcatcattgttttcatcaaaatcaagttccatatcagtgttgtcgatcttcacttctgcacaattctcgttgctattaggtaagggtctcctatagttttccttctcattttccttttgaagatttgcctttgctatccttgacaatcttagaatattcacctgtctgttagcagcaggacgacctccatgcttttcctcagttgctctactaggaagctttgcttgagctttagacccaccaggggtgccctttatcggcgtctcatggccttttgaaccttgaatggagttctcattttgctttgaacccccttttcgatctttctcccggtactttggaggggtcttatttggtctatctccattacgctcggaaaggcatggctttgtgtttatgccaatcatatcatcaaaagcaggctgagtaggcaactgaactaaatttatcttactcttccaaaatgcatgaccacagagatctgcccattgtattctttgagctgggtctttgataagaagagactcaatgagattgacaaatgaacgactagcatttccagggagtggaggagttggatctgaatgaatagatttcacaagctgggtaaactctcttgccacaaaaggaggtcttcctgtgtaacattcatatagtacacaaccaagtgcccacagatcagaagcaaaagaatggatccctccatcttcatatagctctggagccatataatacggggtaccacgttttccctgatgcaagtcatcacaagatatatagagcattaacgacgcacaatttccaatgaaatttgagatcatagattcactaacactgaaaaaaaagacgcacaaaagtgtttaccgtggaaggagatttagaaatatcatccagcttccttgacaaaccaaaatcacacagctgcgacacagtgttttgagaacatttaaacaatgtaaactatcatcataaactacacaccagcataaaaaagacagaaacacgcataccttaatatgcccattttcatcaagtaagatgtttgatggtttcagatcacaatatataattcctttcgaatgtaaatacctaagaaattcaggaaaaaaattgtccataagagaagagtcagaagacatgttctagatgcacctagaggtattctggtcatgtcaaaatggtttagataggatcttactgcagggctatgacaagatcataagcaagaccatagatagattcttctggcagtttacagtcctgcagaacaagtgaatttcagaaaacctgtgaccatatattatcaaaaaacatagccaaactacaagcaatacctgctgcaataatgtcctgagatcaccaccaacgcaatattccagaactaaccacatgtgagcagaagtttcatacctgggaccacaacaagaagacgacaattagaaacaaatatatggagccaaataattgttgttagataatagctagtaagttttaccaagcatagaacttgagtacgtttggatgatttagcgagtgaaggatcctgacctgaaaaggaagtgcataattaccaaattttcagtatccatgtcacttcaaaaaccacagatggtgaaaaatcaattcgcaaacatcacccagaaatagaaacttaagagcatcgatttgacaaatctaaagtgaatccgtcataatcaagaggtcaattcctttaaataaagcaattcaagcaaaacccaagcattaatcgacactcttgcctgattaaattacctcttgaagaaccttgttcttccgcgacttatcgacactcttgcaggcaaaatactcgatcgtcttcttcttccttcctttatacacagtctacgaaccgatttgaacaataaattactaaacaaaacacttgagaaaggaaaaaagttatcagattcaaaattaccgagcatttgccatgtccaatagcttcgtagatgtggtactgattcatcgtgggagcgagcttcaagtctcctgagatccgattctggatttgtcagctctagagagaatcaatggccgttgttgaatgagtttgggatttggaaagagagagggggaatggtagagagaaggaaatgaacaatttcaaaattcaaaactggactaatttagaataattattatattttgaatccattttgttttgaaggagataagatatgcagtcatatacttatgaaattaaaaatagttagatgggcttcttgggctcataatgatcgttggcccatttatcctcttctcgggtgaaacgtttttcccgccataactatactgccaacagggtttttttaccgccgtgaaatgagaagaggggtaaacttggcagagaaaaagtgaaagagcttagattttccttctccttcagcgacgacgtaacattcgccggaccacatttatctccgacgtcggccgcttagacagagtaaacttcttaatctgctttattcttcgtctttttttttttttttttcgttatccggcgaaactcgctgccgatatttttaaatttattttccggtgttgcataaatccttgattgaatcgttttgtcggtctactttgcatttctggattctcctgctgtgtttgattctcttactgttcgggtagtgttctctctatcacaattcatagctagggttttgatgttgtagggttttctcaaatgtgggttcttttagtaggacactttggaattttagaattttcggttgtttacttcatcttgtcttgcctttttcaaagttttactgaggaataaatgcttagattacttaatctcgtgcatactgttttgacgttagcttgggttttgattactttatttgttcattgttgttaatg

SEQ ID NO: 15115 - DNA, 3000 bp, Unknown
  misc_feature (1)..( 3000): cDNA_ID_3080654_gDNA_ID_2910750_Annot_ID_193803 3000 nt of promoter + ATG
aaagttacaggtcttacatcttaaaccaaagaacaaactttttgacaaaatgcaccaaaagctaacaataaggaatccatctctacccttccctcactttcctccctttgctcaatggtcttaatacctgacgtttctcatcttaatctaaaccaccataagtacctctcttaaccagaaaaaaaaacaaaaaaaagggaactaatcttcctctcccttaccgttgatccactgtctttgtttcagcttcagagtcatagaatcaagttcactggtaatgcctcaatattaggttcatagacttcttgcaaagctccatgtatctcttttgttactttcgaagttggaacttgatgcgagaatctgagtagttcggatttcgggattgtgaatcttacatccttgccatcaatccagtgctcagtagcagctaaatacaccgaaccaaaacctgcacgatctgctaatttaaagccaccatcaggtgccaacaacagaaccttgtagtcctgtttatcatccagaatttccacaagatcataagtttgggattgaagatcaaccacatcaatgtcattactccagtttctgtaaatagcccaaatattaccagtctttggcatgatactgtaattatttccatcctctgagctaatctgacgtgaaaatacatcaagatcagtgaatatttcaagagctttagttgcccggaaactcccacagccagtgggcattctcttgtcaatccactggatgacgcctttgattactgtagcctttagccgacctacatgcaatttaactactggatcctgctcaaatgcctgaacaaatgtgattttctgaatcttgccatagtaccggggcaagtaatcgtcaccactgcaaaatgaccagacttggcctgtttcataagtccttcccttgcaagcaaagtgcacgcattgcgaatacgtattattctcggagtttgactctttaggctctgctagtagatgcaaagggacgtctatctctttgatatttgttggtaatgcagtaggatccagctcataagcacctcgaggcacaccttctgcttctttccagtcgtcttaaatgatggaacacaatgagagaattgataaacatcggaattacgaacataagatgtaacaatttcctcattaaagcgacaaaacaagcttaagaagccttttgctttatgcaagaaaccagcagataaagggtcacttgatccagcatcttctgacacgatttcgacaaatgcgtactgatatttccagggagaaccgggatcagctaaccagttgatgtcaaagctcgtcatgagagatttgtagcgacccttgaagatagcccatgtctctcctattcttgggtatatacagaatttacccgcgctacttcctttattgcaatgaaccaagtgagaaaaccttgtgtgatctttaatagtctcatcttttccaagtttaaacctaccaacagaaacaggcaagtctttttcatacctctgtattggttcctcgtcatatggatcaggctcaagccacgtgacagtaacattaaaaccagaaacaaaaacttctttgatctgagcatacaatctaggcatcccatccactgtatcataaagagcccaggtctggccaacttcaaagtgtacttcttccctcagcttatcaaagtcattgaaagctaaaacctactttgctctttctggttcttctcctgcttcttccttgcccaaagacccttcaccatttctgttgctctgtgcaacgaaagcttgccgcttgctatacacagacttctgagactgctctcctccatcaaaacataaatcttctatagctttagtgtcaccaacaataataacttcttcattctcgctgctgtttccagcttctctttctcttctcaccaatccttctctctttctcttctcaccagatttctgattgagatgaagtggagcctgttcgagaccagatgaaggaagctcttgagcaccatcagggttagtcttttccatcacagctttagccttgagcggctcctccaatatgatctcaacttgatcagggttagtcctattcattaacaacaatgaacaaataaagtaatcaaaacccaagctaacgtcaaaacagtatgcacgagattaagtaatctaagcatttattcctcagtaaaactttgaaaaaggcaagacaagatgaagtaaacaaccgaaaattctaaaattccaaagtgtcctactaaaagaacccacatttgagaaaaccctacaacatcaaaaccctagctatgaattgtgatagagagaacactacccgaacagtaagagaatcaaacacagcaggagaatccagaaatgcaaagtagaccgacaaaacgattcaatcaaggatttatgcaacaccggaaaataaatttaaaaatatcggcagcgagtttcgccggataacgaaaaaaaaaaaaaaaaagacgaagaataaagcagattaagaagtttactctgtctaagcggccgacgtcggagataaatgtggtccggcgaatgttacgtcgtcgctgaaggagaaggaaaatctaagctctttcactttttctctgccaagtttacccctcttctcatttcacggcggtaaaaaaaccctgttggcagtatagttatggcgggaaaaacgtttcacccgagaagaggataaatgggccaacgatcattatgagcccaagaagcccatctaactatttttaatttcataagtatatgactgcatatcttatctccttcaaaacaaaatggattcaaaatataataattattctaaattagtccagttttgaattttgaaattgttcatttccttctctctaccattccccctctctctttccaaatcccaaactcattcaacaacggccattgattctctctagagctgacaaatccagaatcggatctcaggagacttgaagctcgctcccacg

SEQ ID NO: 15116 - DNA, 2562 bp, Unknown
  misc_feature (1)..( 2562): cDNA_ID_2163704_gDNA_ID_2926039_Annot_ID_138186 3000 nt of promoter + ATG
cttttaaaaaatttacaaagatttttaaaagcatttttttggctgggaaaaaaattttacgagaaaacatttttggcgggaaattttttttttggcgggaaaaaaagtttggcggaaattttttgtttggcgggaaaaataaattttggtacatgttattattaaatgagggtaatttggtcattctgttcaatagaagggatatttttaaaaataaacaatataaaatggtattgttacaaaagggtagtaaaaaaagggtagttttgcaaatctccctcgagaatttgcaatttctctctcatagcataacatgtcttttttttagtaaatttcaagatgacaaaaagaaaaaaaaaacataaagaaacaaattgaaagcaacatctatttttctgacttgtaaaaatgtggtgttactagcaaatatcaaatttttgtatctataaactagattttaacccgcggtatactaggagaacgatttattttttaaagttaatatatatacaagtttacaaattgaatatatttataaaaaaaataaattttttagtttacaattattattaggtaacatcccgccaaatctgttccatcaaaaagcttattaattttattaatgttaaccttagttatgatatgattctaaatcattgtctagatattttagccaatgttaggacgttgaacccacatagttttcgtcaattgaataatatatgttcgttttataaatttcgaatcacaatttatgcagaaaatgttttgaaatttttcttaactttacatattatacaataaaaaatcaaacaaagatgataggaaattcatagttttaaatcttaatcaaatcttctaaatatcaatattgttaaatatagaagtaatgagtataagagttgggttttatttgaaccaacccaactaagatttaatgaacatcataaactaatgggtctggtatcaaatgtaatcagatgcattttaacccacaatcaaaaggtgactgcaaaaatactatataagattcatagaagtagatcgtctatataggcctgaaaaatatcagttttaaattaaattatttagagatcttattttgttgggcttaaatactggagaataagactactttagtaatcaaaatatttgggccatgtaactaatgcaaaccaaaatcattattgacaaaagtcattgcatcaaatgattttcttaccaaaatgtctttaaaatatatatatatatatatatatatatatgtaccttcgtacggtacggttgcttttatataaaaaggtgttgtacggttgcattgacttttgatcgtaaatactatatagtccggagactcaaatgcaaaccactttctctatttttttggacggaagttatgttaacctaaattatctaaaatattacacaaataatttttaaacagtttaaaatggcatataattatgttaatagaaatttgacttttagtacggagatacattagctgagaagtttgacctcaccttatttagtgggaaccttgttacttttgaattagtttgaacaatatatctctaattcatataaagtattttgaaatataaagctttataaatataacatattttttggtgggtaatgcttctttttttctgtggcttataactacgtggagatcttatcttctgtccgcttatattagtatttcaccatagtgattttaataaaaatcagattaaacaatatataacagctattttagtttacaggtttaaacttttattttagttctttgattttttttttctttcagaaaatggtggacatcttctaaagtttgttttattaatctaggtagaaactttcaaacaaaagacgaaaacagaaaagttgactttagtacggaaatacatgatatgagataactgataagataacttgttagatggtttccactctcataaacaatataaaaaaattattaacgatagtgaactcgatttttagtaactctatgaaaatcttcttgtgagatcataacattttagaagactaggcttttcgtgtaatatgatctgtagaccattccaatgttatcatatgcagaacagcaacacaatgaaataaattaagagatggaaaataaattaagatcaaataaaatgtggatatacccttaagattccggagacaatacttctccagttctcctctcgtctataaatttctgccgtctcagccaacataatcacaaccaccacctctctcaataattctctctcttgtccttcacaacctgttactacttaggtgaatatcatctacatgtttattttgtcttaatccaaattcacatttaattttgttttcactctttttatcatgtatacttttttaattagctagccgagattatatatgttaaaactacctctatttctaacacacccaagcaatatatcatctttccaatatttacgaaagaagaaatttctatacaaatattaacctttactttgtgcaaaataggagagaagaaaaacaaaaagactgactgagatg

SEQ ID NO: 15117 - DNA, 2562 bp, Unknown; identical to SEQ ID NO: 15116
  misc_feature (1)..( 2562): cDNA_ID_2163704_gDNA_ID_2926039_Annot_ID_196072 3000 nt of promoter + ATG

SEQ ID NO: 15118 - DNA, 3000 bp, Unknown
  misc_feature (1)..( 3000): cDNA_ID_3094250_gDNA_ID_2926041_Annot_ID_196080 3000 nt of promoter + ATG
aatgtcaacaaaaaaaaaaagtgttatacctgatggaagacgaaaaagattcccaagaaaaacactaccgaacccgctatctgaaccagagggactgcaaattccactagccccagttgcaaatcatactccattaaccttaaccttaaatcacataaacaataagcttattactaaaacgtttttcttaatcccccacattggtgaatataaagttatatatatcacacgtagacacatttgagcttacaaattatggtaaatttaactattaagattactaataataatgttactaaattaagcaagcttcttgagatcatttaccggtaatcgattccagctagatgagccacaagatcatgaacattcacggcggttataagaacgagagctaagagaataaggacgaggccggatcttggttcccatgagaatcctgtcgctgtgaaaccgccgatgagcaccacggttgcaaacaagtatagacctgcgttgatgtactcggctctgctcctcccaagccgagggccgtacgttctaatctcacgcgccgtcgcgagtttcaccattttattgtaagattatgcgtttagagagagactgagagagagagagagatctgggagagactcagagagaaagagagagctttacgtggctttgtgcatggcgttcttcgattaggaaagtggaacgtggcagattgtggaaaatagctgactttcgtaccagacgttgtcgttttatcctccagatactattttgaatttgggcttcttgttgggccaatcgtaggcaatcttacaggactcaaaagtaaaaagtaaaaaagtttaagatgttaatggatcatgaccataaattatgtttaaataaaatataaatctaaacataatttatggttattcaagtctgatttaaactatttattaagatcttgtgtttactaaattttgacatctgcaaattactatgttttaaatacttaaaaatatagatttcatatatttaaaaatttgatgtgatctaaaataaattaataacgccattaacatttcttcaactatgtaactccgactcttgcgatataccaaaagccggaaaaacgcaaatagaaataaaaattatctaaacaattggtttaggattacaatatttgactttcaaaagctcaaaaaatatgttaatcggtttataataggctacgtaaacgcttctcgagccaccactttatttgttttgggtccgactgttgctgagaagaccatccacgtgtataattcctgatccacaaccacaagccttgacccttttgaaatatcttctcctccactataaattggccacgtcgtctctctctcgccatctccgcttgtgcattctcgcaaccgttggtttttgtttaaagccttgttggccgttggatcttcctgagattccaaacttatagtttagtttatttacatcttttactcttatctttgagttatttgcacatatagctaaatacatttagatttactcttacatttacgtaaactttctttaaaaacgaattaaaccatgattgaaaaaagactaaagtaaattttgacaaaaaatgtaatctaatcaataaatacgatagatgtgttgattaattttaaattttcaattataaaataatttagacaataaaagttgacaaaaaatcaagtaaatatatagttcacactaaatgttggaacatatattcgatttttaataacatcatgcaacccaataataaaaaatgaacatgtttcccaaaagtattcaagcagtagtggtaaaacctatagttaataacttaaactcaaaaaaaatgaatttaataatgtaatctctcaagctcggatgctttacatggtgtgatggtagccaacaagttaacacacccatcaaattagttagaccttacatgttgatcatttattagttagtgtcgtttaagtataaaactcttttaaaaaaatagtaataaaatgaaaagtgtctttaattttagatttgtatttttttagaaacattaaaaccattcacatcagtaaattttataaagtatctttaaatataatttaatattaatgctgacatgtaaaatgtctcaaataagcaaaatatgtctttcaaaatagatagtttctcttattcactctgttttttcttaacttttattatatctaatgttaaaaattcttattttttgtgatacgaatgttttaaagacacacatgacaaaagagtgtcttcaattttaatactagttaatgtttaaaaaacgcttatagagttgtgggatgaggatgcacttatgctaggtacagatcaataacaaggaagagggtagttcggaaacgtattgtctagctagaaaaggggtttaaattgattaataaattcttttgggggtttataaacagattccaggaaaatacggcgtcacattgttattaatctgtggacaccataatttacgtagttcattgcgacacatattttcgtattccactccaatttttatttttctctacttctatttaaaattcgtgaaccagaatctaaaatcgaacgaagattctcttgctcgaacaaaaaaattctctccgcgatacttacaaaggtacgccaaaagcgatttcgaacattaacttcgtcttgattagatctttctgtgtaaaatttcattcaatttatgatcagttgttgctcacgaaagatttcgactttgcatttgaattctctgttattcaaaggaatctgaattttgggttttcccgatcgctcttaaatttttcagtttcatgttgaaatgttgaatctttgattgaaagtttcaatctttcattttggttcctctcagtgttcatattagagtaagttagttatatctgctaaagttagattcagatcagtgttctgtagtaaaattgatgcaagttattgtcaacaacctgagacattttttatacttatatg

SEQ ID NO: 15119 - DNA, 2267 bp, Unknown
  misc_feature (1)..( 2267): cDNA_ID_3094280_gDNA_ID_2926042_Annot_ID_196086 3000 nt of promoter + ATG
caattttctcttctttaagaactgtaatttgtatgaaacaacaggatcagagccaaagaggggcggctaatggaatagctatgactgcgatgtctctatttaagacagttggaccagctggtgctggcatcttgtaagtggtcacgtttcgaattaacgcataagtaaattcaaagacgcagtaatgttataaacaaaaatctcttttgctggcagattttcttggagtgagaggcgactaaacgctgcatttctaccaggtatctcattacttcttcccatttggtcattatcttatgatgttctgcttaacacaagtaaattgaaaacgtatgcaggatcgcatatggtattcttcgtcttgaatgtgatagtagtggtcggagtagctctgacattcaagccatttctaacgacgagtcgaagatgaaattcatttgaattggtaagatagggaatgtatggacaagttgattcttttcatttcagatacgaaagaaaccggtaataaaatttcactaaccttaggatttcagctccttctattacttgtccttttgttttgctttgtctgattattatacaccaaaaccgctttcataatcgtggatcccatccaaaagtgatgtattaatcggttaacaaatcgtatggtcagtcaatacggcagtaaggaaattagaagatgagactgagaggaacttacttgaaccgttaatttattatttaatacaaaccgtggcctatttttcaagctcttcaaaaggcattactcaacctttacttgatgaataacatttactcaaataaataattttacaaattttctgccgacctctccttggccttattcacagcaagcggagccttatgtccaaacaatttagtacgatttgactgatttaaaataaccttctctattcagctttggctatgattgtatattgttagcagccatgaaacctagtcaaactaactggtttgggataggcagatagtcaaaatggttaaagccggcatgattggcttccatttttcctaaactgaaattgttttaattaaaatttgaaaaataataggtagattttgaagatgttgttaatgaatttgacaatagatttgcttgatggttttaaactcttaattatattatttctaaataactaaatacctcattaattagtagtattggattgagatgctttaacatcaaaattatcagaggaattcaaattgtatactttttactagtgaaaaccaatagaatattaaaagctaacaaccggaaaaacgtggcttagagataataaagaaacttttactcaaaaaatggaactttgacaaaagttgacaagttaaaatgattgaatttctctggtccaccatgaactaccaccgaaaaagtaaaaaaaatcttttggtacaatcaatttctaaacatgggcgtccaacactcgatgaaaaactcttcaaaaggcattttactcaaaccatgtcaactaatttctataacatttgaaagagatagattacattaacaccatgaacgtggtgttatgtttttgtggaaaccacagtacacatccctaatatctgtgcatgagactttactaaaacctaccaagaaacttgaaaccaaaatggacctcttgtcgtattaggtcatccattacatcatattattattggacatattcaaaatttacaataataatcttatcatcatcatattataaaaatggtggtctacaattaatcaaatcaaatttgaacagccacaacaaacgattacagagaataaccctacgaaagacaagttttcacgtaacgaaaagatttacgacagacaagtttataataaacaataatctcggtaacatgactagcagcaaccaagagagaaactataattttcaagttgcatctcaaaaactctgcaagaaaacaacatttttataacataagttattacaatacggttgaaatgtgatgactgacgactgaatagaaaaacaataaatgcaaatgtgattagtaagaggtgacatgtcataagcgacttgtgagggcaaaagacaaagttgtttttttccttcttctctgtctcgcagcagttaaataattcaattgttttcccgtcttttttggaagagagtacgtgaaaaccatatatcgcatcttctcattcttctttcattgccctcattaaaacacacatcatatcgcccccaaaattttgatttgattagagaggtgtgtggaaaatg

SEQ ID NO: 15120 - DNA, 3000 bp, Unknown
  misc_feature (1)..( 3000): cDNA_ID_3094275_gDNA_ID_2926042_Annot_ID_196087 3000 nt of promoter + ATG
ctccgccgccaccacggccgcagacgcctcctactttcgtgccagaagaaactcagccacagactcctccgccgccaaatcaacatcaaactcgttccatcttcacacctacccctcaagtaatttcctttctactttgcatttctgtcgaaaagttttcatttttaccaaggaaattgatagacttttaggcctaaaatttgtactctttattgaaattttttggtgggtttgtttgaaattagttaggatctctaagttggtaagttaaagtttccaaatttatgtttggctgcagcaaacgttggcatcattgaattcaacaaagtacacaaacaagttctttctgctgctcttcatctttcacaaggttgtggctattgggtttgtaggcttccttgtcttcagaggcgttcaaggtctaattggatcaaatggtagcgtcaaaaggaaagagaaaaagatcctcagattcttacttccacaagtcgaagctgcatcgctcttgagcatcattcttgcattcctttggcaaatggcattcaggatttggcctgatttcatgattcacttcatactttggagtacgtttttgatgtctttatcctcaggaatcctcttactgtgtttccagatgccagccactgatgctgttggggtttgcctcattgccttctcaattggcaatggtttatatgcttgctgggtcactcgtagaatcaagttctgttctaagattttggtcaagtcgttagaacctgtttccaagttctcggatttgaatttgcccacctactacatgctagctgctggtttcctctggatgtctatgtggattttcggtgtcatcggtgccttgaacttctattttccgccacttgtgattattggtttggtgttaagtctggcttggacgacagaagtgatgaggaatattgttaatctaactgtgagccgggtcattgctttgtactatcttaggggaatgcagtctagtaccaggtttagtttccaaagggccttgtctcgtaacctcgggagcgcgtgtttaggatctttgtttgttccaacaatagaagccttaagaatcttggcaagaggattaaatttgctaaagggtgaagatgagttcatgttttgctgcgctaattgctgtctcagactcatggacttcatatttgaacatggcaatggctgggcctttgtacaggtactataaactaattctttaaaccatgccactcccactctcttttcttaattctttaaacctgctgcagtcattttgtttctatataatatcttcttacagagaatcagtctagtaatagtattaaaatcaagttgattgtggtgggtcttattttttatatcatttctgatatgagaatcttgcatcatcttgacaagtcgaggcacaaccacatgctctttttgcatttatagtaattattttgaattagaaaaatagtcatattgaatcaatagtattgagctttgagtggtaacaacagacggaacaaacttagactagatcactttttcaccattcgaaagtgttttgtaccattggttgtttacttgtttaaaccgtattgttgttacagatagcggcttatgggaaaggatttgtgagggcatcgcaagacacatggaaactgtttgaggatgaagatatggttgaaatagtagatgcagacataacaagctccatatgcttccttacaggcatctgcagcggctgcgtttgtttaattgtcgcagccgcttggactcacacagtttacaaaccttttacagccaccatctctttacttgccttcttcattggatacctcatggtaaattacactttgaacttttcaactctaaaatgtttgattcaaatagtattctcatcatattttttggattgttggtaacagaccaggatctctatggcattgcctcacgcctgcgtaggttgctactacacgtgctatgccgaaaatccggaaagcagattcttcgaagacaaagtgataaaaactaggcaagatatgatcaaaagtggccgtgttgccgttaccagtaccacccctagagttcgccgtgctctagcttagcctgatcatctttttttccttggtgctaaattttcagaatgaaataactagttttttttttaaaatgtatttaaatttgaaaatgtaatttaattacagaaagagtgaagagccaaccaatatcagtaggggtggggaagaaattgtggatagagataagctcgtgacatggacacaatccaactaatgacccaaaagccaagttggttgagagctttttaactttttattttttcctttgttgttgttgagacccctcaattactttctgtacataatttattcttttgttccttcctgtatatgggtatattcctttcttggttttggaaagtagtgtagttttgaactttaatgaactattagtaatagtggtacatcttgttaaagtacttcaagctttagctagctttctgtatatgggtatatatttctttctcttacttagcttcattgagttcagcaacagtgatctctttctacttataaaattttttagtcttaaaggcccatcttgaaagaatttgaaacttttacaagaatcctatcagttttataacatcttactacaaacaatcataggcccatcagtttttcagttatcaaagcagagaggcccattttacaattatactaaacgtcatatgatctccattcttcagagaaacaagtccaatcttatcatttacatgaaatctaaaacccgccacgtgattcgtcgattacacagaacccatatacctgaagaaaaaagaaaaaaagaaaaaaaaaagcgaaattgttgtttgaacgtgtggtcgaattttatcgtggcgctgaattagcatccacaagtgaagaaaacagagagagaaagacagagagatctctctctccttcacacacacagatacac

SEQ ID NO: 15121 - DNA, 924 bp, Unknown
  misc_feature (1)..( 924): cDNA_ID_1020522_gDNA_ID_2926042_Annot_ID_196088 3000 nt of promoter + ATG
agaacgctctcataaaccacgacagtaaatgcagcctccagaacaccgattcagacacaactttgcaattagggtattgctcttttaagtctatttgctgtcattggttgcattattggaaagctgatttaagataaatataagtctttttcctcctctgttagttatgcatatgccttaacactcactaactggagttataaaattcttactacttgtgttttctccaaggttgccgggagaggcacatgatagaaggacgaatgaaggagaaagagagagcccgtcaagcgattcagtgacaacaaacacgagcagcgaaactgcagaaagaggggatcagtctagtttagcaaattctccacctgaagccaaaagacaaaggttctctgtttagtcctagaaaagtatgggagaaggctactaatgtttcctctttagcaagtatccgattgttttaaaagtaattttagagggatacttgcaaaaagaagagaagattcagttatctaatctctgcaccaactctctttgtccttcttcttttgattatttctcgactgtctctcctataaaaaagatatgcctagctgagagtttgaaatccataatctttacaaggcacagagttatttgacatctcgtatagtaagaaaatttgcggagaaataagcttatagaaagtgaaggttatcggaatcttcctactccattacaatcaaggcccaattggacctcaaatcctaaactgaaaaagtttataatgaatttcattaaatgcccctaaaatataagcaaaagtttcaataaagacctcatatttctctataattacaattcgtccccagattaataaagcccaaaggcattagaccgaaaaccctaacccctctttatccgcgcgagagcaattgagcagccatg

SEQ ID NO: 15122 - DNA, 55 bp, Unknown
  misc_feature (1)..( 55): cDNA_ID_3094296_gDNA_ID_2926046_Annot_ID_196092 3000 nt of promoter + ATG
agactttgactctctctttttttgtgtgtgtggaaattaaggttttaaggagatg

SEQ ID NO: 15123 - DNA, 3000 bp, Unknown
  misc_feature (1)..( 3000): cDNA_ID_2990331_gDNA_ID_2926046_Annot_ID_196095 3000 nt of promoter + ATG
cacaaaatatcaataatggactgtttggctacaagtttgcggcggtcaacgctaaacactgtactaaacgctaaacacactttccagatcgatatttgttatctatttctatttgtacttgatccaatttagccagccatttggtattcacatattcgctaaaattcaaatgtttgatcaaatatcgatcagtttgctaaatcttattggggaaattaaatttagaagagttctacaatttccttcatgttctaaaatttccttcatgttctaaactatatgtgaaattgtattctaagaatttctatagtttctaaaaacattagaaaacgtttatcgacaaattccttcatgttctatagttttttggagagatacttatctcattcattaaattgaatcaaagtacaaatataagagagattcaaatatcccaaaatttatcgacattagatctataagatattctccaatgctaaaaataaaataaaaactatgtatcaattagatccacaagaaattggagaaaaaagtggatagcatcttagtgcaaagtgcaaactagttcatagttaatcaagggttcatccacaagaaatgagaaaatactcagttaaaaaacatactaacttgaagacgattctaaaaccttggttctcaccggcacgagaagttctacacaacatttaacaaacattttttttagcaaacatttaatttatgtttggatttattttttatgtataatgacgtcgaatttcatataatgttttaacaaacatttaacatgtgtttggatttatttcttatgtatagtgattagtgacgtcgaactccatatgaattaacttttaccaaacattttaacatatgtttcgatttattttttacttttacagcaaattcaaagtttttttttttaaagaagattttttagaaaaaaataaaaataatcataagtagctattcatttcaagatgaaatcattaattatagtgttactgtgtaagtttaactaaaatatataactttgtgatattttaagtatagttttcaatagtataactctataactataaacttgtagacttgtatccatagacgagtcacgagagatgatgtgtttctctcaaaatcacacttcaaataaacaaatgattttacattgtttttggttcaaaaagacaaaaagatgtttgtttttcaaaagcaatggtttagtctaaagactccaaaatctaaaccgatatataacgttttgaaaatgtgcaaaaatcagtgatggactgtttggttacggcgatcaacgctagacactttacgaaacgcactttccagcgtttttgttatgtataaaagttttttttgtttaaattcttagttattgtgctttcataaggttttaaagctttaatatatagtttgctaataatatttaccagctggagttgggtatttgatcgaatatttgaattttaatgtatatgtgaaagatttgggttagatacgatcacaaattcacaattccacaaaaccgtataaataataaaactcacaaatattaaattatctaaaaacgaaacaaatcataatttaataaacaaaatcagtggttttaaaataaaagcgaaatttaatatgtaaaaagtgaaacaaatcatatatattaaaataaataatatttgatatatatataaatgtatatatatatgtgtcttgtttatatatatatatatatattgattttgtttcttaattttataaaattcaatgaatttataactaatttgatcactattatattttttatatacatgatattgatcaaattagctataaaataattgaatcacaaaattaaggaacacaatatctatacaaaaagatacacatatatctatatttttcaaagcatatataatcaaagatttttaatttaaatctttgtgatttgtttcgtttttagagatcaatatttcatttgctctgttaacttatgttagccaaaaaaaatgaacaataataacaaagcacataaggtatcgaaactgatatttaagaaatttgacaagccccaaaattaactattcttgtcactatctataataacgactaatagtttaagattaaagtaatttattgtatattccttggatcgactctataatctattgtctagtagtatgatatagtagtatctttttttttggtcctccatagacgaacaatttagacgagataatctaggtgtgaacaaaaagaacggctttcttctccctctttattgttagtcaataaaagataacttataaaccaaaacatagcttatacatcaaagagtcattacatcgacattcatgtatctgaaaagatattaaaacaaaagattccgtgaatatattaattggtacatataaaaatccaaaaacatactactaaattcgaataaataattatgtttagggagcttcacttatttaagtatagcatctatgactaatctaattactacacaactgatctacacaaaataattaactgaacaaaatacttaaattacaaattaattaagcaaacggtcttcccttgttaaccaatcctatttaagttacgaaactagggatagtatatgaaatttaattcataattaaacatttagtggatgaattaattgtaagagatatataattactattaatttataagattctatgttaggttgaatatattagaagagtccagctcataactcttgtgcccatctccacaagtagtttgtgaagtcaaacaaaaacttccacttttaaaattttctcttatttctttctctctcataagtcataatattcaactaattaagtgcatatatatacgatgtatcagtgcttataatcttcatgaggagctttatatatttagcataatatctttcagaagtgtgaggccttgttaattaagctcttcttctctatctctctctctccctctcaacctctcacc

SEQ ID NO: 15124 - DNA, 3000 bp, Unknown
  misc_feature (1)..( 3000): cDNA_ID_3094303_gDNA_ID_2926047_Annot_ID_196099 3000 nt of promoter + ATG
gtaatttgagttaaattaggagtttgttcatttgactgaaaaacgtcggggccaagcaattgatttcaatcccttaccgctactctttattactcctttcagatcaaacgtcttcaccttgttaaagtcattcctcataggatgactcggtggagcacagattcccatattaattggtgctgcggacacgtgatatccctgaccccgagctgatggggagggtacataagttggctgccttggccgagtaactgctacaacacaaaatggaacatataagaatcaatctatttgctacaaagtacaaacaaactagtgcatgagatacttccaagtgcagaattagcacttgagaatatgtgtacctcgattttgtttttgaattgttatagcctgctcttgggttgtaggttgctcggcctgtgtacgattggcatccacgttctctaagcgttgttcaaccgttgatttctcgtctgctttatcaaccttctcggtttccaccacctttaagctttcatcaatggacagaactccatcacattccttgctgccttcccccgtgattacctcttcatcaagcaagctactgtttttgttcgcagcgtttgacttgtgttgaagcgacttgttgtcttccaccaaaaggtccaaaaccatcgttattagaaattcactatcttcctctttatctatcaatatctctgctacttcctcaggttcctcctcactgatgtcttcatccccacgcaagaccccacttgtgtttaaaatgcttgaaccatcatactctacagttgacttgccgccttccccatcctcactcatcatccaacatttttcaatcttcttctgttcctcgttagatttatcttcattttttacaataatcagatccgcctctaccttggtttttgctgctgctgcctctttcttacccgtcctcttacttcgatatatgcttccaaaacttggaaggcatctgtttctcctttcttcctttgtaattttctccatcaacgatattatgtctttttcttaggttctattggcaaagaatctgtaaaaagggaaagtcaaagaacagagataagatatgacttggttgggctgtttatgcttcagcttcattctatgtatgttatatttatagaagttcattagtatgtgtgtttatgtatccagttgatatagagggagagggagatcataatgacatatgccataaaaccgcgtaaacggcaacgacttcagcactgctttgtatcatttctatggtcttctttatgtggccaccatgtgattaactatggcagtttgtttaaaaaacagttctgtatagatctcggaatctctttcgtaatataccttccttccttctgatttccaggaaacatcaactttattacttattatcagaacaaaaatatgtgttctggaaacgatattatattctattaatattggaacaactttccgatcattattatatgaagaaaatttaatcttctaacttctaagtaatgttgaactatatatttttcgtgaactatgtaatatttatcaattatgaagattgacagggagttttttatttatttatttatttgataaagaagattgacatagacagagaatgtacttatgtacatgttctgaatgaaatcatgaaatccaaaactaaaaactaataaatattcattaatttgttcgaagactcgtctacgttgataactttaacccctttcaaaaaaatattttccccaacgcctttaaactcatacttgtgtacgtgtggacttttagatagaagacagagttgcgagtacgcgtcatcattcctagtgttgtaacgtttgtagaatttttttgatgaaatgcctttttaattgttgttccaagatgactaagatgttgtacatacatacataatgagccttttaatttagctgcgacaacaacaccaaaaagccaaacctagttatatactccctatggcaaatcacaaatgatattcaaaaattaatgatgtagtctaagcgtttttgttacgtggatatgtaataaaagttagggatcagtttctattcgaatgattcgacatatattttgttttgtcagttgcatatataacggctatagtctatagattccagatactggtataaataaaatgagtaattgatgtaatatttttctattacagtatgtgatgtcccccattgtggtcgcatatcatcagcatatgagaaactattgctgttttactcaagattttgatacaagtacaaaaagagttattttaatctcatttgaaatcataacacgaacaattatggacttaacaaaatgatgatggatccaataactataaagatctttagataatttgttacaaatatatagtaccaaatttagtagaattgtggaaatttttaattgaataacacaatagtatcttatgattatcattcctttgggtcgcggggtgtttgtttgttcactaccgtttatggtaaagaaaatcatggttttgtttctcttaatgtgaatctctagtctcagatctctttgtttttatggtgatttagactttgtaattttatttttgattttttgagtttggattctaggaaaattggctcagatgcgtgtatttgtatgcttgaatttttttctctttaatttttcttaattagatctttgtctctgagagtctacaagtactggccggcttatgtctctcgaaggttttgattgccttgacagctattgtatgaaaaccttatttcaccattataatctataattccaaaaaaaaaaaaaaacacaatagtattttttctaatataaaaattaaacatattcatcaaccccacctaaaaataaccctaacatctcacggtttcttccacatgtaccctctctgtgcgtctccaattccagtttccgccgccgaagctaaatttcttcaggcttcatagaagaagaccgaacatg

SEQ ID NO: 15125 - DNA, 3000 bp, Unknown
  misc_feature (1)..( 3000): cDNA_ID_3094298_gDNA_ID_2926047_Annot_ID_196100 3000 nt of promoter + ATG
atgatccagattaatgtttcttaatcataatttatcagaacaatcaagttttcacacatttgtaaagtttcacaaaaacaattaaaagattagaaacttcttcttttcattaaatatcaaagtaaagcatacataagctgaattattgtgcttcagaatctcagtatacaaattgcacccaagatcgattcagatgcattgtcatcagattccaatatgatgatcatcagggttgccatgcattaatccaatccgtcaaagtggagacattgttagagatatcttcgattgtgttactttgtagttcagtgacaatttcctcatcataactgtcatgtgcttcttcgagtaggacttgatacatttcgcattgaaggttgttactaagcttggttcctgaataacccctgctttggttggttgagagaacacaatcagaaccttgctaaagcgaaaacaaactaaaactacatttgatggatttggaaatctgacctattcgttaaacggtcatacaaaacggagttctcggttcgaagcacgacaacgcgatcaaaccatcgctgaggaaagaagtcacagccatggtagtccacaatgttccctccttctatcatagcatcgtcaagctcatcaatcacctgatccacaagttcaatacaatatagctaagaaggctaattcttcgaattgaatccaaatctttatcaaactaaagagtgaagcttaagattctagcaacggttcaaagtgttttgttgacaaggaaataaggaggataaagggatagggatggagtaagaaactaaccgagtcttcgttgatgaagtgacactcgagctcattgtcccagccatggtagaattctttctctttgaccagatctccgatgcaaatataccggagattcgtggcttcggctagagcagaagccgtcgtcgatttgccggtaccaggagtccccgtgatcagtaggttcggcctttcgcgccttgtcaccccacggttacgtctcgccatgttcggtcttcttctatgaagcctgaagaaatttagcttcggcggcggaaactggaattggagacgcacagagagggtacatgtggaagaaaccgtgagatgttagggttatttttaggtggggttgatgaatatgtttaatttttatattagaaaaaatactattgtgtttttttttttttttggaattatagattataatggtgaaataaggttttcatacaatagctgtcaaggcaatcaaaaccttcgagagacataagccggccagtacttgtagactctcagagacaaagatctaattaagaaaaattaaagagaaaaaaattcaagcatacaaatacacgcatctgagccaattttcctagaatccaaactcaaaaaatcaaaaataaaattacaaagtctaaatcaccataaaaacaaagagatctgagactagagattcacattaagagaaacaaaaccatgattttctttaccataaacggtagtgaacaaacaaacaccccgcgacccaaaggaatgataatcataagatactattgtgttattcaattaaaaatttccacaattctactaaatttggtactatatatttgtaacaaattatctaaagatctttatagttattggatccatcatcattttgttaagtccataattgttcgtgttatgatttcaaatgagattaaaataactctttttgtacttgtatcaaaatcttgagtaaaacagcaatagtttctcatatgctgatgatatgcgaccacaatgggggacatcacatactgtaatagaaaaatattacatcaattactcattttatttataccagtatctggaatctatagactatagccgttatatatgcaactgacaaaacaaaatatatgtcgaatcattcgaatagaaactgatccctaacttttattacatatccacgtaacaaaaacgcttagactacatcattaatttttgaatatcatttgtgatttgccatagggagtatataactaggtttggctttttggtgttgttgtcgcagctaaattaaaaggctcattatgtatgtatgtacaacatcttagtcatcttggaacaacaattaaaaaggcatttcatcaaaaaaattctacaaacgttacaacactaggaatgatgacgcgtactcgcaactctgtcttctatctaaaagtccacacgtacacaagtatgagtttaaaggcgttggggaaaatatttttttgaaaggggttaaagttatcaacgtagacgagtcttcgaacaaattaatgaatatttattagtttttagttttggatttcatgatttcattcagaacatgtacataagtacattctctgtctatgtcaatcttctttatcaaataaataaataaataaaaaactccctgtcaatcttcataattgataaatattacatagttcacgaaaaatatatagttcaacattacttagaagttagaagattaaattttcttcatataataatgatcggaaagttgttccaatattaatagaatataatatcgtttccagaacacatatttttgttctgataataagtaataaagttgatgtttcctggaaatcagaaggaaggaaggtatattacgaaagagattccgagatctatacagaactgttttttaaacaaactgccatagttaatcacatggtggccacataaagaagaccatagaaatgatacaaagcagtgctgaagtcgttgccgtttacgcggttttatggcatatgtcattatgatctccctctccctctatatcaactggatacataaacacacatactaatgaacttctataaatataacatacatagaatgaagctgaagcataaacagcccaaccaagtcatatcttatctctgttctttgactttccctttttacagattctttgccaatagaacctaagaaaaagacataatatcgttg

SEQ ID NO: 15126 - DNA, 3000 bp, Unknown
  misc_feature (1)..( 3000): cDNA_ID_3094333_gDNA_ID_2926048_Annot_ID_196103 3000 nt of promoter + ATG
gagagtgagatagaatctttgggtccctgggatgggagtactcctgagcaactcagtgctcagattaccagaatgaatcagagacttcatcgagagaatcagcagtgcgtattttaatattgcctttcagcttttttccttcacacagaaacgacctgtgacagtaaattacgtgcttcaattttgttcgtgcaggttttctgaatcaattgatgaccttaggatgatgtatgagagcctagaacgaaagattgcaaagaagcgcaaatcctatcaagaccatcgagaaaaactcatggttgagtctgcagatctgtttatgttaaagctctttgtgttgttatcgtattatcgtttaatgtattcatcactatttgatcaggcctgcaaaaatgctctagattcacggtgggccaaatttcaaagaaatgcatctcttcttcggcgccagttaacatggcagtaagagtcgctttccccattgccacctacatagataaatctgtagttcggttgtctcttgagattagtatgatttttttttccatatggagctttctttgacgttaatcttctaagcagattcaacgctcacttgggaaagaaaggtatcagcggacacatcaaagtcagttatgaaaataaaactttgtccatagaggtaattgacactgccatggtacggtttttgctactagcgtgcccatattattacgtcatctgattgatatcgttctttatgacaggttaaaatgcctcaagacgcaacaagcaatgtcgttcgagacaccaaaggtctttcaggtactgcatccttccacactcttaaaaatcatacatctgattcattgccatataaagacatttcctatgtgtaacgctcttctcattatactaggcggagaacgttctttctcaactttatgttttgcactagctcttcacgagatgacagaagccccgtttcgagcaatggatgagtttgatgtgtttatggtattatgtccttttaagaattctctcttttacgagctttacgttgggatgagactaacatttttaactttctgattctgaaatataggatgcagtcagtcggaaaattagcttggacgcactggtggattttgcaattggagaaggatcgcagtggatgttcatcacccctcatgatatcaggtaaccaaccgatcaatttcaaaaaccatggaactcagtctgtgaagtgaataacttggatgaaactctttatctcttgtgctcttttacagcatggtgaagtcgcacgagaggataaagaaacagcaaatggctgctcctcgttcttgaaaacaaaaaaaaactctccttgtatagctccataaaggtacacacaattttgcttgcatgacccattcaagcattttatgttttgtgtctgcatttttcgccagttctcacttatgtgtttctttacgggactcatcagggcatcctcggctttgagtcaatactacgacgagctgatgggaagtttgagaagagctttgtcatccatggtcatggtgtattgatttgaatttacaggtgctgagtgagacccttttttgttttctctcatttctttttatgacatttatatattgtcaaactttgattttaaaactgtattatatatcatttttattgacttataattatcatttttagatcgaccaagtgtgacagattactttcctagtgataaagactagtgattgaggacaatagcagaaagactaagtaacttttaagcttcggattaagaaatgtccatagtttctgattctttttggcaagtttaagtacatcctgaatgttcgataaaggctagtgtcatcaacatctctaatacatatgacagccaaggagcatccattgaaaaatgaggcaataaaattgagtacttataaactgttcatacttcttttctacctttgacgttgtaaatgttaaatttatgaacttaagaatgtcattgctacaaaaaaaaacaatgtgattgctatgcaatatacatgtaatttgaatataaatcttggtccggttacgctaaaccaaaatctgatattatctgggctacgtgtggattaaaaatccgattagggggagtcgtgcaaagcccactaaaagaaacaggcggtttgttttattttaaataacttttaactcgttccaaagtcccacatcgctaacaatttaagaggtgaagacaagacgagtagtataaataacgaggccacggccacgaacaattcatacctttctcggccttttggctaagatcaagtgtagtatctgttcttatcagtttaatatctgatatgtgggccatcggcccacacgatattaactctattttttaagggagaaaacccactaaggtagcttgctatctgggttttcacgagtcgcccatgcgttgcactactgcacgggcctggctcatcccgccaataaaccagtaaaattataaatattggaaatctgccactatgttgtagatttgggcttagggacctaaataaataacgttatgtaactggtggatgaccgttgaaaccctcatacgcgatgcacatggttaggatagaattcactttgaacttgagatggcttcatgtaagctaatgggtatgagtagtaagttttagttggaagttgttaacatatatatctgaaagaatcaaaacccaaaaaaatcaaaaatcaaaaatcaaagaagcagaatcaacaaataacaaaattattatgggctggcccaaataaacgtggattcaattcttaatatgggctaatcataattgatattgggctatctatgttaatcatactgtaattttatttgttaagcaaaaaaaataaaggaaaaagaaaacagagtatatgtcctaaagaagtcagattgtcggaaacatcaacagattattaatcagagagatcgaaatttcctcttctcaaaaaactcaaaatttgaagatg

SEQ ID NO: 15127 - DNA, 3000 bp, Unknown
  misc_feature (1)..( 3000): cDNA_ID_3094344_gDNA_ID_2926049_Annot_ID_196109 3000 nt of promoter + ATG
ccaacaagtgtgaaatttaagtcatattaagttttaagggaaaacaaaatattttgcaaccaaatcgaaaggtttcattatgtttcgtaaggtttggaattaagctagtttgatgtcggtataatctagcaaaatgccaaaacataccacgctttaggaaaatttgcaaatacctacaaattttatttgtcattgttcgaatgacttttattcatttctatacgggtataaataagatcagaagactaaatttaaaatttgtatattaggacactttgacctaaactaactcctaaaatatattgtagagatagaagaacactacacgtttgggggcattgtctatataaaatactagtattaattaacaaaactaccaattattgtgtaagtctctttgcaaccaagtacgtatactctaccaattattacgtctatacatgcacacacaaattatatgcaaacaactacggcctacctgtaattttagtatctaatagtgattaatctagcggacaccggcactaatcaatacattaacgaatcagagtattaattaacggatcgatatatactataaacaaatgagattcagataaggtggtaccttgggaaatagattcaccgtaaaatgtgggattgtcgacgacgaaacatttcatatcggttagtttacaaagatgacgattactttatctattacgtttatactttatacgttgaatttttgattaatgattgatctggtatacatgcaaccaacgtatgaaattataaatcttttgattgttgccgccaatcaccattatcatcagattatacttgctccattaatatttttttcttttctagaatgctttagctaaaacaacaagattataaaattaaccatttatttatgcatttcctatataataatatagttcaaccaaacaaaatactggaatcatataaatagtttcgaaatataaaaaataatagatcagataaacattttgaaaaactatcaaacagatttaaacaaaaaaaaacaccaataaaacatctctgtgttactgcgctggtttttaagattatctctcaagctttgacttataatatcgttataatagttttttttttcataatgttaccaaacagtaacatatctttgcataatgttataagtccatgttgcatgtaataccgattatagtttggattatggttgagttagggtgttgggtcattttcatcgtgggcttttttttctttttctttcttgtcctcagattaaagcttgagagataatcttcaaaaccagcccagaaagaaaacaaattcatcaaatattaggtaagcttgttatgttatatatcaaccataaataacttgttacgattaaaagttgactttcatgatttgtaaaaactcaaatgtaagcattatagctattcagctcaacattattttcccgttaaaaacgatgtcttacattgaaatagatttaaaaggtttaaatttagacattcattacatgatttttttttggtcaaataacatttgaaaataggtggtcagaaaataatcttcaaaaggttgaaaaacaagaaaaacaaatttcaagtgttcgttcatttacatcaaaatttggtcaaaattggtgatatgtaataaatagtgtttgttgaaggtcagaactcccagaggtaacgcatactgttctgatgattgtgaggcccgttagtgtcatatttcttctaaatcgttcgattctctcgatgttatgtgattggacggcttggatttaatttaaattacagtcacaagttctcttatgataagcgaatatggcaaattcagccgtttaggatttagttttggctttgacttattaaaactaatttcagcctctcttttttttgtgcaatactaatttcagtaatttattaagattaacagtaagaaattaaaactccccaaattcaaatataattatattttgattattttcataccattatagcaattcgtcgtctatgaacttctcatgcatattgggagaatatttttctagtgaaagtggttaggctgtacattttgtcaaaaaggatgggacaaaaaaagatgatacttttgacataggcgtcgtgtcaaatttgtgctcgcaaattcgcatcactccaagttgttcattctctcttaactcttaagcattaattctcttcctttcgttaatttttttttacaaaagtctaccactaattatcgatcaataataataatataagataaaatatttcctttacaaattttatgaaaataaattgctatatattactctacttactttcacaaattgctatattttgtttagatatacacattttgtattgttcatttcattgtaaagtatattttgtggtgaggaaaaagagcaaaccattttccgacaccaattaaacgatcatagtcagaaacattgatgaaaattcagatgttgtacttcaacataatgtttcatttttaaaacgtgtttatacattttgggtaagtttaaaacacaaatacatgatcttactcgtgcatttaattacagtaattttgtaattataacacttgtgaaataccttaaacacaagtgcctagtgtaaagcgcgtgagtaacgtgtctaagcttcaataagaaattgatgacgtggaaatacaattaataaaaaaataacaaaattaagtaagccgggcaacgggtagtagtagctaacgtcgtctaattgacggcgtttaccatcgcgcaggttttttttgaatacatcaaattatatccgaacctaaggttcagacttagcttcggttgaccaaaagtttcttcattttcttcctttctctctcctacccggaaaaaaatagaaagttgcagagagagagagagagaccttagctgtatagagagagaaagggattgggtgttgtgcactgagttcgatagagaagaagaagaagaagaagaagaagaagatg

SEQ ID NO: 15128 - DNA, 3000 bp, Unknown
  misc_feature (1)..( 3000): cDNA_ID_3094340_gDNA_ID_2926049_Annot_ID_196110 3000 nt of promoter + ATG
tcgatgaaacactctttatgagttacgtaagaaggtgctactttagatggtaaaagacaaaactgctgaatgatagtttgatacagcgtgtatttgttgttgcacaatcctagtgcgtacacgaaaaaataaacagtactcgaaagtcgaaagtataaccagctcgaacaagtaaaatcctctagctggatattcgttattggaattttagaaaaatgattctctcaaagtgtaaacttgtggaaataaaatatatagcaaagtcgttgacataaaatatcacaaaagtcattctcgactctacaaatatatacttactagattttaatccgcggtacataaaagtttgtaaattgtatctatctataaaatatttttattttgtaatttacaattgttattaagtaacatcttgccaaacccgtcccgccaacccgtcccataaaaaaaccatttcttttattaatgttaatcttatttatgatatgtttatgaattattgtctaaatattttgtaattttgtagtaattaaatgctatcaaatatctctgcggtttgatgattataatcgaattgttataatcatggagaaaatcaatatcaaaaatgataattttgaagtaattaaatgatagtaaatattttggaagttttattttagtaactaatgtggagagttttaggaaagattgttaaatgtcaaatatttatttcgaagatgttttttttaattattaaaaacaaacattaaaattcagtggcagccattgtaaataagtcccaactacagaatttatttcacaaaataactgcaaaaatgtatatatagattctaagagaaaaatattaaactaacatatatttgtaaattgcaatagtattgacttatccgattatgtaacttttattttttttaattaagtatcttgatactacatatcttatcgatatgggatatgtatgaacgatttctgtttattttgttcttatttatgtgaatgcaacgatttaatttctttatttacggtctttctctcgcaatttctggaattctgcatagtggggatcatcagcctagttgacacggttacaaactgacagtgaccacctacaactattaaagagacttcattcaattctacaatattctagttaaactaaaagtttgcttcacattgtaacagacataaatccccaaaattatgggcctacaatttgcaataacttgtttatattgcacttctgtttttttttgtttatggtataagagttaatcatttggtcaacttcttaattgtatgtgtttgtacattgatctacttgtaatttttagcttattaattattatatggtgatgttggcccaatttcatcatggatagaatttaacctccactttttcaactctaacatcagttataaattgacttaaaaattaactacgtcactttccaaaaatatttttcaaaactcaacgcaaaacacatcatacaaattagacaatgggaaaacacgcgtttataatgacatttttgttcatgaagtgacaaatcatttcttcttcctttactgatctgacaattaaaaagcccgactcatccaagttttataatcaaattctaaacatccaagtttataatctaatcccctagaatcattctaaccgaccaaacttaaccggttgttttgtctcacatattttagttttatgtaattattatcactcgttaaacgcgttcctcgtcgattctgtttgactcgtatctctctatcattcaatcaacacacaataataagttgaataaaatatccaaaaatggtatataatataaatataaagataatggaaaggaagaggattgcatgggctaaaatacatacgatggaagttttagtggtgcacatcacaactttagtgcaagaaagaacatccaaacaatattatttttattatacagcttggaatgataaaaaataataatctaaaagctaagtttgacttgtttgcaaaataaaataactgagatgattacatttcggatcaaaccccaatcttcactttttaaaaaacttgtccaaaatccaacttttatatgactacatggtgataattcgcatgatataattactaattatgcatgttggataatgcagtaaattacactttaccagttaaaatagtttatattataaattactctttcggtttccaattactaaatcttttgagttttcacacacatgacacatcaaaaagaaagttacaataacaaaattatctatatgaattgttatttggtattttaaatagggaatggtagaggtgaaccatgaaaaaacttaagtgaaaatttataaatttgtgaaacttttcaatacattaatcagtttgaaacggaaggaaataattattttatgagtactcgaacaaccctatataccttaagaaaaagcacaaaaataatgaagaaaccctaataagaatttgaaacggaaggaattttaattataactagtagaactatataagtttctatatttacttacctaaataaatttaaataaacactacaataaatagtgtagaaactctctactcttttggttttccctttgtttcgtttctatattttattttttgagttcattagaaatacaaaaatggttcaaatctaacggtgctacaaatttcttcacaaggaaaagacactgtaacaaaattgaaattgccataacagtcgcaggaaaaaccatagtactactagtaacatgaatcatgatctgtctgacaatgacaacaaaagaatctgcctatagacttcatttatatattttcctcttttcacattatcagtctttattctttttaaaaattattttcatacttataacgtcaaattcacatttcttctctctatataaaccacactaactttacatctctcttacaaactccaagagcctcggagcattcgaaaagttcgccggaaaaacaaaaac

SEQ ID NO: 15129 - DNA, 3000 bp, Unknown
  misc_feature (1)..( 3000): cDNA_ID_1822772_gDNA_ID_2926050_Annot_ID_196112 3000 nt of promoter + ATG
ccctttcatcatatctttaaccagctaaaacaagtttgaagcgaattttgcatatatacagtcccaacttcgtcaattatattgaagttcgttatcttttttttttttttttttttttttttttttttttttttgtatgtgtatgtgtgtgtgtgtgaaatatcgcgattaatagtttaagaaaattcttcatcagaataatagattataatattttcaaagatttacttgttttttgattattttgattttattaaaatcatattgttgagacaatggtattatggtcatgaagaacctcaagtgttttatgtatcaattggcaaatttcagcacaagtgaatttttttcttgattattttctactgtctatacatataaaatagagaatataatataacaactttgagctataattagaatctgttggaaaaaaatgaaaaaatataacaaatatattctatcttgatttttcaaagtatagaatctaaaaaaagctatatgatattaattatccaattatatgattgcatttatgagttgatatgatatcttttggttgtttcataaaacagaatcaagaataagatgatcaataccgaaatatatggcttcatcatcaaatattatttcacatgtgattctccaatgtatcattattaagagttgttatacgaggacccatttttttcgcagcaatcaaatcaatttgagctttttaattaaaatcttcaaaaataatctgagaaaatcacagcgtctcattaattattaaaaaagtacttcaaaaaagtggatatacgattttgaaatgataacgatttcctgacgtcagaaaaaatcctataacaaacattaatgtttttttttggttagttaagagacaataatatgttacatctaccaaagaatattccagttaagttagttaatagttggagtcaaacttaaacgaacaacgtcgcctacaaatctgggggtataagttataaccaacggccaccaacatgggttttgatatcgtccacctgatttttatgttaatataactcaatttgattgattaaatattatgctcttatactaatcattctaggtccaaaactgaatcactcattgcacatcatttttatgatttttattttgaaaatctcatgtttcaagaaatatttgtgcattctactagtagcttattttaaataaagtttcgagtttatataataaacaatatgtttatttctttgatttgtatacattttaaaaaaaaaaacaggatgaagatatatacaactaaagctcaattcaactagtaggaaaattgtattctacaaaaaatttgtgtttatgtttttattatgataaccatccaaactcattatttcacccatgatcaaagtaactatatcaatatatctgcaacaatatctgactcaacatttatttttacataaactgcggaccaacacaattatgctaaactatcatcatttattctattggtattggagatcagtctacgtcagtgaataccgcataattcacatgaaactaactccaaaaccctttaaccaaaaaaaaaaaaaaactaattacaactccggttaacctgtcgataattacaagactgaaaacatcctagtcagtaaaaaacatatttgtatgtatccgatcccaccaaataaataagttgttgtcaatgatagaggaagagaaaacgaaaaaaaattgcggaccaagacatttgggactactagagtttagggagcataaatggtcctatttgacttaccctctaccgtataaataaatgtattttagccgtataaatgtatacatacgtagatgcataggtatacaggattactttagacgatttgatgtcggtatgacattacatttgactcccctagctccacttgtctctgttcatttttcttgtatgtcatttccttgttttccaattttacgtttaccaccctattttattttgttaatattttctaagtcaacgtgttgacacttaattacagaatctgataactaaagttacataaaatgctcacagtttttttcagcaaaatactcacattatacgacatataaaattttagcagtctataaatagtaattatttggcattagtattggacaagaagtagaatataaattaatgttggttcttttttctatccaacttcacacagccaattttgtagctgacatcgtgaatggacgactaaactaatcataagcatagtgattcagtttatacaacaacaacaaaaagttaattacatttgaggtttctttttaaattgctatgtttggtccctaaatgatggtcataataaggacggtccggcggtgacggaaacgcgtaaagactaatcattttagtactattaatttgtagaattattattaaatatgcttgaatcctagaaaacgatcaaataaattttggaaagaagctcaaaatgtgttatttaattttgtccctatgtagagctggtttttttatttttatttaaacataatcctaagatttattgctgtatgtgtgaatgcaataataaatagaaactcaataatagatcattcttattttcaaaaagaaacaagaactactgcaatgttttaattgtttattttgtattaaataatatagcttgttaattattggagatcgcattaaataataaaagaagttgtctcacatgtcttggagaatatttactaaaaactatggtaatgtctggacggtcaaaaaagtctctctagtttctgattctgttgtcacattttatttttgaaattaaatgtcgttagattattattatctatatatatatatatcccaacagacccattgcttctccaaccacatctcactcttcaccaacttaaaccctaattcaagatctcttcttttcgttctctccttcacccacattagtcttctctacgaccaaaatctcttgactttaaaaacagagaatg

SEQ ID NO: 15130 - DNA, 3000 bp, Unknown
  misc_feature (1)..( 3000): cDNA_ID_3094368_gDNA_ID_2926051_Annot_ID_196119 3000 nt of promoter + ATG
tgaagaggtaaagaagaaatccgtcaaagagcaaatcatcaaagagccaaccgtgaaaggtaagagaggtagaaaacctgtagaggcgaaaaagttgaccatataactacatcctgctcttgttattaatgagaagggagaagctgatgaaacaaaattacctgctcttaatgtgaagagagagtgttgttgtctccaaaaaagctgaggaagtcactgacaatgatggttagaaggaaggtgacagtgacgtatgagatgtcacataccagtttatcggtgaaaacggaagcacgttccctgagtctgatgatgatgaggattgatataatcgaagctttaaagacgcagagtattaagctgtctacggatggtagtgcattgaatccactctttaatctctcaacacgggtttttcctaatactggagacaacagactgaagtgcatgaggaagaattgtgtgccttcagctggaatatatgatcctctatcaccggctgatacagccaaattgtagaaacttaaggattacttatccccattctagtatgaccctttataccttattaagttgttaattacaacttgttaacattatttctgtatattaacttgtgtttatttgttaggaatctcccattgggcagggcaacaaacgatgttgatttctacagggttatcatctccgaaagaaagcactgaccaaccagagaatatggatggttgttcgatagtgtaagtattacattagcagagttattagtgtgttttgtcagagttttactacattatggctgagttattggtgtgttatgctacattatggctgagttattagtgtgttttgtctaagttatgttatattgtgtctgggttattattttgttttgtctgagttttttttttgtacaacatgtggctgcgttatatagagtcctcaggaataggtacaagcgaaatctctgcccattccacaacaaacgcattgcatttctagacacgtgattcgtgtctttttgggttagagagtatgtacagtgcaaaatataaaagaagatgtttaaattcaaagacaccccgtatgaaaagatagttaatggtttgcttccagataatcaacagacaaatatgaagtgaatagaagatgtgaatcacttgtatttgattccccaaaccagaggcgatcactaggtggcactacacatggaccagattaaggggcacattgattgctatgatatcattgtgggataagttacaagaaactgaatagaattgattagaatgttgtaggccgtttacgagaatgattccagcaatgatgaacgtgctaattcctactacaatcggtgaacataggtttgagcagtttacattcaaaaggagtagtgtctccagggtccctcaaaacgtacaagttggagctgcggcgtgtactcgtgttaattttttgaatgtctaacgcttggtataactttcaatgacatatgtgatttcaacctatacaggttaagatggcagcatatatctacaataaggcacctaatctgcttggacagtttaggattttgacttgggataattatattaacttttgaatcgtatttttttcaacaatccataagaccaatgaattttgttttctttataatggtttgatttcaaactaattttcatatcttggcattttcagataattaaattggaattttacattacaattattcttctcatagaatcaaaatgataaatctatattaaatatgttactatattccaaacttttttggtttagttttatggacttactatattgtgcataactcaaattaaattaagacattttcacttgggatcactatattaatttttgaaccgtatttttttcaacaaactataaggccaatgaattttgttttcttgtaatggtttgattttaaactaattttcatatcttggcctttttagataattttatattagaactattcttctcataaaatccaaatgataaatctaaattaaatatattgcaaatcttccgaacttttgtttggtttagttttatagacttgctatattatgcataactcaaattacatttaaaaactccatttgtcaaacattaggttttaacaaatacctccataatccccatgtggctttctagtacaattatttgtcaaacctacgatctatcttcattttagaatttctgagatttctctcacagcctataaatcaagtacaacattaggtttatagcatgatctccaacattaagaataatcaagtttttaccatttgttgttatttccaacttaacatgatcaaaactaaatgcgtggagtctttatgtcctcgacataacattatgtaaatactttttgactaaaaatagtaccattcacccttctaactctatgtcaatttgactacaaaaacattttgacaaaaaaatgaacgattacaaattacactgatggaaaatatacttagtcgaataaccaccaacggttgaatgtaaatgtggagttccaattattaatcatttttttcggcactcaattcacgaatgtgaatcaccactaacgcatctaggaatatatatagtaaggtatacaacttattttttaatcaaaacaaaaaaatatttgtagatttttgggacctttggttttccttaaaatagataagggaatattggaggatagatatgaatctatatgaattagaatttaaggtcttaaatccctttgtgataaggtttgggatacctatattttaggatctgtgtttatctcctgtggaaactctcttgtataaatacgaacgtgagttcatcaataaaagcaagtcactttgataaccaattctacatggtatcaaagagctgagatcatcaaaatcatcttcaaaaattttgtgttcttaagttaagaattcttaaattgtttcctttctctgttgagttgatagtcttgtgtgtcaagtaaca

SEQ ID NO: 15131 - DNA, 3000 bp, Unknown
  misc_feature (1)..( 3000): cDNA_ID_3094396_gDNA_ID_2926052_Annot_ID_196121 3000 nt of promoter + ATG
ttaggccaaacaaattagtatactattcaggtactaaagtagtaaacacaagggtcaaagtgattattagctaaccacgggacctactaattaattatatactattagaccagattaggttctcaattccgttccttatgtatacgtctaattataaaaatctcgaatgctaacatcatatttttttcatccgcgctttgattgaacaaccgaatataagaatcaaatatataccttcatgtcaaatattaattagaccaatatactgagaacttcgaattttccaataacaaaacaccgaccatttttaaaacattaaattacaataagtactgcttaatttgtgataaaaaaaaaatagtacaagtttaattatatttctatgtcatgccatttttgaatagttttttttgtcgttttagaaaatagttttaaacataaattcgattcatttttcatgtccattacagaaggaaaaagagcatgtgcaagtgcaacggtgataagcgtattctagacaaagacacgcgtatcaacccaacacttgtcatcttcagagtccctatataaaccccttcacacacacctctcttcattattcttcaaagctcccactaaaacctattaagagagaaagatatatacagagagagatcatggacggtaggggaggttgttgcatagccagatatggtggttacggtggtcgctacggtctctccaaagcagatcgaatcatgcttcgttttcgtcccattgctcctaaaccggccagcgacggtggaagtgtctctctcaccgggaagagcggctccaccacaactacaagtggtggaagctccgatctctcaggtaaatctgggagaggaaagagaaagtatcaaaaagattgttccggtgggaactcccgaaggtgcaataagaagaagagagatctaagtggagacactgctactaccacggcggttacattgtctcttttaccagagacgcctgagaaacgagtttttccagatctgaatgcttttccggtggagaagcagaagcgaaacggtcctttatggctgagtttcaacggcggtggtgagattttaacgccgtacaaaacggcggagatatcacgaaggacggtggtggtttcgtcgtgtgtgacggttgagcgtgtgactgacgcttggatcgacggttatggattaggggagacaaatcaggagaggaagatgaatctagtggaagacacgtgtcctggttttatatcggacggtgtagggagagtcacgtggaccaatgaggcgtataagaagatggctagagaagatattaatattccgatggaggaaggtgtaccggaggatattagttacgataattttcacgtgaacgtacggttagtgatgaaggagaggccgatgctaacgtacccagctttcacatgcagagtgagattacagtacacgtgtcaagatcgagaaagaggatccgtcacggtgccttgtgacgtgtggagaatggacggcggtggttttgcgtggaggcttgacgttaaggcagctttgtgtctgtgacgttctttcattcgccaccgttggatttacaatggtgaaaatgatgaatggtcccgatcgtatcgtatcacacatggcccttcgtagaactaaaaatatagcaagtgataaactttggttatttaattttcaccttgaacatatgtttctgtgttttattttttagtttgctttcttctttagttagtattttgtttataaaatgctgttttctctaaattgctaatctcaaatttatgtttttttttgttttgcttaaaaatttcaagaaagttgtatatatgtatgccttttacaatcattaaagtttttctttttcacattgttcgttttcatgtcatttaagcttgaagatgaaattgtcaacattcgtttgcaaaggtgttaacataataaacagtcttcccaagcccatacaagagcattacgtagaaaaataaatagtttactaatgggtagcctcatgatattcactaatgggcctgaaaatcaaaagattcataggcacgtgtaattcaatcgcgctatttacagggcgcgtttagtggataaaatagtcaaaatagtggagacaatgtcggtcggtatccgcgtctattacacgcgctatagtaacacgtgtaatctattaattcttgcgatttggagtattaatactcacgcgctccaagatcttttctcaaaacaattagagatccagattcactagattgcaccgtagccttcacagccgttagatctaaatatcgacggtacatatcgaaaggataattgtagccgtctagatttggttggctggaatttaacggcttagattcgattaaaggcggcgggctgctcatctcttcggatctataagtagagaagcaaattgttcgttattcttcgtaagtctctctctctcctctcacctctttcgttttttcgaatttttttttagttttccattcgaaaagatatccagaagctctcgatctagggttttccaaatcgattttggtaccttttttttgactcagtcgagggtttttctagggtttcgattagcttttttgccaattgccgttgaggaagatacttcttcggtgaatttgatttgattttgacctgagggagaagcaagaagcttagaccaattgggattctcagtttggtaagtcaacgtgcaattcataggaattcatcatcggattgatttggtaatcgcattcttgtgatattttttcggggaattgtgttttggctcgataacgatgaatggtgtctatagattcattgttgaagatatctgcaagatttttggagcaaaggcataaaagcattacttgcttgatttttttttttagtttgttttatattctaatttgatggtgtgaagacgattaactctgaaaagcgaatgaactgttgggtttctggtttatagcaaacgatg

SEQ ID NO: 15132 - DNA, 3000 bp, Unknown
  misc_feature (1)..( 3000): cDNA_ID_3094390_gDNA_ID_2926052_Annot_ID_196123 3000 nt of promoter + ATG
gcatgattcgatctgctttggagagaccgtagcgaccaccgtaaccaccatatctggctatgcaacaacctcccctaccgtccatgatctctctctgtatatatctttctctcttaataggttttagtgggagctttgaagaataatgaagagaggtgtgtgtgaaggggtttatatagggactctgaagatgacaagtgttgggttgatacgcgtgtctttgtctagaatacgcttatcaccgttgcacttgcacatgctctttttccttctgtaatggacatgaaaaatgaatcgaatttatgtttaaaactattttctaaaacgacaaaaaaaactattcaaaaatggcatgacatagaaatataattaaacttgtactattttttttttatcacaaattaagcagtacttattgtaatttaatgttttaaaaatggtcggtgttttgttattggaaaattcgaagttctcagtatattggtctaattaatatttgacatgaaggtatatatttgattcttatattcggttgttcaatcaaagcgcggatgaaaaaaatatgatgttagcattcgagatttttataattagacgtatacataaggaacggaattgagaacctaatctggtctaatagtatataattaattagtaggtcccgtggttagctaataatcactttgacccttgtgtttactactttagtacctgaatagtatactaatttgtttggcctaaaaacagataatcatgaataaatgccaaaattaggttaaaatatagtacatcgaaatgaaaaaaaaaaggtaatgttaggcatggtccaagagatgagggttcatacattatcattgaccgattctgaatttaatttagtggaatataatcttaatcaactaaaggtgatcgtgactctagatctcaaatctttattaacgggacaaggtcgatgatctcatgtccaaagaggaattttgtgccaatgaagttaggccacctcttttatgaaagggaaagaaggaacattggatggcgtataaataaaaatcatgagggagtgacggtatcatggagccatcttaaatataatcatacaattgattcggaaaaagtatatatggacatgagagtcaaaatcttattaaaaatccaatatagtaacatagaaataaagtagattcggaaggcagttcgagatggcatcaagaaaaatctgatgggtttgtgttgcgttgtacgttgcacgcaagaggacacgtagagatatgtaattagcttatcaacttacaactataatttacacaaacaatctcattatttaattaaccaaggcttaataattagtccatatatatttatacattcatgaatgtggacgaaactgatgactgatgttgagacttgagagttaggtttgattctttaacattcgatatctcatcttccatttttcgttattacatattttgttgcaaggaaaacacgatataccgtatagagttgatgtagctaaagttttaattcaacaatgtaatcttgatcattaaagtatagatgattttagtggttctacttgacgtccctacagatagtaaatgcaattatcaaaaacatgtcatagttactaaaagaagaaggatgcacaaatacaatctttttgggttggatcagatcaaattatatttggcttaaagacattgattactacgtatatattaaacaaatgaataaaattgactacctttgctctcaccctcacctgctgattctatacctaattaattatataatacgatagccaacagtttcaacataaaaccaccatcgaaacatactactgatataatatgcatatgggacaaatgaaaaatgaaaaatataacggatgaataacgaaaaatgaaaaatatcattaatgatataatatgcatatgggacaaagcaatcttatccgttacggactatataacatatcatttcttaatcatatattatatacgtatatatataatcgtatatcatcagtaatatatttgttgtaagaaaaacacatactgtatatacatgaccaaaaacatttcgctttatgcattgatgtaaaaaaattaaaactatacataaacacatcaaaaattacagacacttaacagatgtaccatgtttttttaagaatcaatagttacaaaatttgagaaaaaggtgatattttgtcatttcgttggatatgaaggaaccaatgataaaacatcgttagttactaattcaaacaacaaaaaaaagaaccccgaatttaaatgctcaccatcgacaaaccttggctatttattttataaatataagacaagtactaaatcctatcaacactaaacaataaaatcgaacatgttcacccaattataatctgacagctgaagaagataaggaaatactaaatatagagaggttcgatgacagagagaaaaaggtagactgaatcaccatcaaaaccacgcccaagaaccctaattggggaaagtggccaaatgaattctcgccacgtgtggatctgatggtgtcagagtcggtaaagtttaaaaaaggtaatgtgtgatgtctcgataagggcttttaaactggtcgttttgtctgggacacttgtacagttttggaaaggaggacccatgactagggcattctttagttaattttaaacttgataaatcagtatttcgtttctatatatttgtttatgaaattctgtatcattagagaaatcagatgatgtggcaatcattatctgttctctttaatcgaccaaaggttcgaacaaaatatcattgttggttatctgatatagagaaaactaatttagaaacctcgttttgaaaaattccaactacaatatgagatttgattctacaggagtttggaatatgggaaagggaatttacaaaagtgattgttgaaacattaccgattgttaaatggtaatagacagctgaagctgcacaatgacat

SEQ ID NO: 15133 - DNA, 3000 bp, Unknown
  misc_feature (1)..( 3000): cDNA_ID_3094428_gDNA_ID_2926053_Annot_ID_196127 3000 nt of promoter + ATG
ggaatgagatgatttctgctgaacctgagatcagtaatgaggaggttggtcattcatttgaagagaaaccaaaacattcgttgtctataaatgatgctttagcatctgcacttgctgggttattgtcttcacattcgatcaccgatggaaaatacagtcaagccctcgtaattacagccccagaattttcaagtgaagatgatgtggagatagaagagaaacctgggacgagtgcccatccagacgatagccaagttgcagcagaggagtctgaaaacaggtactcttcttccttggagagctctacttcgtcacagaaagagcccggaattactccagacgattctcatggaacgatgtatggagtttttaaaaaactggatgatagttttggaggagatgaggaagctgagactgtggttagcgtcagcgacaatgctttagatgaagagacggtaacatcaagcacaaaagctgattgttacacagaaagggaaaacctcagttataaacccacggaacctgattccctgattcacgagctcgagagttcaaatgtaactaccgcaaaatgcaaaggagagccttcaatggatgatgtcttgaagagtgttctaggttttcaaccgactacttcttcggtcgatttcctaacaccagtcctggatgtgaaatttaatttagagaataaagactcagacagcaagtatttctttgaggtactcttcacagaagaatcgaaaacttatgtagattgcaagaacgatgtttttgatgataacttagtctcagtggaagatgaagaagaactcaaaggaccaccaacagataccctttcgtctgtggagatgaatcactatgcgacgaacgagatgcctatacactggaatggtgaaatatcagaagcgagtcttatataaagggaaaattaaatgcggcatcaaagcccgcattttgttttcttctgatatctacatatttttttttggaactatttttgcaaatatattctctattttgcacttatttacaatgacatactaccgaatttatttacttgaattaaaatcttgcgactaatacttattacccaaaccgattatacccgatatatatggtatttcctttactctagcaacacacaataaaatcatatattctctagcaacgaaatcttaaaacaaccacagtttgaattatttgaattaaatttctgcgaataatttgcaaagaattaaaacaaaatttttgtaacaaaccaaaaaacatgaacgattttgtaaactattattgtttcaaataatgtttacaaaactacccaaatttaggttattaaatgacgtgaaaaaatccaaaacccaagtatatcaatcactaattgtgattaaactaaagatttatttataacattatccatagtaaaaaattgaagtacatttttagagttattatgtcattacctaaaaagcaaaaaaaaaattaattttttaaatattattatttatatatttcaactttataaaacattactaatatttaaatttataaaaagtttaatatatcacaattttttgacatcatcatataatatatagagtttaaaaaaatctcaaaaaaaattccgtcaccaaaatttttttccgtcatattttgtaattcgaaattttaaaaatgaacatatattaaccaattgacaaaaaatgtgtgggttcagcgtcccgcatcgactaaaatatttagacaatgattcacaaacatatcataaataagatcaacattaataaaataaatagattatttttacgggatgagtttggcaggacgttacttaataacaattgtaaactataaaataaaaatattttatagatacaatttacaaacttttatatatactaactttataaagaaaaatcgtccaagatatgtaccgcgggttaaaatctagaatccaagatacataacggctaaaaacacatactactcttaccacattacaaaagtcatgtatttttcacaaattattcagtctaaaatccaagatgaatttttttttagaattttacataatatagtttatcatgcttttattatatacactatacattttaatcgtaataccaactaatatactaagaaaacagatattataaatgtaaacccaccctaccaaaaaaaatatccgtaaacccaaatacataatctacaattcaacaatatgaatttcactcaatatatacattttcttaaaaaattagccccgcggtgtaccgcgggtcaaattctagtatagtttatagtttcaacgaagtttttactctatactctgttgaaagaagttgtaagctttaatgataccatggattactgtgttctatatgcgacaaatgcaagtgtagatattagaaccaattgtggcagaaatccaatgacgtggagaaaaaaagttatgcgctaggactcagaccagtacgttgccactcgacttcttagtacgatttgttaggatagatagactatagcaaagaattgaccatcttgaggaagggttaggggagttggtctgccgcatagagtaaaccaacgtgacttggagctatgagggaacactaatgtgacataaagacaactctcagtgagacctaagtttaagttgtacatattgagaggatatctagtttattgttacaaatctatccttttcaattaatcttttggggttaatggtgataaatattcaactatacataacactttttgtttacgttttttagttttccaaagtaagagcatacaaattgctaagccgaatttctcccactcctacttgtttatatgtacaatgggctgggcctataaggcccaatgttttgtgtgtcacatttcgtcacccacagacatatatacttagattgaagctaaagctgcagtctccgtctcttcgcttctagggtttcatcaaccaaattcgctttcgccgcctttccacaagcaatcatg

SEQ ID NO: 15134 - DNA, 3000 bp, Unknown
  misc_feature (1)..( 3000): cDNA_ID_3094442_gDNA_ID_2926054_Annot_ID_196135 3000 nt of promoter + ATG
agggccacccttgaaacttcaggaagtggtatgtatctccacagcttctctgatcaaatatcaaactaaaagtatttgagtagcgcaggatagtagtcaaaggcttctaagaattttcttttcaatgaaattagtgaattagctttcgctacaacacttatagagaacttccaacacttctacacatgctcgttaatgcagcattacttttatgcgttatataatctgatactgcaatctctttcaggtaagaggtgtaagacctctagctcttccggaaatggcaaatctgttcaacagttttcatgtgacgatatgccctgggcttgtaagtagttgtttacgatctcaaaccttcattcctcatgcacacatgtatacttcaaacttaacttgtattgttttttgtcgtaggatccaaaccctaataatctagtggcaagcacaaccttctactctgaaactacaggagccatgctctgtttggtgagatttcaccaagtttcacttcctggttttggcacttgccactccaatttctaaaatttcttaagacttatagtaatgacgtgtgacattttccttggtttgcgattttcaggcaagaattgaaacagacccagcggacagaacccaactacgattgacagtaggctcgggagatcctacccttacatttgagtatgatatatctgcctcttaatcacaaacccaacctcgatcacagattttcttcatttgcaattgttgaccccttttatctacaggttaaaagaattcatcaaggaacaattaattactattccaatgggatctcgagctctagttccagcagcaggtccagcaccatcaccagcagttcaaccgcctagcccagcggctttagctgatgatccaggagctatgcttgctggcttactttaaattcattgggataaaagattacttgcacatgtcgaaaagtttgttttctgttattgtagaatgtaatggcgaaaatatggaatgatgggagagtaaatgtagagccaagggagagaaaaaagctagttttgattatatttgtgccgtttatccaaagcgggcgggttgcgttaggtaagaaattttgcattcattctgaacatttgtattgtgaggtcagtggttgtatcagcttgttcttgtgcctatatattttcaatctgtttctccatgagttttctgatgggaggtctgttttttcgcaccagccttcacattgagagattttaatgttgtcataaaggggggaaattgcaaaaacacatccaacgcatagcatttcacctgtaaaaacctgatctaatttgaggtgtgaatagagtggggacttggccttggtgggacattcaaccgacatatatacaaccagatttttactattactttgaagaatataattgaaagaaaattttttttttactatttttaattttcttacaaactgcttatggatttaaaagctgttttatcaatttttgcatgatttttttttgtttttactacataatttgtaattgacaaaagtatgatttttttatattactatatcatttgtaattttgcaaataaaaaaaaatataagaaccctagatccggggcttgtgaaacaagagtgattaagcaaaatttgagtaagtctgacttttgcaagtttgcttcaccaacatcaatgtcgctcaagttgaagaagcaacttctcttaaagtatcgaataccctaaaatttgtcatgccttgaagaaaaactcaaccgagatattggagctgttcgaaatacctaagaaatcagccgatgttgctaacgcaaagggacaatatcttccataaaactaaaaatgttcaataagcagggccgacccaaatctaaagcccagcaagctgatgctttatcatcacaatcatataaaagccttgtagtttaatggttggtgcttccattagttatataagtttacgagttcgatactcaaactgccaaacaacaacatcctaggagcatacgctatcgccgtcactgcttttctagctcaacaattcgtcctattcatcgtcttgtagattatgatcttgttatgagacacatttagtatttcaaaaacgagagtagtgacaatactttcctattcaccagagtaatttggttgcaatgattctagcaaaattgttatctgaaatatagagtatctaaaatctttattcaaaagatttcataatacattgagtaaaattataaaatgctcataacaaaaaataatcaaatcagcactgcgtataaaccatttgtttcgttcccactaataccaacaaataccatgtctgacgaaaaaaaaaaaaaaaaagttgggaccagctaaaccattgcatgacctgacctgacccgaattcataaccggattttctcatggtacattttttttgttaaggattttctcatggtacattgaattacaactgaatgcattgaccgcgacagaaaacagtcattttaaaaataaatgaaaaagtgaaaccagaaacagcagtaaataaatattacccaaaaaggcagaaggatacactttttaacaaaatattacgcaaacttataaatcctcaaatttagtccaaatgtctagacgcgttaattctgtttttcgacgggtcaatttcggattccaatttcaaaacagacaaaaactgaattacacaaaattgaatagtcaaagttgtaaataaagaaaaataaaagtcgtctctcgtctctctcccgcaggcgtgtctctcttctccaaagatcagtctctccttttgaatttcttcgattgaaggtgccattttccgtttctagattgggatttcgatctcacctctctcgaattgcttatgcttcagctttagtctgtggtttatctcgtagttagatccggtgccgcgagtttggatctgcgccgtgtgaggcggcggagcacggtggatttgaggatttggttcaaccatg

SEQ ID NO: 15135 - DNA, 3000 bp, Unknown
  misc_feature (1)..( 3000): cDNA_ID_3094449_gDNA_ID_2926055_Annot_ID_196139 3000 nt of promoter + ATG
aagtagtgctaattaatttacatcctaaaattcttccattaattttgtttaccttacttatgtcagttatgtgtcatgccgtcatggcaatcatctctaaattaaatctcacgattatttgtgatattgctctagaacatctttatagtcatgtcttgtagttttttttccccattctattctatggacgaaatataaatataactttcgtaatgcaatattttacgacatatgattgaacaaatttatagtttactagtttctattagaaaacgttgtgttgcatgcattagttaaataattggtaaatgttactagcattgctagaatcattcacattttatgcatgtaaagactaaaaagatgttctagagcaatatcacaaatattagaaaagactattaaaactttgtgaaatcgatgagcatagtggactcatttgtaaaatctaagtttatttggtccatattatatatcgtatacaaaatttgcggcgtgtgaagactgttttggatgaaacacgttttaagacatcaattgttttttttttcttctaaaatttcacttatatctacaaaaataaatgtataggacagacagacaaaattacttgagatgataaaagaagattaaggcttcagtaatcgtgaatcgggtcaaagctaacaaaaatgccaccatttagggatgcgtcctcaaatctcataacccaatcactcccacgaagcttccttctcattcaacatttcaactccgcaaattccaagtatgaaagtattcaattaaccatttatgagtacatttgtaaagattttaattaagcaagtgggatatctaaagatatgcaaatacacacatattaatgtaatgtgtaatgtgtgtaccatacgggggttttcatgctaatttgacgggatgtccctttctccaatcactacaaatcccggtgcatcagctggattaatcctattttatttgatttttgttaaaaaataattagttcatgtaaatattactataaaaaaaagtcccgaacaattaatgtttattgatggaatatatatcaccaactgttatatactgacgttttttctattgtcagtaaataacataacccacacaattaatattagtgatttatctgtccatcggtatcacttgtagtataagactgatgaactgactaacatctgatggaatttttttagtggttcttaattatgtagcaagatatgatgcatgcatcgtggtttcaaagtgttaactttatataatggatttatgaaatgaaatagacataattgttgattgaggccaattattaaaatatgaacatgcatgcatctatatctatcgtttgtccgcaaatgcatgttacgcaaatttagataaatcttcacagcatatccatgagaaatataaaaaaatgttactttttttttaacgtctagtaaaaaaaagtaatcatctttaacatatttcaatttatatgacgaagctgaaatcagcattagaaagaagaaaaacgtgaagttgaacaacaacaaaaaagaacacatgttgatttgtcacttagaaaacaaatcgaagttagagattaatctagaaagtaatcagaagaaatttcaaaaacttgacattctttaggagaaggaatggatctagctgaatctttactacaagagtcaaaaatttattgatatataatacagttatacacttgactaagcttataaggtttagaattttattattttcttattttggtaatctatgtaacgtttgtgatttttgaacaaaacaggtcatgaaaagcacatataagtttttacgaggcaatattacaccaaagtttatcacaaataattagtttgttaaatggtactaataagatttaattctttgttgtttaatgaactgaagtgttctaacttaagatccctatattttccatttgaaatttcgctccaccaataatcgaattaaggaaaacgtaaaaagcgattagtttattcgtcgattatgattaaacgaacaagttccaaaaatgcatatttagaatttctagtctattatggctttgggctataaccttacggaaattatcaatgtaagtttcgtcgaaataaaaatttcacttctctatatatcgtaaatacataaatctccaaacacatgtcttggatttttttaataatgtatatatatatatatagagaaaaaaacacttagaagatttttttgaattttataaagagaaatatatattaagaataagagagaggaaggcatgtaggcatgggattgtgcctcttcattgaacgacaatacttctcatcctcacaaatggttgccttaccattggttggcattcgcatgcatcctccaacttattttaattattattgtcgttaatatattaaactacatagaatcttcattatgtttatcgtaatgccttcgttacgcctttatttgctccccatgtgtttactcttacctcattttcgaactccaaacttagttccatagttttggaagattggtgtaaatggtcaaacgtttttagaatatatatgatcatagttacgtcaagatcttcaagaaacaaatctggtatacaaaaaaaattggtcacaaaatcacaatcaagaaaatgtatgtgttacattttatggatagtgaagaataataaaatagtaataagaattgctgaagaggactctctagttgacatacacatcttacattcattccaaccatttaaataatgtaaacgaataacaaaacgcattatttcaataaataatattattctgatactaaaatttaaaaatctaaagtgtaatgatgaataaaacaccccacgagccattcacacatctcaactttttattctcctagaagaaactatagattatatctctcattatctcactatcttctccatatacttgttcaattcaatcattcctttgctttgctcctaaaccacaacaa

SEQ ID NO: 15136 - DNA, 3000 bp, Unknown
  misc_feature (1)..( 3000): cDNA_ID_3438042_gDNA_ID_2926056_Annot_ID_196142 3000 nt of promoter + ATG
tttttccctttattttattttttgttgtttttttggtttgaggaattataaagtacacacagtaacggctcatcccgtcaaataagggaacacgtgtcataatcgtagtcgacacgctcgacccaactcagactcgcacgcgctttattcactttcttttcaaccgtcagatcttaaaataagtgttgagctaatcgtgatcgttgattacttcgactttgttaacttttttgtttttttgctctttatttataacctctcgtcacgctcttcttctgcgaccatcattacttctcgtgttcaacggtcaaacttcacgttctcaagacactacttaacttttgttttcgtatgctaatgactactattaattgtttttttagtagtattagatttaaagtttgaaaaagattaatagcagttacgtttgagacagatttaaattaattccccaccagttgaaagaatctacgcattacgcatatgcttggtttttaatatgtttttgttggttcttaaatgtttgatggcataatatatctttcatttaatatatattgatgaacattaatgcaccttatctaccaatttgatgataatgtagggaaaaaatagcatcataatagataatgataatatctgacctttttcattggaccgtcttgtgtatcaaattaaaattattaacttgcttttacttaaaagcccataataacaatatttttttggatccgaatattaatgaaaagcccatatctaagttttatgggccaaaacgtataaatcgaataaataaataggaaaaaaattgagtattattacttttttttttcttttttttttacgacagtattattacaaaaacacttagaaaagaaagtgccacatttaaatggggtttgttcctttttctccaaccgaaaacacaatgataatgcttaaaccaaacagtagtacaactctttccatgtttgactccagatcttatgatcaattgctaatccatgtttcggttatttttttgatagatcctgacacggctttttaattataaatttaaattccatacaacatttatataaatcatgattaagtacttacgtcagattatgtaataattagtacgttcatatagtgccgggaggtttattagtaccatttttactctctctctttttcttcaattacacatttactttaaagtcgattatttgattggatgctaagttttagaaaataatgtcaaaaattctggttctcgagaggctacaaaattttaactctcctctctttttttttattaccgtattttctgtaaccatcatatctcccacccatagtgacttttttacatgggactatcaattttacttacaaaagttactggtttacaacggcgaccatggtttgaattcagataaagataaagaaggaaatgcagagaggtggggacaaattacaagaaggaaatgaaaaataagatgtgaaaggtggaaatgagaagtcgctattaaactttgtagtaatctctctcagattcaggcttcgtttcgcttgttaccaatggcttctttcacatctttccctctcgtgatttacttatatcttatctttatatgtctgtcttgactcttgatcatgcattcaatacaaataacatccaaaatattacttgtgtgtttctctttcttttccaataactaacatggagtactaataatattcagattttaacataaatagtactccctctgtttcataatataaattattttggaccaattttttgtttcacaatataaattgttttcaagtttctatgtaaattatatattattttattactttatgattatatatattaatatgcagtatcttttatgattggttgaactttttaatagtaaatattcttaatctgcgtgcttttatctaaaacaatttatattgtaaaacggagaaagtattaatttgatttgttctttctttcgttttcacttctttcatttgaataatatcctttgttgttttgttcaatctttcatttttgtattataacgaaactcaaaagaaggtattttgaccactaatgttgttgttaaagttttaaacatcctttttggataatttaatttttattgtaaaggcaagaaatacataaatatttaatctgctaatcgccttttttttcttgcctcgaatccgaattttaacatataaagaagcgagacaggttcgaattaaataatctctcttttaaagagatctttatagaatacataaaaaaaaatcaaactatttatagaaaaaataaaataaaaacgaatttttgctttcaatttatgtacattggaccacagaatctgcaaagctatgtatgtatcaagaaagacgtgactataataaataccacgaacaataaataattagattcttattacgaatcttttatgtattcccctaaaaaaaaccatgtcataattagtctcattaaaatacgattgtatgtaaaaaaaatcataccgtatgtagaaatatggacttcattctgtaaataaaagaaaaattaacgtgtcaagatctttgttaatcagtaattaaaatctaaaatgacttaactcaatccgcaacacataggactgggagcgtaatcatcacgatccgatcgggacatatgtttgtctccatcgtacggatagggtatatgagcgtgtttttcacgcgcatcattcgcgtgaactaagaatgctaatgaattcgttaattcgttaaaataaaataaaataaattatattagaaattaaaagaaaagaaagaaagaaaaaaaaaaaagacaaggcgtgagataataaaaccctttggctttctcatagagatttgtccggtctcttgttcctctttctcctttcttcactgtagaatccgtcgaccaaacaactagctccaatggcataatgagcattgtagtttgcaatttcttcttccgtgaagaagaagaag

SEQ ID NO: 15137 - DNA, 3000 bp, Unknown
  misc_feature (1)..( 3000): cDNA_ID_3094468_gDNA_ID_2926056_Annot_ID_196144 3000 nt of promoter + ATG
gtggacatgatatattacaaatttgcaaaaagaaaacacataatctttatgcccaaccaatggactgactgacccataaaagcttattgatttgcgatgccaaatgggttttacagtactttttgcttacccattaagggacgcacaaaaccaatccaatgagaataatatctttaagattttagtattattatcatcataaaagtatcttatcttatttttagtaactctcaaattctcttacacgtgatttgctaaattttattccctagcttttttttttacatacttgaagcttttcgagcttttaattttgtgcccaattcctttatgtatctttctaaaaggttccataaaaaggaaaaaacacattactttaagggattttaaaatatatcttcaagaccattacacctctttgaatagctaaataataaatgttacaaaatttattactcgccagaatgtaataactacgatgaatatattctagttacttcttctatagttatcatttttattttttttagtgtactctttttctagtttctaccccttttaaattgttcgattagttatttataaacatagaataaatatgatcagttaaagaagaagaagaagaataaatatctctttatttctgtcacgtcattaacaaagaaaatgccattttaagcttttgtcttttgaaaagctcattaagtaattaaataatcatatgacccatttcacttaatcattctaatcatatgtcgttgttaaaagccactagatagtagcttactaccagaaatggcttcgacatgttcacttcaaagaatcaaacaatctaaatattattggcataatcaaatactctaggaactataacaattttcttgaccgttattttctcgaataaaatcatcatatatttgtggaggaaaagaaagaatgtataaagtcataacagatatcatataatatatccaaaaacacccgaccgatcaagtgacaatgcgcagtgttgtattattatattatcactgtttgaaaaattgtcgaactcaggattggtttataactttgcaagacgataataactttggagttttgcataatggtaagtagaaaacgccatttttcatgcatctcccgtctttgtccaccgccaaactagtagccatcctctaattaataatgtattactacagctttgtatatattcgtattggagtttacagactaatcacatagtggttacgtttaggaagataaaacatacagaaatggtaaatagcttgtgaacctgaatctcgaaacttaccttgtccaatttgtaacatgaatgtcgactataagtaaatttgctctgacaatttacagtcaaactcaactatgagtctataatatcactgtagtgggtattgttcacacacaacgattaatactgtaattaatgctgaaacttggactacacgacactcatatgttttattgtttcacacacagcagaagaaataattggattttttttcggtccagtgattgcactggtttgcagaaaaattcttaaacgataaataaaccatgttcatctcatgattacttaatcgtttgagaaaccgtgacatatggtggtaacaaacaaaaacaaacaaataccaaccggtaaaacatatatacagtattttatacataaacaattttgtgattttggcaatcaaataacaaggaccacaatgacgctcgcgaaatttaattaaaacggggaccaattttaatcaatttgacccggtgtacattaatcttgacatgcatttatttacgtgtgatgttgacctcttggtagatacagtactacatttatatatttttgatgcaacacataactgtttagtgtttttgatatttcctttttttatcagtctaactctcgtgagtcgtgagtcgtgagttgtgagtcgtgatccattgggattattactacgtagtacatgttaaactacatatataaggattccataaatatgaatcaaatcgaattcttcttatataactaagacattaaatgtctacttgcacttcattaaaaagaatcttctgattttatttttggtatatgcaaaattataactgcatttaaaacagagattagatcatgaaacgaatattatttctgaaaaagtaggtatatctagtaatgttaatttattttttgctaaggatatctagtaatattttatatgaaacacttgtttttatttatgtgttttgcgcataaagtcaatattataacgaatcactagattagttttatttttatcttatagattagtttaataagcctatatctataagatgtactatgatcagagaaacattaggtgtaatgagaaaacaataataaaacggtcatatataagtaaatccaagtcagtgagagacctgcaaaaatttcgaactttttgtgaatgtcttatagcaaagatactattctcccatctgatcatgtttccatagatattagttaattggctaataatacaattcttcacacacatcacatgatcgatatgcgtaatctcacgtcacaatttccgtcataatcaaaaggagtaacagaattagtatattatatagtttctgtgatctagcaaagatttaaatgtaaacaaaactatccagatttatatggttttgttacgtttctttgaagatcaatgtaaacaatgatgaaccaatattagggtccacgttgaatataaacgtgaaaaacgacaaagcgacgtcagcataatttacgaataggaaaacagtgttaacttttgttatcacattccgtgcaatttacataggatatagaattttttatttacaaaagttatatttataaagaattactcaaatcaagaattccataaaaagataaacactttcatatatcgttcacaatcacatggccttttcaaaaaatcaatcttttagttctctatcgatgcgtaggcttgaagcatg

SEQ ID NO: 15138 - DNA, 3000 bp, Unknown
  misc_feature (1)..( 3000): cDNA_ID_3094495_gDNA_ID_2926057_Annot_ID_196149 3000 nt of promoter + ATG
gtcaatgaataagctaatgctgttcttggactagttatttaggattgaaattgaatgatcttgttctacggatttaatgcaggtagccatagactcttgctgtgcaacttttgcagaagtacagaagagaggggaagatttctggtcagagtttgagttatatgctgctgatcttttagttggtcttgtggttgatgttgccttggttggacttttggctccttatgcacgtatcgggaagccgtctgtggcatcaacaggtttattcaaggatcttaaacgtgcttgtgcatcccttcctagcaggtaatactgttactgtatctctctcgtttttttcacttttgtgttaactgttcccactgatatctatcgagctggtggctgtgtattcgggatgagatgtacttatacatgcttttttttttgtacttctgaagtgtttttgaagcagaaagaccgggttgtaaattctcagttaaccagcggattgcaacattcttctacaaggtatggagaagaactattgctttaatgtcctttgtggatcttgcttacctttggtttgattaattgatgtgattcttggtccagggcctcttgtatgggtcggttggattcggctgcggcctcattggtcagggaattgcaaatctgatcatgacagcaaaacggtattctttcaccatcgactttatcttgctacttttcaatgatgaaatgaatcttctgactgtttaaaaaactgttcttcactgaaatttgaggttacctttgttaataggagtgtgaagaaatcagaggaagacgtccctattccacctcttttcgaaagcgctgctctctggggtaagctttacttttgatctctaactatgttctacagaatcatcgatgcttttcccctctgatgttcactgaaaacgatagtcttgaaccgtcgatattgtgttgtctactctttttccgagttcttgtgatcagccatcggtttcttaaccgggcttagtttcttagaaaggaaagaacctgaattgccaatgataccaagaatagattatgcttacaattctatgtgaagatattagctacattgtcctgttgttagcaatattagatcaatggagagggtaatttagttgctgagctcagagataaccctgaagtttactctgtgaattgttgattacatatacatatatattcactctcttctctgtattgcgctgttgttcaggtgtgttcctcggcttatcttccaatgcgcgttaccaaatcatcaacggcctcgaacgcgtcgtggaaggttctacagcggccaaacgtatccctgtggtcgctatggcattcacggtgggagtccggtttgctaacaatgtgtatggcggtatgcaatttgtagattgggctaaattgtccggcgttcagtaatcaaccggttcggttttgttacaaaccggatagtaaactagcctagatgtcaatcctcaggagtatgagagtatctctaatctgatggggaagtttagttatctgagtttcattagtgtgattaggttatttaccgagagctacagaaagagaatctggttcatgatacggaccggattcttctaaccggaatactactcgatacaacattttcaatttggttttggaagttgagtttctcatggtatccttgtctctcttattcatttttctgaatcatatacttgcaataatgactcaaactttttatcagccgttagcctctgcgtttttataaagtttataacaatatgatcacaatggcgaattatgtcaactaaacgtcatttttgacgtttgcgttgattcattcttctgtgttttttttttcacttttcccaccgttaaaagtgagaaggggaaaaggagaattgttggtaggtggagatattaaaagtaataaataaaaatatttaaagcaactatgagtgagtatattacaaaaaaatctttcgatatttatttgcaaggaaaatattcttaggatactttgatggtaaggcatcattcgatagatggaggatcttgcgagtgacagcttagtaaccactgtcatccaactgctgcatgatcctcatcttttgttctcttgtttctgttttgtgccccttaatgatattttatttatactcctttacttaatttgaacaatttatattatatgccctatagattaattaatgtgaataccaaatggtaatcaaaagctgacgactgttcaaaggaacattgtcctcccaaggaaggtgaatcatttgattaatcatccctacgttgggaccataacttgacctgaatttaaaatccggttttttcatggtctcatggtatggttatgtacttatgttatactgaaataccaattgaatacataaccgcggtgaaaaacagtttaagattttgagacagattgtacaaacttcgttttaatggtgcagtcttttgagaaatggccagctttcttcatttttaatatataaaattagtttattccatgtttatttttcgaattactcgtttattttttgtatttctcgaacttgtaatcttaaattcgtctgtttagctcgttttaatttttgtttttttttgtaaactcgtgaattctgtttttggacgagtcaatttcgaattttccaaattcgcatgtgttcaaaaatcaaaacagacgaaactgaataacacaaaattgaatagtcaaagttgtaaataataaaagtcgtccctcgtctcttcccgcaggcttgtctctctcttctccaaagatcactctctcctttttgaatttcgtccattggaggtgtcattttccgtttctagattagggtttcgatctcagctctcgcgaattgctaatccttcagctgtggtctgcgctttctgtcatagttagatccggtttcgcgagttcggatctgcgccgtgtgaggcggtggaggacggtggatctgaggactctgttccaccatg

SEQ ID NO: 15139 - DNA, 3000 bp, Unknown
  misc_feature (1)..( 3000): cDNA_ID_3094514_gDNA_ID_2926058_Annot_ID_196158 3000 nt of promoter + ATG
acaataatcctaatgagcttgaactctccgttttattgaaattttctccaggatattgaattgtcaaaggaaatcaacgagtcattcaaacaatcttcccaggccagaacaaaactgccatcgggaattgagatgagtgtccacgttttaacaacagggtatgtacaatgtatcaattttatccaggatataactgctggaatgcggatatcatgacatatataaagcttgttaacttcccgtctataatacaggtactggccaacatatccgcctatggatgttaagcttcctcatgaactaaatgtctatcaggttttactaaaagttcttcttatgtatttttttttgtttcctcgttggacgttttcttacaagctttttctaagctatctgtatgtttcgtaggatatcttcaaagagttctatttaagcaagtacagtggtaggaggttaatgtggcaaaattcattaggccactgtgttttaaaggcagatttctccaaaggtaaaaaggagctggctgtttccctgtttcaggtcagtcaaattttttttcccccccccccccttttaagctctttcctgtcttcccgaggttacagtgttaatcaattgctcttttctttttgtctcaggctgttgtgttaatgttatttaacgatgcaatgaaacttagctttgaagacattaaagattccaccagcatagaggacaaggagctgaggaggactttgcagtcgcttgcttgtgggaaagtccgtgtcctgcagaaggtttggccaaaatctggactctgttaactctcttttcagctaatgcagaaactgccgagattatggctttgcctttttccataaggataagccttattgtgtaaatatttttgcagaatcctaagggaagagatgtagaagacggtgatgaatttgaatttaatgatgagtttgcagctccgctgtatcgcattaaggtacgttggtttttttcttggtctcttcacttaaagtatcctagaatcttgtgatactgttttgtatgtagcttatagtgaagcaattctttcttttgttcctgggtgcaggtaaatgcgatccagatgaaagagacagtagaggagaacacaagtacaacggaaagagtattccaggaccgacaataccaggttggtttctgctctccattttcctttacgatactaatttctgaaatcgttcttacaactttggcttcttaaacaagaaaagattttgacaaaatggttttccccatcacacccttctcttacagatcgatgcagccattgttcgtattatgaagacaagaaaagtcttgagccatactcttctaatcactgagctcttccaacaggtaaatttcactcctgcttgatgattttaaaatccgaaataacatgtcggtttatgaaaaaagaaagcatgaaattcgttactaggtccagtcctattggtaatatactcgtgatgatgattagagttctcagtagtctactaaatttaatataccattgctatgaatggatatatgtttgtgatttgcagctcaaattcccgataaagcctgctgatctgaagaagaggattgagagcttgatcgatcgagaatatttggagagggaaaaaagcaaccctcagatatacaattatcttgcttagaatctctttggtaaacacaccttttgaatattttcctttttgtatatttattgacaaacaaacgatgaccgaaattttcttatcagtttgaaaaaaaaaaagaactctcgatattccaatcatctctattctcgctgttccgcccgttcttatgtacagccttaagttctatttcttactttgattcacttttcctcggttctcactttttttttttttttgaacatactttcttgggacttctttgttttcagatttttatacaacttaaaagatgtttttgtttccctacaaaaataactgatttgttttaaaaaaattcaaacttccaataaagttcctaagataggttatatatcttcgagggttttctatgtgctgattccattttgttttcgtttttgagttttatttgaatggagatagttcttagagctttttcttcgtttttaggcaattaaatcttaagtttaatcggatttttttttacactacattataggcatttctgtttttaccactaccaaataactaaagaaagaacagagagaatcaaattgcttacttgatgaacgtccctaacgacatttaactatggctgatcaatattgtacgcaactgaaagacaattgaataaaattcatactacggtttgtgaaatagttaaatgtatctacacgtacatttaagaaaaatggaaatatattgactcatcgtccaactgcttcaatctagtgactccacagctttttagttcgggtttcatactgtagtaggaaagtaaacgaactatgtaaagaaaattggatttcagaaaaaaataattatttgatgaaaaaaaaattgaatgaaaatgttgtttacgaatatttttgctagtcaaaattaaaatatttataaaatttatttgtctttagctaaagttgatgagacatgagaggtagctaggaagaaggattgtttgcctacatatatgatgaatgtttgtgagtgattttaatgtagccatatcaaaagaaacaaaaaaactaaaacccttaaatagaaattcaattttgaatgaaactgtcgtttacgattgatttagttattcaaaatggattttgttagtcaataacaaaactgctaacgatttaattccccctttcccttaaagacccgcacctacctatatggtttaaatttgtttcatagtttgtttagccgtaaaagacgggtatttcctatttttgtaaccaatgcaaagcctttttaatcaaaagcaaaaaaataaaaacaaaagagaagtaaacagaagctctatagaaaaaggaaacaaaaaatg

SEQ ID NO: 15140 - DNA, 3000 bp, Unknown
  misc_feature (1)..( 3000): cDNA_ID_3094505_gDNA_ID_2926058_Annot_ID_196160 3000 nt of promoter + ATG
caattttccactgtaatttaacatcaaaactcacacaaaacttccatcaatcgcaagccaatgaaaaccctaaaaatcacgaaccttaacaattgtatcatttcaaatcaatccagagcatcaattgcacagtagagtaaaagacccaaatcaaatcctaagattacgatcaaaatcgtaaagatgaaagaaatcgaaatcgagcgaaacctttattgagcttgattacaaacttcttagtaggttgcggaagtgtagctttcttccgagagagattagcggcggcgggagttggatcttcctccatatgaaagccaacaaccttgtcggcggtattagggtgttgaggggaatggtggaggtcgtttttggcctttttcatcggaggagaagagtaagaagagtcgtcggaggcagaagcggcggagaaagtagagcgtttggtaggaagagacatgaaaatgggtgaaaattgtgtgagagaatcacgaagaggaagaagaagacatcaatcctaaataataacaaccctttctctctaccaaaagcgcactgtgcactctctctctttttttttttgctcaaacctacgcgaaaactcgcgatttagacccgacccgagaaatgaagattttttgtttatttatatactctgaataaaatcagaattattttatttatacattcataaatcataattactatatgataaaaaaaatattattgataaaaatagacatataccgcaatgattagatgtgcgttgttttaatggttactaatcacaaaagtgaaaaacaaaaaaataaaaaataataatcaattgttgcctgttttgtatggttattttttataactacttttaaattttaactactttttatttttagtttttgacaactgataaatcatatctattgtatatttttagagtcgaatttttattaagtcattttacgatttaaagaataaagaatcgatcacacgagtcgatgcttgatatttagatcatttttgatatatatttttatttttattttaaagaaaattgagttgattttttttccatatatttcttttattttttaaaaaaaactattttaaaagaatatattagaataaaatgcctataaaatagactcacctataacgtggagaatggagataaaaatagagatgattaaatacttttagcagtcggtaatttcaggcagaaaattgtgtgatgttaaaagacatgaacgaagaatcatcacttgacaatatgaataaatataatatgatcgatgtcatggattagccaatgtggggcgtgttgacttgctgctccacagggtttttggacttccggtttagggtttggttctgattacaaaatatgggcttatcaaattatttacaggagttaatactttgggcctgattacaaaggtttaaccgaagcctatcaagcagataagagacgagatgagattgttagagcatctccatcggcaaaagtggtagagagtatctcaaaaagtaaataaattaatattttaatcaaattaatatattttaattagtttgaagtaaatgaactattaattgaatgacaactctcaataaatgctgagaatagtctctcttgccagtttctccacttttctcttcttctctcatactttttctctttttaattattatttaattgatgagtatctcaatcagatattccgatggagatggtcttacaagtgttaccgagacgtaccaattggcgaactcatataacttgtgctgttgtgcgaatgtgttttgattagtgagggttcttgggccaaaaaacatggctggtttttaagtcgcaattgcaaggatgaatattattacagccacagcctcaacgactgcatggtcttaaaactttttattacatgttgattagcctatggaattgtataattactaatacaaaatggtgttcattacattctcacctcgcttaaacttactaataatttttttttatttctttaatccctcattaacatgtcaacacatttattttttctttattcatgtttcaagactatagaatttctcaattaatcccaattgatactaataatagcaaattgtaagtctcttggatcgttggatcaatattttcacatgcaaacatgtgaaaatgaggagttattgaaaaattgtaagcttgacataaaacaaacaattgaacaattttagctttgaatggtttgtacatggaacactgattaataagattgcggattaaaaccgcttctgtttcaccatttatatattctaatcggtagtcatgctgagatataaaagtaaaaataaaattgttgtggactgttttttcttccaaaatttacatcgtaataaaaatagaaatcttatgcaaaaattataaagatttttttttagcttttactaaaaaataaaataagatttgtttttagtaacgctttaccttaaaaagctgctagagtttctaactttcagtttattatcatcagcacaaactcttatgaagatcttctatttcttcttcatcctcttcaacaccaatcactctcaccaaaaatgaataataaataaaccataaatctctcttttatccaatgggaaaattcatcacaaccacactatctccaccgctctatgcccgatcaaagcttctctgtttttcacttctctacttattcagtacaatctttctgttcctctacgtatctctctcaagaaaccaatgcatctttcgatattcgccatttgatccgattcaagcaaaacttttctcttatccttcttcttatggtgaacataaatatgctcttcccactcatcgatcttcttgttcttcccctattttcttttcaggtaattaactatttcttcatttaagaaaaataaaataaaactatttcttcatttttaatatttttactaaattttgatttttagataaaataaactttttgatcagtggcc

SEQ ID NO: 15141 - DNA, 3000 bp, Unknown
  misc_feature (1)..( 3000): cDNA_ID_3094509_gDNA_ID_2926058_Annot_ID_196159 3000 nt of promoter + ATG
taaaccagttaacatatttttattttttacttgaatgatgatgatctcaccggaattgctgaccggaaaatctctgaagaagccgcatggaacttcgacgtcaatgttcgaatgattgaaataagaaaatctcttctgagtactgaaatttccaccgaaactttcactttttccattgatatatctcaaattttcctttggtgatgaaccgctcaagatactctgtatctctttcaacactgtccaataatctgattcattaaaaaacaagataaacatattcaagattatttcaggaaaaatatatataataaagaatataacaaaaaaacataatgtgaaattccgtttagtcatagaaatttgagaaaatgtaggaatcacagtttgatatttttgctatttaaagcaattctagtggccagcaatattgaaactcacattgcgaatccatggccactgatcaaaaagtttattttatctaaaaatcaaaatttagtaaaaatattaaaaatgaagaaatagttttattttatttttcttaaatgaagaaatagttaattacctgaaaagaaaataggggaagaacaagaagatcgatgagtgggaagagcatatttatgttcaccataagaagaaggataagagaaaagttttgcttgaatcggatcaaatggcgaatatcgaaagatgcattggtttcttgagagagatacgtagaggaacagaaagattgtactgaataagtagagaagtgaaaaacagagaagctttgatcgggcatagagcggtggagatagtgtggttgtgatgaattttcccattggataaaagagagatttatggtttatttattattcatttttggtgagagtgattggtgttgaagaggatgaagaagaaatagaagatcttcataagagtttgtgctgatgataataaactgaaagttagaaactctagcagctttttaaggtaaagcgttactaaaaacaaatcttattttattttttagtaaaagctaaaaaaaaatctttataatttttgcataagatttctatttttattacgatgtaaattttggaagaaaaaacagtccacaacaattttatttttacttttatatctcagcatgactaccgattagaatatataaatggtgaaacagaagcggttttaatccgcaatcttattaatcagtgttccatgtacaaaccattcaaagctaaaattgttcaattgtttgttttatgtcaagcttacaatttttcaataactcctcattttcacatgtttgcatgtgaaaatattgatccaacgatccaagagacttacaatttgctattattagtatcaattgggattaattgagaaattctatagtcttgaaacatgaataaagaaaaaataaatgtgttgacatgttaatgagggattaaagaaataaaaaaaaattattagtaagtttaagcgaggtgagaatgtaatgaacaccattttgtattagtaattatacaattccataggctaatcaacatgtaataaaaagttttaagaccatgcagtcgttgaggctgtggctgtaataatattcatccttgcaattgcgacttaaaaaccagccatgttttttggcccaagaaccctcactaatcaaaacacattcgcacaacagcacaagttatatgagttcgccaattggtacgtctcggtaacacttgtaagaccatctccatcggaatatctgattgagatactcatcaattaaataataattaaaaagagaaaaagtatgagagaagaagagaaaagtggagaaactggcaagagagactattctcagcatttattgagagttgtcattcaattaatagttcatttacttcaaactaattaaaatatattaatttgattaaaatattaatttatttactttttgagatactctctaccacttttgccgatggagatgctctaacaatctcatctcgtctcttatctgcttgataggcttcggttaaacctttgtaatcaggcccaaagtattaactcctgtaaataatttgataagcccatattttgtaatcagaaccaaaccctaaaccggaagtccaaaaaccctgtggagcagcaagtcaacacgccccacattggctaatccatgacatcgatcatattatatttattcatattgtcaagtgatgattcttcgttcatgtcttttaacatcacacaattttctgcctgaaattaccgactgctaaaagtatttaatcatctctatttttatctccattctccacgttataggtgagtctattttataggcattttattctaatatattcttttaaaatagttttttttaaaaaataaaagaaatatatggaaaaaaaatcaactcaattttctttaaaataaaaataaaaatatatatcaaaaatgatctaaatatcaagcatcgactcgtgtgatcgattctttattctttaaatcgtaaaatgacttaataaaaattcgactctaaaaatatacaatagatatgatttatcagttgtcaaaaactaaaaataaaaagtagttaaaatttaaaagtagttataaaaaataaccatacaaaacaggcaacaattgattattattttttatttttttgtttttcacttttgtgattagtaaccattaaaacaacgcacatctaatcattgcggtatatgtctatttttatcaataatattttttttatcatatagtaattatgatttatgaatgtataaataaaataattctgattttattcagagtatataaataaacaaaaaatcttcatttctcgggtcgggtctaaatcgcgagttttcgcgtaggtttgagcaaaaaaaaaaagagagagagtgcacagtgcgcttttggtagagagaaagggttgttattatttaggattgatgtcttcttcttcctcttcgtgattctctcacacaattttcacccattttcatg

SEQ ID NO: 15142 - DNA, 3000 bp, Unknown
  misc_feature (1)..( 3000): cDNA_ID_1388571_gDNA_ID_2926059_Annot_ID_196165 3000 nt of promoter + ATG
aagaatagtaagatgcgaaccggtgatgaacttcaaggagatcaatctttttcaccattctatcaatttccatcttcagctcctacacaataatacaaccccaaaaatagtcgattaccatctgaattaatacatactgtacattttttttttaaataaatgaagaaactaacataaagaatatatatgaatatagagaatgaacctgcaagtatcgttctacttgaggcctctctgccacatagaaggcattactaaacttgccatatctatctataatcttctccatcctgaaaagttaattcacaagaagatatttgtcagtgatgaatgatgatgacggatcataagattgaaatattatggacgaatattcttaatatatatatatctacatgttatcttttataccgacttagcttctatgatagatttgtccaccaatattttgattaatgtagatgtctataatttagataacactcatacaatcgaatacttttaatttttgcaatcaccaaacctagtgaaggaaggtttttgctgcacaaagattgttaaacatgaaatgaaaaatgaaacaaagggaagttatacaaaataaattatactctgtaaagattgtatagtactaatctttaaaccaattctattaaccacaaaacaaaagggatttataaaatgaacaatgtaccgacctcatgattgtaaatctagtgaaaaagtttggatgcccgagatattttttaaatcttctcatcatgcattatatttacaatttctgtacttaatgtaactacattttcggatattcatttatgctggatattctaataaaaccagatgccaagtgggtgtgtgggtaacagtttaagttccaaggaatacgaggttcactgttcaagaaactttttttctgaaaaccctaatacaatccacttgctcgtgcttgaagaaactctcttaagtagtaaaaattcttaagtttgcttaaataaaatccagaagctaagtacttacaaaacttaaattctaaaattagaatgtgacaaggcattgttgggcaaagtcaggaactagctagcaccaaaagaaagggggccaaatctttagcgcctatattattgcaaaatctctagtacgatttaaccagagatatattatactattcactacagaagttctagatactcaacaaatctatgtgtagctagagaaagattttggaaatagacatgtgtaaatattttgaaataatttgatgaaagaatatcttactgggagctagagtattcgtgtaatcttccgctctgagaaaagacaatggcggctacttgagcatcgcatagaaccgaaagctcatgagccttcttaaatagaccgcttcttcgcttcgagaacgtgacttgtctgctcgtcacgttctcaatcttcttgatctcgatcttccctctcaccattgttcctgcgatattcattccaagattcatcagattgaaaccctaactaaatccggaaggaaattttcactcagacaaaatcaagaaatgatttcttgaaaatcgagaaggagatttcaaagccagaagtcaaagatgataacttgaataatgtaagaaactcagaagatccaaaaccagatttgtctagattcacttcaaaagctacatagaacatacttttttccagacgacaatcaaccgacaaagttaatagttttagagaggggtataatttgcacatcttaactatcaagaaaaaatatatttgcacaaagaaagaaaaggaacaaaagcttaataatggtgaaaaagaaaccctagaactaaaattccggaaagaggcatgagctagatcttatgatgataaactctgtgtttacctctgtgcctctttgtacaggagccacaaaccctaagtctaagctttgctttttgtgttctgattaattggacagagaaaagggaaaaaaaaagaagaaaagagatttttattttcttcttttggtgatggtagttggattaataattgaacaacaatagagagagaatcattcaaaaaaacacaaaagaaaacaagtgagtcccagattctgattaaagaaatgtccatgactttatctgtttttggtaaaattaagaatagagagcagaaggaaaaagagttgattagctaaaaaagaaacgttaattgaatataatcaaggactaatttctaagaaaccggtgattatttgttttttaatttggacagaacacaaagagtgggtgggataataataataataataatacatctaaaagaatagtgttcttcgattggcgtgtcgacatcatcgtacactgacgtgcattgttaaccaaatatatgaagacacgtatgttttccactttccccaaaatcacagtcagcttctgtgcaatgtgacctcgtcttcatcagacaacacacagattcctttttcctcttttacatggttctttgttatgtttagtaatattcctcttttctgttgagtgttgaaagaaatatgataaagagtatgtgtctaaacataacaaaaagggaattcaccattgtgtcctaaatatctaaatcgtgataagggaatatgaattcttctttctccattttgttttggtcgtgggacttgatcaacattgattttcttttatactagatcgtaagtcatgttctttttgttttttgctaagccaaaaccaacgctttatcttttgcagtcatgtaaagtcaaacatgatccataaaagaaacacccttgtagttgggtcatatataattttattgggcttgaatatacaaggttgggctttaacaaacaattaataattgggtcttgagaatgatttttctttttgtcaaaatatatatatttgtcattttgaatttaactaaaataaattattataaatgaatttaacaaatttaatttccctgaatctgatcttaaatcctcctcagaaacccagaaacgcgaag

SEQ ID NO: 15143 - DNA, 3000 bp, Unknown
  misc_feature (1)..( 3000): cDNA_ID_1580305_gDNA_ID_2926059_Annot_ID_196166 3000 nt of promoter + ATG
cccgtgaacttggtcacaaatccgacggagaaacgatacggtggttattggaacgagctgaaccggcgataattgaagcaaccggaaccggaactgtaccggctattgctgtatcggttaacggaactttaaaaatcccgacgagctctccagtgttgaatgacggcggccgtgacggtgacggtgacctaataaagaaacggaggaagagaaactgtacgagcgatttcgtagacgttaatgacagctgtcatagctccgttacttctgggttagctccgataacggcgtcaaactacggcgttaatatcctgaacgttaatacacaggggtttgtgccgttttggcctatgggtatgggtactgcgtttgttactggtgggccggatcaaatgggccaaatgtgggctattcctaccgttgctacagctccgtttctgaatgttggtgctagaccggtgtctagttatgtctcaaacgcttcagacgctgaggcggagatggaaacgagcggtggcggaacgacgcaaccgctgagggatttttcgttggagatttatgataagagagagcttcagtttttgggtggctcagggaactcatctccgtcttcatgtcatgagacttaaggaattttaactcttagttctagtttctttttagtttttagtaagtttgattcctgatttaggttaagtaagatttgtaaaagaattgggagcacaatttcaattttatgtttctgtcaaacattttggtaattaatggaactatcctatcatttttaaaaaataaatcaaaatgagattaaaaatgagtctgctaaaacgccagaggttgagtctgctaaagctctcgacacaatagtagaaggaataatgtataggcacgttaaacctagattctcgtggaagctacaaagctggatcggagttgggatggagaagaagatgatagaagctggtgccatttttgatcgagtgtgtgggaaatacatatcagccaggagagaagaggtaaaaagatcacaagtgaataataatgatcatttcattagagatagtcatgcaaatcttttgacatctcacataaagcttgatacaacccagtaccagctcttggatcctatcaatgataaattcttaagagacaatgtctttgctttacttctagctgggagagataccactgcctctgctctcacttggttcttttggtttttgtccgaaaaccctctagtggtgaccaagattcgccaagagattgacatgaatctaccaagaagttgtagtggccaagagagaccatcttgtgatccaatggagtacttaaacaaagatgtacttaaacaagattttggtctttatttatggggtggtgggtaggatgagagctgtatggggagaagatgcattagaattcaagccagagagatggatttccgagaccggagagttagcattcaatgccggtcgagaatatgccatggtaaacaaagagctatggttcaaatgaagattgtggcggtggagatattacaaaactatgacatcaaggttgccaacgggcagaagtttgagccagatactagtttaattcttaaaatgaagcatggctttaaggttaagattaacaagagatgttcatcttgatattagtgaaataatcaagttcttttttaagttctatttcgaaaccatagcctaattaagagtattaataaggagacaagtttaagtgtgatctaccttgaggtttagtttttattgtagacaaattatagtaatggttttttaatgatttcaatgacagtttagaagaatgtaactctcgatccaagaatgataattcatgagttagtaaactgatgaaatcaaaaaagaaatgttgtttcaattattatactgtaccatttttatttctacgaattacgaaaccatttcttctctaccgaaactaaagtaaactaaaccgtaacaaaaaattttgtttctttgttttcaaccgtatccaaattatgtatccagttttttttgttttttttttttttttttttctcattgttgacaaaataagtaattttctaatttaaaattttcttcaaaaaaatttattataatatccgtaactacaatgcaaatagtgccgtacacgtgagaagcaaaacaaaaaagatgcagaaaaaaaaatagtaccacaaaatccttcaccaaccgtactgcgaagccaaggcaattgaaaccaaacactgataggcataactcaacagtagttacccttttttgaccatcttctcgtttaattctcttctttattcattttcaatcttactctatccacacacacacgaacacatcaaaatgccaccattttacatctgatttttagtcttcattactcatatttaagcttaagttaataaccacaacaaccaccttttcatgtggtttatttggcaccatccgtattctaaaccgttcgtgttctttccttatttggcaccatcaagattctatttacaatattttttttcaagtggcaaaacaaaaacaaattacaatttttataaattaattgagttaaagaaaattacttccaggttccattaatgtatctaaaaatatttaagtaaaattttaattacaataacatccatttattttatataaaaattttaaaaaacgttttaatagattcttttaatagttaccaaaaacagattctgtccagctcttctgcaccaaagtacatgcttagactcaaagtacgattttagggagaaaagaatttgaatactggaatagatacatgtttgttccaaataatttgagtaactttaaagcatatgttatacacatacacattttctagaatattagcctctcatttctctccttatataagccaaatagtccccgcttcttctcattcatcaaatcctcaaacaacttcaagaacaaagagtgcttttcgaggcccaaaacacattaccataaaatg

SEQ ID NO: 15144 - DNA, 3000 bp, Unknown
  misc_feature (1)..( 3000): cDNA_ID_3094565_gDNA_ID_2926060_Annot_ID_196174 3000 nt of promoter + ATG
cacattatcaacctttgcatagttgaagaagcatgcaatgtgaaggaatagagatttatcattcgtcaacaatctgtcatatccgattcgtaatatgtcatcgatatccctatcaagactagattcgatcctagataatagacgttcccactcttgattgccctccccacgcaaagatgcacccacgacacaaaggcctaatggaaggttgctgcaaagcttagctactttattggcaagctcttcaaaaccatctggtatagagctttgtttgaatgcagagagacataagatctcaagagcgtctttcttcgatggaaaatccacacggtagatattgtgaatcccatgtgccttcaaaatcttcttatcttctgtggtaccgatgattcggcttccagaaccaaaccaagagatttctttagccaatacctctaattgctttagatcatctacatcgtcaagaatgatgagcactctttgatcgtgtagcctttctcgtattgcgcctaaatgatgtatcttcatattctcttccttaaaaatcttagacagaagttgcttttgcaacctcaacttggaatcatggtcagcaacacccttaatacttcccttgaggttccccataaaacatttatgttgaaaactgctagagagtctgtcgtcgaataaagctctagcaatggtagtcttaccaattcccgctggaccccaaattccaatcatcttgacttcatcactttccaggcataacaaagagttcaatcttttcaagtgagcttccatccctaccatcccctcaaaatccctcgacggtgtgagattcagtttgtctgaaacatctgtagcaatcttttggatcatctttgcttcattatccctaacaaaagcaaaaccaaatagatttggttggtctaaatttacaaaaacaaatagcttgagaaaaataaaaagcattaaaattcatcgagacataccaattaagagagtgttccccagcaatggtagcgacatgtgccaaagcatttctccatcggatcttcacctcctcatttttcccttgacaagtcttctcaaaagctttcccgaacactccactctgtttcttaacatctgacggatcaacttaaaaaaaaaccgtcatcacaatctgccccaaagcttctttgcacttcaagatttccacaagttcatctaaacaccagctggaagaagcgtaattcttcgagagcacaacgatcgagactctagcttctttaatcccttgtatgagctcaggtccgatcgtctggcctctctcgatattctgatcattgaaagtcgtgatacctttgcttgcaaagagactgtgtaaatgactgagaaaccctttacggacatctggaccgtggaagcgcgaaaagacatggtgtctccttatgtgagacgaagaagatgaagaagaagaagaagccatgagagatcacaaatgcttgcacgtgaagaaagtatttttagaatgatattgaagaaagcatgattggaaaagcaagctccgatccttcggtttatttattgaagcaaaaacgcgtaaaaggagaagagaaatttcgaagaaaagtttggacgactctgtgtttcgttatagtcgtcgaggaccaaaggctagtttcgtacagattgtcattttccagtgaaatgaggtcagagttgaaagtagcatactcaagttggaagaagacgacgaattatgtggggattctgttctcaaccacatttttgtactttactttcttttaaatccaataacaattatatcgaaatgaccatgtgaacatcaagaaccaaactttctttgcaaagtttgcaaacgttgaaatttgatatttgacttattcaacaagaaactaaactctgcttttggtaatgatgatgttggatgtttaatttaggtttatccctgccaatttctttttgttgttgtttgttaaagccatcttttgaattatggagtttaattagcgtgttgcttatttttcaagaccttaacagcttctgtttcatagtctttactgctactacactaaaagagaagttatcacagaaataacgaatttgacaactgaaattgagctcgtaactttataaacgggccgagcctgagaactcgttttccgtttactggttggttaggttattcaacttttttggacctttttgacaaaaagaaagttcgcaacaaattcgttcaaagcagtaatttatcttgacgcgtcactaaaattttgatcatcccaccttattacacatttaataattagtgctgaggaaatctccagatacgtggatattttgacaacgtgaaggccataacataaatactatatggttaaataaacaaatactattaaaaaatgtaatatacaacgaaagtcgcgggaacagtacacatcatatatgggactccaagtaactcggacatgttttcaacgatcaaaatacaccaaaaccaaaatcaacattttacaaaaagaaacaaacaaatattagagattttcttagcaaccaagaagaagacaaaaacaggggaaaatagacaactctgttttgttttgttttcttcttctgaattcctctgctgctttcaatttctcttttgaatctcttgtattgatcggtgagagacattctacataaccaatttttcaacggttgattttctttttattaagtttttcaatttgagatagtgtttaggagatttgctctgttttgcttcgggtatgatatgcttttgtatgctcgattcatcgatccttaaatcataaaggatcttcatttcaggtttgacctcaaaaccctaatgttgcttcttcttgatctatatacatcttaatgttctttggtctcattttgattgtttttgttttccagcattcataaatctcaagtcttgtggaacaattatttgcgttggttttattgaaagaaagagatttaaggattttttaaacactgatg

SEQ ID NO: 15145 - DNA, 3000 bp, Unknown
  misc_feature (1)..( 3000): cDNA_ID_3094555_gDNA_ID_2926060_Annot_ID_196176 3000 nt of promoter + ATG
tccctcttctatttctaatctacacaaactggagattctagatgttaaattctgctctatgctacaagttattcccaccaacatcaacttagcatctcttgagagactcgacgtgagtggttgctcacgattgagaacttttccagatatctccagtaacatcaagacactcattttcggaaatataaagatagaagatgtccctccatcagttggatgttggtctcgtcttgatcaacttcacattagcagccgaagcctcaagagattgatgcatgtaccaccatgtataactttgctatctctgagaggtagtggtatagagaggattacagattgcgtcataggtctcactcgtctacattggctgaatgtcgatagctgcagaaaactcaagtcaattctgggtctcccctcctccctcaaggtcctagatgcaaatgattgtgtatcactcaagagagtacgcttctctttccataacccaatgcacacactcgatttcaacaactgtttgaaactggatgaagaagcaaaaagaggaatcatacaacgatcagtgtccaggtacatatgcttaccatgtaaaaagatccctgaagagttcactcacaaagcaacaggcaaatccataaccatccctctggcacctggtactctctctgcttcctcaaggtttaaggcttccattctcattttgccagttgagagctacgaaactgaaggtataagttgtagtataagaaccaaaggaggtgttgaagttcattgctgcgagcttccatatcactttttgcgtgttcggtcagaacacctgtttatatttcatggtgacttgtttccccaaggaaacaaataccatgaagtggatgtgactatgagcgagattacatttgagttcagccacactaaaatcggtgacaagattattgagtgtggtgtacagatcatgacagagggagctgagggtgacagtagcagggaattggaagttttgaaactgagagtagcagcagcccagttgggagatttgttgggaaatttgaatttggaggcaacaacaatcaccacacagatggaaatggagatggaaactatgaagcagaaggttccaagttctctcaagatgaaaacatcaaaaccagcaaacgttggttttatgagttggcttcggaagcttggtcagtgaagaagatgaattctcatggagtctcatgaagaccaaaccagtttttggcactttcttagctccttaatcatcttcataaggtactctctcttaaataacagatggagatggagaatatgagcctgaagctgttaagctctgtaaatgtagatgaaaacatccttggttgttggatttagtttgggaagtttaagggtagacgaagaagtacaaaacatgcaacttaggtcgtaggtcttcccattaaccagcataagtatttggcatacactagagaccagtttccttaatttctgttgttgatgtgttgtgtggattgctgtagaagatatattgctctgttctttagtcgtcgcgaattctttgggaacaatcttaagagatggatttatctgagtttgcagagtgatgttagaattgattctggttagaatgtagattgccttagccatagaacgtaaacgttagaagcttatgtgaatcaagctatcaacgcttaacattatattctttctgtttcaggtaggagattgggaatttcgacgcagcacctgattctccagtgatcaaatctaagtccacacaaagagaccatattgtccaatcagttccagatacttggtgcattgccttctgttgtgagcataaaacggcaaaccctatgaaagaaggttgatagcattagagaaaacagagcattgcagctcacacagtccacccatgaactgatgatttttccggattgattgcatcttagaatcataatcctgtttccattggccttaattagctgtttaagtactaagaaaagtcttgttaccttgtgatctagttaattagctgtttaaatactaagaaaaatcttgttaccttgtgaattacttaagaatcataatcttacattagtgagttactttatacagtctacaattggccttgaacttacattcagggagtgatatggcggctgagactggtctataaaagctgctcctggttcaagcctcctaaaatggtcatttgaatgaatcttgtattattgattcgtgtttttactttctactttttagtaattactttttgccagattgattgatcttataatcataacaattgtaactctgtaataactttcttcaacatctcttttactatgaaaccaagaatagtagcagcaaccaaccaaaccaataataaacatcaaatctttaagaaataatattcggattacccaaataatcaaaccttaaggatggggtctcaacgacttttgggggaaacattttgtttttgtatttttctctacagtgacaaattcctttgaaatttcagttccgtatatagcttatccaaaacatcaaattaagcatcgtgatccataattagaagcttgtcattcccaaaagcagaatttagtttcttgtcgaataggtaaatatcaaatttcaacgtttgcaaagaaagtttggttcttcattcttgatgttcaaatggtcaattcgatattattgttaattaacttaatacaaatattctccttttcaaaccaaatattcaataataatatgtacgaaaatagtcattggtcctcgacgactataacaaaacacagagtcgtcgaaatttctcttctccttttcgtattttttcagttccagttacattccaatttcttcgaaacttctcttctcattttacgcgtttttgcttcaataaataatccaaaggatcggagcttgcttttcaaatcatactttcttcaataccagtctaagaatactttcttcaagttcaagcatttgtgatctctc

SEQ ID NO: 15146 - DNA, 3000 bp, Unknown
  misc_feature (1)..( 3000): cDNA_ID_3094560_gDNA_ID_2926060_Annot_ID_196175 3000 nt of promoter + ATG
gtttgatcagactaacgaggtattttggtgaagggaaagggaaaagaggtctctctcccattctaatattgatagtcattggttcaccttgaagatgactatcttcaaatggaactttacctgttataagctcaaaacacaccattgcaaagctatacacatcagctttatgcgtcaacttagatttcggagttttaccattcaggtcttgttccatctctgctagaacttcaggtgcataccatattacaggatcaggagtgcctggtttcgaggaagactgcgctttaacgactgaagataaaccgaatccacaaatcttcgcatggaagtaaccttcggtgtgactcctctctttcagatgaatgttcattgggtttaaatctccatggaagatatcatttccatgaagatactccatcccccttgcaatttgcaacatgatatcaatcaccacagggatcgagaacaaatatcttcttcttggtccacaattctccttcatgtagctctgcaaatctttgtgcatcaactccataaccaaaaaacattctttcctttcttcatcatagaatccacaaaggtactgaagtatattcgaatgacaaagcgctaaaagagacgagatttcagaacttagcggctcaagatcgctgaaaaagtgccttagtgcaaaactatcacctaaccattgaatctccttgtattgtccatctgcatctaaccgtttcttcacctggtaatcctttgaaccaagaagtatcgaactaggaaacagtttaccgttaaactgctccaaaccggttaacttcttcaacagcaaatcagctaaacgcttctcggttttaccaatatcatcgctatccgatttcctcttctcttgcaatgcctccactagattccatctatcttctctccaagaatgctcaaaccggctgcaaatatctctcgagagcaaatactgtttcccaaacctccattgaaacatcttaggatcattccactctctatcatactttcttgaaaacacaactctccttctctccatctcagaagggtcaagacccgaaatctcaccagcagcctcgatggcttcaacaaccgcagagaaataacagaacaagttgtgtatatgaaactcaacacaatctttgttctgatgaagattgattactttaccccaccaatcactattatccatacaatgcttaacatataactctccttctttaaaaactctataaagctcccttaaaggttgttcaagagctctccatttagtatgcttctcttcaagctttagattctgtctgatctcttctgcgaccgtgttgaaagctaagctgaagagttctaacaacaaacaacattgtctttggttgatcaagatatcatcttgtaataccattagtgcatttagacttccaagaacttctccgatttgtctgaattgctccatcagtgtttaaaaaatccttaaatctctttctttcaataaaaccaacgcaaataattgttccacaagacttgagatttatgaatgctggaaaacaaaaacaatcaaaatgagaccaaagaacattaagatgtatatagatcaagaagaagcaacattagggttttgaggtcaaacctgaaatgaagatcctttatgatttaaggatcgatgaatcgagcatacaaaagcatatcatacccgaagcaaaacagagcaaatctcctaaacactatctcaaattgaaaaacttaataaaaagaaaatcaaccgttgaaaaattggttatgtagaatgtctctcaccgatcaatacaagagattcaaaagagaaattgaaagcagcagaggaattcagaagaagaaaacaaaacaaaacagagttgtctattttcccctgtttttgtcttcttcttggttgctaagaaaatctctaatatttgtttgtttctttttgtaaaatgttgattttggttttggtgtattttgatcgttgaaaacatgtccgagttacttggagtcccatatatgatgtgtactgttcccgcgactttcgttgtatattacattttttaatagtatttgtttatttaaccatatagtatttatgttatggccttcacgttgtcaaaatatccacgtatctggagatttcctcagcactaattattaaatgtgtaataaggtgggatgatcaaaattttagtgacgcgtcaagataaattactgctttgaacgaatttgttgcgaactttctttttgtcaaaaaggtccaaaaaagttgaataacctaaccaaccagtaaacggaaaacgagttctcaggctcggcccgtttataaagttacgagctcaatttcagttgtcaaattcgttatttctgtgataacttctcttttagtgtagtagcagtaaagactatgaaacagaagctgttaaggtcttgaaaaataagcaacacgctaattaaactccataattcaaaagatggctttaacaaacaacaacaaaaagaaattggcagggataaacctaaattaaacatccaacatcatcattaccaaaagcagagtttagtttcttgttgaataagtcaaatatcaaatttcaacgtttgcaaactttgcaaagaaagtttggttcttgatgttcacatggtcatttcgatataattgttattggatttaaaagaaagtaaagtacaaaaatgtggttgagaacagaatccccacataattcgtcgtcttcttccaacttgagtatgctactttcaactctgacctcatttcactggaaaatgacaatctgtacgaaactagcctttggtcctcgacgactataacgaaacacagagtcgtccaaacttttcttcgaaatttctcttctccttttacgcgtttttgcttcaataaataaaccgaaggatcggagcttgcttttccaatcatgctttcttcaatatcattctaaaaatactttcttcacgtgcaagcatttgtgatctctc

SEQ ID NO: 15147 - DNA, 2518 bp, Unknown
  misc_feature (1)..( 2518): cDNA_ID_3094580_gDNA_ID_2926061_Annot_ID_196179 3000 nt of promoter + ATG
catttgaaatggatcccataaaatattagatgtagtaggatcaattcgtcacccatgtgatatgcacatacctatatagttaatggagatatattttagaacatgtatatactataaaactgagtggacattgtatttaaatgtagaagattgtaacttataaataggtatatgtatttatgaaaagcacagaggcgaacgattagatagttgtcaagacgtgaatgattcggtagttgttatagttgttagaatcaaagaaaggatatgtatgcattgtttgttcccaatgtggttaatcttcattgagagttgatcgaaaaaaaattatataataaattgtatatgtaattattctatcagtagttgaaatattttaataaaattaatatactatttgtgaaaaatataattatatactatctgaatttatcgttcaatgtttaatttgcattaccttaagcatcaatcatccattaaacgataataaccctgagaattgtcagttataataatgaaccatattgtttctagcatatcgcaaccatagagctatacagtcttcgtcacttttggggtccatgtccttagtcggataagatattttgactatattattatacgagcaaaatttaaattcatgagtcaaaaaatactttgttggcaaaatggttttgattggacaaacaaaagttacgcgaataaaagaagagtccatattggttggacaagaacggatcatattcaaatatgtaattaaatagtttatctaatcgttgatatatgatgggatttgacataaacaaagacgtaaaataaagggtcgaaattgtgatgtgggagacattttgccttagccttaaagaaagatttggtgattggaggatttctagggcttttctggcatgcaaatgggtttggccttgccatgcaccactgttctgactcctgtgcattgtcattccacgtattactataataccaaaataatattaaagacattcaaataaatataaatgaaaatattacttatcattataacaatattgtataatattttatcagaaatatagtgtaattgatgaattgtatttagtcaagtggttaactgttcacctttatagcttcctaatagtttgactctattaaatcacattattttgcaagtaaaaagaatttggttatggatcagattttgttaatctaatgatgctaaaaaaaaataggtagaatagtgctattacttttttctgaaaatgggcaatatattgattatgttcacatagactgaaaataacaatattaaatactattaaatatgccatattaagaaaaatattgaataatactttaaaaaattaatttgttaccaaaaaagaaaagaagaaaatttagctttttccccttggatttgtttttcattctcttcttagttttacattgatttatttctcacatttctgaaactctttgcttatatcttgaaattcccaaaaatatttataagaaagaaagtaaaaaaagaaaacttcattaacaaaatgaatgggagagttagaactaattttgagaggtttctcgaatgttcatctccacgtgtcccgattcaattttatactcaggtaacttatgtttaattgtttattttatcttatttttacataaaaattgttttaacgaacattctcgaatctaattttaaaaaatttctcgaacgttcatctccacgtgtctctgatcattattatattaatttaaagatatatttatttgtttttcccatcattttgtacaaaatgttgtttgaacaaacattctcaaatccaacaaaaataatctaattctttcacttacagaaatttgaagcaactaaaatttacaaaaataaaccatttttaagaagcaaagaacaattacattataaaaaaggtagaataaatcaaacccaccaacatatttcttcaactgcttttcttgggttaaattactctctggttaaaaccacgtttactgtattagatctcgtttcaattctctagatggattttcattttaagatcgatcttccttgtgctctggtaattttgattttccattctttgataataaacgaaaacgcattcgattggtcaaaagtctgaaagataatgccacagtggtaaaaagactaataaagtacgtttaattagtcgttgacattattaccaagatttgtatgctttctgcttttttattattacaagatcttagccaacattgactagtttgtatttaaaaccccatatctaatacttttcagcaacaatttttttttaaaatctgtcttttatattttaaatcataaaaagtaagtaaataaaagttagaaacatggggtaatttagattaaattatctttagcaagaaaaatttagattgagtaacaatatagagggtcagtttcaaatcattcagtaaggtggaatttgcaatgatgggttgattaagattaaattatcagttcaaagttaaacaaatg

SEQ ID NO: 15148 - DNA, 3000 bp, Unknown
  misc_feature (1)..( 3000): cDNA_ID_3094574_gDNA_ID_2926061_Annot_ID_196180 3000 nt of promoter + ATG
tacttcttttttgctgtttgttttatcgttacgaaaaattgaacttttctttctttgtggttcatttgaagaaagaaatatctagaaaatgtaaccaatgtttgcacaaaaaaaaaaaaaaaaaagaaaatgtaaccaatgacgattcataatagttgaaagattaacggaaaaactttgaggaatcacaaaattagttgacaataactaggatgatctttaactcatcataattaaatcttagaggaatattgtcttcgaagattttggtaccaatataaaattagagttttcaattcaaaactaattgacaataaataaaatatcttaattcataacagattggcaatcgaaaaccgtatcaaacaatggaactcgggacagcgagtggactttattctatgtgacaaacactgaagaatcaagagattattatgtatatagtttcaatgtaaatatgctgctgtaatttggaaggattcagcccaacgactacttaacgtcaactattccacatactggggccaattgattgcactgcttaacaacacaaccatcctgaagctcaaccttttcttgttcagatacgtcttccaagcgactctataccaaatatggcgcgagagaaacacaagaagacatggtgaaatttcaccaaagactcggctcattaaacttagcgaaaagaatgatcgaaaccacatcaacggtattaaaaacttgggagatcatcgctatgagcctatgatgatggcctaagtttgtggttttctacccgatcaactccatgaacaagactgcaacactctctttaaattctattctctacctttaatacctgatttctataactttcaaacaaactgatatattcattgtacacgagtcttttctggttgaatatatttttacattcattcaaataagaaaaatgtctcatcgtacagatgcgatcatctggtttctgaaaagaagagagagactagaatatggaaaaattcaaattcaagcccaataaaccctgaacaaaatttaaagcctggcccttgtctgaccatctgggccttcttttgatttcaattttgggaaattcagattgcgtcgacgcatttcttttgagggatggatctgctttctcgtcggcggctaatcaaattcttccagagggttttgaaagaaatttctcgagatgggtcaagctcaaagtgacgagaactcaattccgacgacgacgacaacgaacactcctcctccttctgcgaattcacctcgggattctgaagatacttcgtcgccatcgatggattctcttcttgcaggttcgttttttttttttttttgttggtgttttctgtatcccgattgagagagttacactattcgttgcatagaaaagttttgggaaattgggattgttttgttctattaatgatcattgataaaaaatgatgaaatggtgaaatggaatttgcgtttctctatatagtatctattcaaaatcttgttcttgcttaaaaagaagattcttaaatctttgtctatgtagtttctataggaagataatcttctaatctagttttgtaaagaaagctaagaaacacttatgtattatgggatatttgacattgttgtactctcttcaatatcacagaagctgcagcatatggtgaagatgataatgagaatgaggttattccttcaactttgttgttatttagtcatctgctagcttttctttttgaattaccgagttatctgacaaatactaaatccatcagtctcttgaagccaaagcacagagagctctcgattgtccttgtatagcagatttgcgtaatggctcttgcgggtctcagttctccgaggcattcctttgctttctcaaaagcactgctgaagaaaaggtaaaccgtaactaaacatattaggttgtttagaatgatgtaaactccactgaaatgctctaagattgacacattgatgacagttgtttctctttcgtttacgttttgtgtccctttagaagaaaaccttcacaaagatattggatgtgttgttgttgttgtaatgttgttacagggatcaaactgaacatattagattgtttaggatagtgtaacctcaactcaaaaaatcataaacattggcgatagttgttgttttcgttaaatggtttttgtgccatttagcgaagagaagtttcattcaaggatattggatgtgttgttgttgttgcagggatcagactgcgtgaatccatttgtagcattgcaaagctgtatcaatgccaatccggatgcattctctaaatcagttacaggggacgaaaaagaaaccgagaaaaaggaagagcagcctcctgtgcaagaccatagaatcatccctcctctctgggccaaagacccgcctcgcagtggcaattccaagctttagaatatcaacaacaatggagtcagcatcagaagctagtctctcctcttttgattcttttctctagacagcacttttaagaatgtaaaagaagagtagaagaccatgatcagtggtcgtgtagatcaacattgttctttcttttttaatactaaaaagctgagatttttggttatttgcttgcaccatttaaactaactttatgctgtgataatttggtaaaccaaacggttaatgttacagagttgggttttggttcggtttcataaaacaattgagcggtttaattcggttttgattcgagacattaattaataatggctattcgttaattaaaatcgaaacaattaattttctcactcaataatgaagaaaactgcgaaagcgtgcagataagagagatctctctgaacagatattatagttgatagtttgcgtactaggagtctgtgaaagcttgcacaggaagaaagcaaatcgggaaagaaaggaatctgaatcggagaagcaatcgaggtttacgattaccaaattctgatctaatctgattaattgtggtgatttccgatg

SEQ ID NO: 15149 - DNA, 3000 bp, Unknown
  misc_feature (1)..( 3000): cDNA_ID_3094600_gDNA_ID_2926062_Annot_ID_196184 3000 nt of promoter + ATG
acaaattgatgcaatatgtaacattatatatgagcattctttcagtccggtttatcccctctataaagtcctctattgatgctgtatctaattcgtagttttgaaatggtttggtgtttctaatgaattttttttttgttcatgatatctccagcatgtcaaagatcattgatcgttacgaaatacatcatgctgatgaacttgaagccttagtaagttagctacgaatatcattaaaattcttctggatgcagtttttgatgttatgaagggatagaagcactggtcgaacctgagataactcaatgttttgaatttttcgtactggacttaattctctctagttacagttattgcatttttcggaaaactcacaatctttctgaccattcccttcgttttctccatgtgcaggatcttgcagaaaaaactcggaattatctgccactcaaagagttactagaaatagtccaaaggttagcacaaagacacttttatctccctcttcttctgatgaaaaatacttttttttttcttttcttttggcgaattatgaatacagcaagcttgaagaatcaaatgtcgataatgcaagtgtggatactttaatttctctggaggaacagctcgagactgctctgtccgtaactagagctaggaaggtattttgtactgctactaagtgatcaaaccaattatcccaaatttgttttgttaattagttagatctgactacaagtatagtcttttgatattttcgtaatgtcttgttgtagacagaactaatgatgggggaagtgaagtcccttcaaaaaacggttagtacttttgttttttatttgctatcaaagctatattgtagggtaatgctgattttttaatactattaacctcggattctgcagatcctgtaaccaagtttaactctagatatatctctaggtcctgatttattcttggctttatttagatgaaaccctaattagaacccaaaaaaaaagcacttataaacttgtgatcaaattcgacttttctccctcgatgaatcaccgaattggatgaggatcatgctcagatagctttagaacttgttagaaattaatgaccttatgatcttgtccaaacaggagaacttgctgagagaagagaaccagactttggctagccaggtgacaaaaacatctcttgaagctaattcatcagttgatacacaataaaaatagaaattacacttgcgttaaacatatatatataaaagttgaaggactttgattgatgttaggcattttttttgtgaaacccccatatatcttaaaatctatgataaaagtcctttcaaaattcaaatttcttgttactatttagttgaatgatcagttttaattaatgaaattttccaaaaaaaaacagcctttttacaatatagattgatttcttgttaatgtttgttagctgtaggaaaataatataagaaagtttcttacaggtggggaagaagacgtttctggttatagaaggtgacagaggaatgtcatgggaaaatggctccggcaacaaagtacgggagactcttccgctgctcaagtaatcaccatcatcaacggctgagctttcaccttaaacttacagcctgattcagaagtttttacaaatttgtaaattataaaaagcttcataataatctcaacctttttatcttcctcgcgccaatgtggaaattaaggttaaaaataaaataaaacagaagctcatgcgaaagaattgtaaaactaagataaagctatagtagatctttattgtaccttcgtagacgatataagatttattcgtgtgtttgtctttttgtctgcaagtacggattggatttaaagttttactttcttcagcgtgaagaaccctagacatagagcttcttaattcttttggttttacttatttagttgttagttatttgattacttgcacgtgacgtggcatagtgattttttccttttccaagtttatcagttctacttttgaggaactcaaaagactattcttccagaaagaaagaatatggcagaaaaatacttgtcttggctgtgcttccagcttcggcccattgaggcccatcagaagttgttttcattttttgtttcatttgcagctgttactgtcttactgataagtaaattagtaatataatatatttctgtttaacttggttcgaatttttgggttttggaaaacatattaatatcggattggtttggctttggattcatcttcgagttttgaatgtttgaattttaattttgcgggttatttgtttccaatcaaaacaagtttatcggtcagttttagggtcagaaccaaaattaaaataagcctaggatcctgagaatgacaagtcacgagcggaatatcgtcatatgatataagactaacaaaaacatattgaagctctctgatctttcctctagattcgtaagagatagacagattgaaagtttgaaacatacaaacacagaacgattgacgacagccaagaacaagtattagacttaccagtgatactaattgtatccaaaatggataaccttaacttattagttcttaatacatcaaaacatgtgaaacaaacaatataaaactgccgggaagaaggagtaaaactcgcttaaaaccaatttctgttcggtagggatgatcatcggaccggtctaaaccgactggattaaaagtttcattttaacaacactccccctaaggaatttcaacaagcgtaaaactaaaataaataactattacatgcctcttcctcgcttcaaaacggcaccgtttccacttgttattatttttctctctatcgtctaacaaaaaaaaaaactgacttgggattttttttcatttgtctagcccaaaagaagaagatagaaacgaagaaaaaaagcaaacacattttgggtccccggtggttaggatcaaattagggcacaaaccttatcggagaaagaagcc

SEQ ID NO: 15150 - DNA, 3000 bp, Unknown
  misc_feature (1)..( 3000): cDNA_ID_3094611_gDNA_ID_2926063_Annot_ID_196192 3000 nt of promoter + ATG
aaacaacaaaataagaaaaatactatacttgatataatttgcttagctaagaattcaaaatataaattaaactatcgattgggtcaaatttagtacccttttcataaaatctcttttaacatactatatagtaaggatatatactgctggcataaaattactaatgtctatttgtaacagtgggtattaggtaacaacttttataattaataggttgaaaaatatctgtttaatattaacatataatataatttataggttgaaaaatatctgtttaatataacatataaagtatatatatctatataatttgcttttagaaattgatatattgaaatggtttaacagcctggcaaaaaacttcagtaaaattgtccactttagtttgccaaccgttgaggaaaaacagagttataaacacttagtcaaactagaaaaagactcttgtctttttggtatccatcatccaatcatagtttgactcaattaaatctaaattatttgttttgtttcaataaaatataaatcaatctcttttcgtcaacacatatatagtagcatacttttatttatttactgcctccttcacgcatataagaaatgagttgttgttttcctaataattcttattatggatgcaattataatactgatcagaaaatatacaataattgcctgtctaagaggtgacgcatgagaaatattcagtgatactaataatttctggtgcaaaaatgtttaaaagcaattatgagtatatatcgttcttaattgcgtctggaaaccatggaacaccaatgagtcaatactgttttccctcttatgctaattattccatactattttctacatatgcattgaacattacaactcaagggcagacgtaggagaaagggattgatgcaatcgtaaattgacaaaagaattaaaaagccaaagatcacctgcagttcaaattctttattattttcattaaccactcaataaattacgtgtttttaattaattttacctagaaaaaaatattgttgacattatttgcctcgacaaagcttcacccaaaatccagtccctagtacttcacatgataacacgatttactcgagtcaaaatccgacgtataagactacaaatatagaccatcaaccatttgactaaagacaccttttcttatatagaaaatataaaattaaaataaagatattaatatgcatatttttaactacaacatcacatatatatttagaatattgtttttgattatattttacattaaaagagtagaatattgaggatactaatttgacattcttcacggcatataacatctagaagttgtaaggcacatacatacatagcttaattacaatgtgtattattatttaccatgtttaatttcagatttgtatttaaaaattaatttttttttaataattacttatcaacctaatatcctatatgtttgggctgtagtgaatttgcagcccaatttggagattttaaacccttaatttatcttacaagactagacaacatttcaacaataacaactaagttaccagttttacaagaaaaagagagaggttatttccctataattatgactaaaagaatgtaactacacgtataagttccttttgtaacacatgtaaatgtaatatagcaaatgtaaggagtacaccacgaatcaggaaacttttgtttggccatttgtaccatattacttgcacatttgtggaaatgagtgtgtgactatatctgcatgcgtaaatcaaacacatgtaccttaaatgatgtaaaacagtagatctatcaattgtacacatatatatggatacatcgatgggtcattatagctctgaagttgattagtcgggccaaaaatacacctgatcatcatgatattcatatatgtatagatatatagagcacatatcacgaaactcatctatgtacatatatttatatgtttgtgtgaaaaaataattcaaaagatttattcatgcatgcaagtgtccatcaaagtagtacgaatgaataattatgaagggttcttttggcactttactaaatgtaataatgaaaaacaacattggtaagtcaactcgtgatgatacatttttggttaatagaatttcacaaaaattgagttttgtttttttgtcactttataatcagacagttccatatagttcactggtccgtccaatgcaatcttctcttccaacatgttttcttccttttatccgtgtaatatcaacaccacttgggactgttttttttttctttttcctttttacttttgaaattcatgatgaaaactaactagcaagttgatgtgcatatgtatgaaaatacatttggacgaatgatcaaatcaagaaacctgctgataattttagttaatgacttttttttttgtcaactcattacaaagttctggattttaaatatttgcatttctcttgatattaatgattcaattttgattgtttggagtttggaccatgcgtatgctgacaaccaagttactctggaattactctggattttggtagggatattccagactaaccccaagttatgaaataaaagacattgaaatcctcataaagaagggataaataaagtttatcttttgaacagttaatttgttttaacgtaattttatcaaacgaagcgcgagctaaaataaaatgaataattggaaatctaattttttcaaacacgaacaataaatatgcatgcatgtcaatcatgttgacttctccatacccatagctttagagacaaaatgaaataaataattggttctccagataataatatataataataattgatagggtgtgtccaaatccaagtctcttattaaaagggcacatattcaactactcctccataaacacaaaaagtccatcctaaaaaaagcaagtaagagataacaatttctctctttttcttttctcttcttcaaacttcaattcactaacgagagaa

SEQ ID NO: 15151 - DNA, 3000 bp, Unknown
  misc_feature (1)..( 3000): cDNA_ID_3094607_gDNA_ID_2926063_Annot_ID_196193 3000 nt of promoter + ATG
atgtggtcgatatattaagcttttggtccaaaaaagaattgggacttataagcccataggccctttaatttgtgtagaaattgttcatcttacttcatgacaaacaatcaactctctaaaaacttgattatgtatggattttgataataattcccttcaaattgcaagtggaagaatacgtaaaaacataatattaagaaactttaattcagcatgaagaaaaaagttggtaaacatagcagtgaactctatgaatctttaaccatggaatttcaagagattccaccaaaaacacttcaagttattctatgaggaaataaaaatactggaggaccgtataacaacctacatgcaagttaagagttttcaacaattacccatatccaatcgtcacaagatccgtatccaatccttctatttttagtttctataaattttattataagctataattttaaatgaagtactagattttaacccgcggtacaccgcggggacaattaattttttaatatatataaaagtttgcaaattgtatctatatataaaatatttttattttaaagtttacaattgttattaagtaatgtcctgtcaaactcgtcccgtaaaaaacctatttattttattaatgttgattttatttatgatatgtttataaatcattgtataaatattttgtaattttgtagtaattaactgctatcaaatatttatgcagtttgatgcttataatcgaattgttataatcatgaaaaaagcaatatcaaaaatgataattttgtagtgtttaaatgatattaaatattttggaagttttattttagtaactaattgtgtagttaatgtggagagatttcgggaagatagttaaatatcaaatatttaattcgaagatttactttctaattatcaaaaataattattaaatattagtggcaaccactgtaaataagtcccaacttgaagatttatttcacaaaatggctgcaaaaatgtatatatagatactaattttggatgaatttcattaaattcacttgtatatttttttattataacgtaaaataatttagttacaattttatataattaggatccaatccctctattttagtatctataagttttaatgttttattaatgtaaaataatttagatataatttaattattagtatctaattttttattataatataaaatagttttttttgttttttttggcaaaaaatgtaaaatagtttatttattactttaaattagtatccaatcccacagcactgtatggctgaagttatccacaactcacctacctatacaagcatacacgtgatgatatcatgctaatcacttctgaaggaacaatgccgaaaattaaaccttattatgcattcattaacatccgaatccatttttctactttgacaaaatgaacaatatccacatgccagcatctagctagatgcagacctggtaaggcaccaatgggtttgaaaccttcctccatattgttccaatttgtatatattgcatttcaaaaaaccagaaatatttactgtaccattcacgatcgacccaaaggatttgaacccaatctcatagcctaatgaatcgtattcaaaattgatatgcaccatgagaaactggtatcataaacaaaaactgatatgcaaattaattaattaaatcacacatatgctatattttctctatgggctggactggtgttttgttttaattattatgataagaagaattgcaccaaaaaaaaaaaagaaaaaaaaaaagaagaaaatcgtatctttttgttctacctatacagacacataatgcatcattttagtttttgggacaaagacataatgcatcaacgtgtcagcaatatatgaaacgtgaagaatgttttgtctgagtctgagtaaaattactagaaattaaaattagtaagactgactaattacaaatatcccaagtctgtgtttattctaagacaactactagaaaacttaactatattagactaccaactaggcaacaaatatcacaaagaatatcgtatgtcacctacctggaggtgcataccacgtgattttatccccattttagatatggtcatatcgattagttattgtatataaaaaaaaaattcttacaggctataaactattatgctacaaattttggtaaaaacctattacttgttattccgtttccaaaacatattatggctatattaaagtgtgtataaatgagttaaaacatttttaacaacaaataaatgtaaaaaaaatgagtttaacatcgttgtaagtaaacttaggatttgtttgttacctcaaacttaaatattattccctctgtttctaactaagtgtagtttaaaggttttttatttttttcagtataagtattgttttcacttttcgatgcaaacattaaatgtatttaatagtttttaaccaattatattttacatcatattttttattggttggattagttgtaattggtgatattttttttaaaaaaagataaatcaaatgagatttatatattttcttaatttgcgtgcaaaaactttaaattaaaaatattaagaaacagagagagtatcttttctatacataggtatatcacttatatatatatatatgtatacagctaaatatttatgtaaaaatgtaaacatacgaaactgtttatagaaagtataatattctaaaataagatatcaaacacagtataatatttaattttaaagaagatactattttgcgtttaatgttttcatcgaatataatttcttattccgctaactcaaatgtttattatttttaacatcaaaatgtttctaatactaaaaagtttaataaataaaaaaatctctctataaatagataaattatatcgtataatgttcaaaacaattcccacactatctttcctccacattaaagtaaagtatctctctcttttttctcctacgtactccatagtg

SEQ ID NO: 15152 - DNA, 3000 bp, Unknown
  misc_feature (1)..( 3000): cDNA_ID_3094642_gDNA_ID_2926064_Annot_ID_196196 3000 nt of promoter + ATG
atttttttaaaatttttaatttttacaataatgataaatatcatctgccgtcgtgtgtagggtgtttctgatatacatattttattttaaaatcatataatgatttttttttattatgttttaagatataaccgtgtattaaaccaaccatcatatagataggtaaaagattaagaacgtcaaagcattttaaagtgaaatattcaaaaaaattatgtaaaacgaaatgtagtagttatgttatatggttactgtaaacaatttaacatattaaacggttgagggagatgtaaaaaaatcgtgcgaatgaaagaaaatactaatagttataataaaataaaaagaagagaaatagatggagagaatcatttgttcgagctggaaaatgatgatgatggatgtctcttgtattccacgcagcaagacaaagccattctcaggttgacttttgtcaagctcacgcaaaggcaacattattactgctttattttattttaatatataacaaattatttcctctattatttctttgcttttttttttatcttaactataaattatttttacttcatcttaggatatgcttctgatgatttattcaatttattttcataaagttctgatgatttgatatcaccgaaattcgttgattataaatcatatttttaagttgacattctagatgaagacctcatattctctggttaaatgtataagttgtaagtttgtaactatttttattttctcaataacttgtaaatggtaactaagattaataagtatgaactacgagaaacatatgctacgcattacgtgacatttcacattaaattttgagtaagttatacgataatcttttctttggtcttctactagataagttgatatgattaattagtgactcagaagttcacgaaacaatttttccaaggctgatacacgtttgtttcttacacgtcgtcaaagtaactattttcgtcacattgttaatcagatacgttgaactaactggagggtggaggcgacgtgcatttatatgaaattatgttagcattgtgtttttgctatttcaatttgcatgccaatttattcttttttttggttaatttactttcaattgcattgcatgccaattaaattcacttacgatatgttacttaaaggattaatacattggtttctacacgatattcaccaaataacatggacccaagtacgcatcttctattttttaaaattcttttgtttttttcaaatgatttttgtcttcttctttttattatgtttaacgaattcaaagaatcgaaatccacgattctgatttagcagccgctcgtttccttttgtttaatccttcagaaaccaatgtacttacttaataaataaaaatgcgtagtggagaagaataaacgtaaagctggttatagtataatgaacaaatttattaccttaaagagttaggtgcaacgtctaatttaataatgttgaccaaattgattagtaacacattttacaagacctattttaataaaataaaataaccggtgtaaacactttctttgaaacttttcgtcgccaatcacggtctttagcttcgtcaccctcctatcatcatatccttattttttttttcttgtgtgtgtgttttttttttctcaacaactaaagtgtacattcatatgcaaattttctttgtaatgaaggaaacgtaaaagttatttactctacgatgaactcgatgtattagtaattagtgggcttactttttgaaaactagcaaaactatgtctgattaatagtgtctttttcaacaacaaaaagagagttaatagggaaacccactttaccaaaaaaaaaaaaaagagaagagagattaaatctctatagtaacaatttacaaataaagtttattaatatacctaagaaagaaaaatgaaatgaataatttaacgccgaaaaatgattaatggaaatctttttatttatttatcaaatgaatgaaatcttttaaaatatgatttttatttagaaaaagactagtaaaacaagaaaaagacgaaaatatagaaaaagcaaacacagagcccacaaagcataaaaaatattccagaagaagaaacaacaaagaaagcttcaaacttctttctctatttccctccctctttttcctctcagctcacctatggaaaccctacaaagatctctctctcaagatttctgaaaatggatatataatctcactgatttgtttctttttttgttcttgtttcgttttctatatgtttatggatgagttgtagtttccatctcccagccggatatagaaagaagaaacagaggaaatttgttcataaaggaggtattgtgttaattagaatcgaaatatctttatttttgaatctctgtagtttcaaaagttcaaggttcgatctttgtttgtgggtttgccttggaagcttataagtttcttacttttttttctgggtttcagactttttagcttcttacagttataatatagctcacgtgatctgattctgttgtcggaatagtttctgaggttttaaagtgtatgacttttgtatgattcagaagttgatatgtttatggaacttgtaaatttttacagcccaaaccttttgtttgtctcatctcattggtatcagatttagatgttcttgattttctcaggataagattgaatttcttatatgctctgcttttttcactttgctctgtttggttctgttgcttttagctccttttgtgatcaaagcttatgtttttggattatgattagactaaaccccttgttggacttcttcatttgattaatttttccaatatctttagagtaagatctgagaattgactatagcattcaccattagcttctgtttcttcctctttccactgatcttttaggttcttgataacattgataatccatttcaaattctgcaggtacatatatacacatacaagtctctgtgaaatatg

SEQ ID NO: 15153 - DNA, 3000 bp, Unknown
  misc_feature (1)..( 3000): cDNA_ID_3609838_gDNA_ID_2926064_Annot_ID_196199 3000 nt of promoter + ATG
atcctggatgggaacatggtattgctcaggacgagaggaaaaagaaagtgaaatgtaattactgtaacaagattgtgagtggcggtattaaccgttttaaacagcacctggcgagaatacctggagaggtagcgccgtgtaaaactgctcccgaggaggtttatgttaagattaaagagaatatgaaatggcatcgagctgggaagaggcagaacagacctgatgatgaaatgggagctttaactttcagaacggtctctcaggatcctgaccaagaagaagacagagaagatcatgacttctatccaaccagccaagataggttgatgctgggaaatggaaggtttagtaaagacaaaagaaaaagctttgattcaacgaacatgagatctgtctctgaagcaaaaacaaagagagcgaggatgataccgtttcagtcaccttcttcgagcaagcaaaggaaactatacagtagctgttcaaacagagttgtatcacgaaaagacgtcacatcctccatttccaaattcttacaccatgtaggagttcccacagaagcagcaaattctctgtactttcaaaagatgattgaattgattggtatgtacggagagggtttcgttgtgccctcgagtcagctgttttctggtaggctcttacaggaagagatgtcaactatcaaaagctacttgagggagtacagatcttcttgggtggttacaggttgttccataatggcagatacttggaccaacacagagggcaagaaaatgatcagtttcttggtctcgtgccctcgtggtgtctacttccactcctcgattgatgccactgatatagtagaagatgctttaagccttttcaagtgtctagacaaactagttgacgacattggcgaggaaaatgtggtgcaggttattacacagaacactgctatctttagaagtgctggaaaattacttgaagagaagagaaagaatttgtattggactccttgtgcaatacattgcacagaactggttcttgaagacttctcaaagctagaatttgtctccgagtgcttagagaaagcccaaagaatcacaagattcatttacaatcaaacatggctgcttaatcttatgaagaacgaattcacacagggactagatcttcttagaccagcagtcatgcgccacgcttccgggttcaccactcttcaaagtcttatggaccacaaggccagtctcagaggtctgtttcaatctgacggctggattttgtcacagaccgccgccaagtctgaagagggaagagaagtggagaagatggtgttgagtgctgtgttttggaagaaggttcagtatgttttgaaatcggttgatccggtgatgcaggtgattcacatgatcaatgatggtggcgatagactatctatgccatatgcttacggttacatgtgctgtgcgaaaatggcgatcaagtctattcatagcgatgatgcaaggaaatacggaccgttttggcgggtgatagaataccgttggaacccattgtttcatcatcctctctatgtggctgcatatttcttcaacccggcatacaaatatcgtcctgattttatggcggtaggtatgattatcattcatttgaatcaatgactaaaagctttctgccattttccttacatttgctgtaaatgtgaatgaatctgcagcagtctgaggttgtgcgtggagttaacgaatgcattgttaggcttgagcctgataacacgcgtagaatcacagcattgatgcaggtgagacaaaaaacaaatcaccaagtcacacacattgttctcagaacctgaggttaaaccaactttttgttgaaatgttttcagattccggattatacttgtgcgaaagctgattttggaacggatatagccattggcacaagaacagagcttgatccatcggcgtggtggcaacagcatgggataagctgtttggaactccagcgagtggcggttcggatactgagccacacttgctcgtctgttgggtgtgagcctaagtggagcgtgtacgaccaagttaacagtcaatgccagagccaatttgggaaaaaatcaacgaaagatctaacatacgttcattacaacttacggctcagagaaaaacagctgaagcaacggctacattatgaggatgaaccaccaccaactcttaaccacgctttgctggatcggttgctccctgactggctcgtaacatccgagaaggaggaggtacttaacttacttaaagtgagaaacgctaaacgccattccagtgattttataaaaggctaataaatgtagtttattggtgaaggaggaggctttgcacggggaagacagagcagagaaggaagaccatgaagacgatgaggaagaggaggagaagttttacatggaatctggtaacgttgacggtgaaggtgaagacaaccttgatccttacgatgatgatcttagtgacgatgattagttagtgctacaattctaacgaagtaacactgtattttgaattctagcattgtatccttaaaatattcgaaaaatatgaaaattttgttggctagaagaatataatcaaagtattattaggtgaaattagtgaaagtgaaataatttatctaacaacggatatggatgggaccaaaaagttggcgcctcgctgtcatttttttaactaccgaatatctgtctttttaatttatttattaatcaattttgtttttaaaaaatatatatgtttgaataaaaaagaaaaaaacaacacacacctgacagctctctttcccttttcccgttctttgtcgtcctttgtttcgtctttcattcattctcctttgtgttttctctttttggagattttaacttcagtttttgtctaattagggttttaatttaaattggagggaaattttagatgcagtgacgtagtttttgggtaaattttcgtcggattctgaattgtctccggcgacatg

SEQ ID NO: 15154 - DNA, 3000 bp, Unknown
  misc_feature (1)..( 3000): cDNA_ID_3094627_gDNA_ID_2926064_Annot_ID_196200 3000 nt of promoter + ATG
tgttattgatgtcttttgctgtgtaatttgcagggatgcatgaaaagacatggtttcagtggaatgccggcatcacatggtgcttcattgtcccatcgaagcgggggttccacagggcaaagagatgctcctggaaaggtatgtgtcaaattgctaagattcttgggaatttttctccaaagcaaatgacactactgacttgataaatacacttgagtaggtgttcaagggcagaaagatggctgggagaatgggtgcagatcagaggacagtaaagaacgtttgggtctacaagatcgatcctgcgaggaacctcatgtgggtgagaggacaagtaagtatctcaatcccagttccagtctttggctaggatctgtctgtcacaaaacatgagctccatttctcttctcttattagtaggtcatgattgtgatttggtgttgttgcaggttcctggtgcagaaggaaactttgtgttcataaaagatgcatggtgcaagaaaccagacatctcaaagcttccgtttccaacttacttagctccagaagatgaagatccatcagaattagaaccgttggttgcagatcttggagaagttgacccatttatgttggcagagtgatgaaaacagcatgatcttgatctttatttgggcttttacaatgattagagaccagaaagaagctgtggaagtgaaggaatcacagagctaaagctttttgcagatgaatttgtctttttcttattttagttgtttggatgtatgatttgaaaacgattaaatagaggaatttaggcttgctcgcatttgttatatcacaatgcttaagagtttgcaataagcaatgaggaaaacacaagattattatgtttcctttcatcttccaaatatatacacttcgtattaacaaaaaataaaagattctgtttttaattcaacaagaatcaagacccaatttttaatcttctatataagttttttcagctcccaatagaattatacgttgaagtctcttcaagcccaagatcttcaacattctgagaacaacacaaacgcttctttcatctttctctctctctctctcgcttagggttaccgttgagggagagagttctcaatctcgttgacttagccatgaatccggaacagaaacagcgcgaatgcatagtctgccgtgaaaaagagccgtcgttcatccacaccgtcatcaaaaccggcgctttccggcgactctgcaccgattgtttgctcaaagagtaccgagaacacttttgctctgtttgtttcaatctcttcgacaacgccgttcctccacaagctcgtatcatctgcgtcaattgcccatcaagcacccacctttcttgctcaactcagccgccgtcttcctccgccgcatcttcctcctcctccgctccaccaccagcttcttccttcacatgccagccatgttctaaccccaatttcaccttcttccccaaatctcgagtcaatgaagacgtccccgatgaaacgcctctcactccgaaatcggcaatggctcttgtcgcagctggaaatatctcggtggctaatatgaataaagcggtggctctgttaaaggaagaagctcttaagaagatcatagcagctaaaacggccaagttgagagctaaaggtgcattgacgaatcttcaggatattgttattcgacagagtaaggtcaccggcaagaggaaggaagatgaacgctgattttctaaatcttgatagcaattttactggtacgtagagcttttgtgtgatatatcgcttctagggttcaaggaaagactacttttttgcggttattggccatttatcttggtgaattttagttcatattcagacgtgtttgatcaaatgtctcccagagaaagctggagactttgaattaggatacattagggcttttattttgtacaatggtgtgtgtaagactcagtgacattcattcatattaatcggttccatcttcaatctttaaaagtatctgtatgatttcaagagttcatcttgttgtgtggctttactggtttggagattttcatggaaggtttgatatttttagagttctccagctagtgaattaggttttgattggcacttatccaagaaagtgataatacgttgatgttttggtttggaagttgtgataaagcacacattgaagaatgttttggatgattcagagttctcgagccaagaaatgataatgcgttgatgtttttggcttgaaaaatgtgataaagtcactacttttgcttgattggaaaattatataatttgaattggtaaaattaatataggtaaaactgtttttgcaacacgaaaattgaaagaccaagttcaggaacttccaaagttatgttttgctatattggtgaaagagcaaaacaccacaaatgaatatctgactggactgcaagagagggttagttacgtagatttccattatataaaggctcaatatgtaatttcgcaaatatacaagccctcattttggaaattcgttaaaaacaacgagtcagccgaagacagaaaccctagaaatcgcccgagtcgagttaattcgcctctcacccagctctatctcgtcccgtgactcgttccttcctccgcaaaaacgcttcttcgattcttagctcaaatacgtatctcgccgtctaaatatgtgttccaacttcgcttaagcttcacctccattttcttggtctgaaaaatcaacaaaaccagaaaaaaatctcgcctccgattacgaaagttctcagcttcgtaggtatgctatagaagaaaaacccagttcaattatttgttcttgctttataaaattgatgaaaaaatgttgtttttaaatccatctatgttgaatccatgcatgttgtttcaaagtcttgtttttgttgtaaagactcttgtagattgtggctgcactggtttgtggaactgttaaagtttgaagcttgtaaatggtttgacaatg

SEQ ID NO: 15155 - DNA, 3000 bp, Unknown
  misc_feature (1)..( 3000): cDNA_ID_3094636_gDNA_ID_2926064_Annot_ID_196198 3000 nt of promoter + ATG
atacatttaaccagagaatatgaggtcttcatctagaatgtcaacttaaaaatatgatttataatcaacgaatttcggtgatatcaaatcatcagaactttatgaaaataaattgaataaatcatcagaagcatatcctaagatgaagtaaaaataatttatagttaagataaaaaaaaaagcaaagaaataatagaggaaataatttgttatatattaaaataaaataaagcagtaataatgttgcctttgcgtgagcttgacaaaagtcaacctgagaatggctttgtcttgctgcgtggaatacaagagacatccatcatcatcattttccagctcgaacaaatgattctctccatctatttctcttctttttattttattataactattagtattttctttcattcgcacgatttttttacatctccctcaaccgtttaatatgttaaattgtttacagtaaccatataacataactactacatttcgttttacataatttttttgaatatttcactttaaaatgctttgacgttcttaatcttttacctatctatatgatggttggtttaatacacggttatatcttaaaacataataaaaaaaaatcattatatgattttaaaataaaatatgtatatcagaaacaccctacacacgacggcagatgatatttatcattattgtaaaaattaaaaattttaaaaaaattaaaataagctaattggttgtagaagtagaacaataatttagagcacgcgtaagaaacaattgcatgattagtgtccgcctccgaaagctaactaacaatggggtttagttggtgttgttcatattttatttcatttgtatattactttctttcttttctttcattttctcttaaacttttggttttatatgcagttttcttttttctctttgttgctgactcgctgtcttattattttgttattgtcttgcagttgttgggtttacatcatcatgtcctactagcatataagatagtctaaaattaatgtattagggtcttaacaacaatgatttataatattttaaacaataataacaaggattcagtgattgtttaagctctatttttgtctcttaagtataacatgcatgcatccaaatcataacaacaatattgtcggaagtttgttcaagaaaaatatcacaagttacataaaatggatagtgcggccattggggatagaatctgagcttcttaataaaattgtcactttttcataagtagcataaactacccaaatcacaaaaatccacattaaactatccattcctcattattttttttgggttttcttcaagtgaccattttccgaagaagctcatatagtttatgggctatgttggcttaatgcagttgcttaccttctatgctttagtttggttattttcgctttgaacatggttgtatcaaaacacctttgtcacattttctcaaagtctcttactccctgattattaccgttagaaactgaaagatatgtaagggtaaccaagtccttgtaaccataataagagaggagatttggattaaaaggtcttccttcgttaagcttggaatagaacacaaataggttcgaatacaacaatgcataaatcaaacaaccaaactaaagcatagaaatcaattatcaaaactctcattgaacataagtagttattcatgtctaatctcgaaggagagtattattagagtgtaatacacaatttctgaaaatcgataattaagttgatttatatgtagatttgtttaatcaaggaaaataagttgacaacaaatcaacaatatgtgactgccgacacaaattgattagtaataccaattaataagaaaaaaggtagaatacgaccttcaattataaaattggttagtatatcacattcacttagttattcttaattaattataataaacctctcaaatcctcacgtttagaaacaatattatattcacgatttagagcttaaccatatcgataattacacacactcatatcattatcgcatatcgcagatttttctctcttcaaaattagctttgattattcacatcataaacaggcctagaacaaagtctcttgacccagcataaggtgttatataggcccataaagcccaatctttctaactctcttcgcaggtcttctccgcatacaagagataaacccgtagccgttagattcaggttttgctgattagcttattcatctccaccgtcaatttaatttaattgttttggttcaggaactggacaaaatattaattaatttcaagttctaatctttcttcttctccaactaaactactgtagctagctatctccagttctacgttctttctattaataaaatcttcttcttcttctctttttggttgattcccaccattgaacctctcacgaattcgtcgtcgtatcatcagattctgctcgaatagctgaatttgtttaatcagatagtgttcctcttgatctatcgctactagatttgttgtgcgtttgttttctttgctgataatttgcaaattctctgcttatgatctcgaggtagtaatgtctgttcttctctcccttattgttcattttttaactcgttgcttatcggatctgatccatttcgctctctttctctgatcgtgatctctcgattttatcctgctcgtatctctcgattttatcctgctcttattggtggatttttggttttggaggtttagatttcatgtcgtaggttttggattttattttctggcatcattacttggtgttgtgaatccaattcctcagttaaatctgcattggctgacaaaagttttgcttcatttttttttttgttgggtttcaggtaatggccacagagcctttgcacctggtttttatactgccgtgttttggtattggtgcagtgtaagaaattgattgtcaaaggaaaatatttgctttttctctgaggagaggggacgagtaag

SEQ ID NO: 15156 - DNA, 3000 bp, Unknown
  misc_feature (1)..( 3000): cDNA_ID_3094661_gDNA_ID_2926067_Annot_ID_196213 3000 nt of promoter + ATG
ttgatttcatggtggctgcgcttcgatcgaggatagcttctccagtgacggaattgtatgggaaggagcatttaatctcgactcaattgctctacgagctctctccttgtttcaaactcggtttcgaggccgcgaatctcgccattctcgacgccgccgataacaacgacggtggaatgatgataccgcacgttatcgatttcgatatcggagaaggtggacaatacgttaaccttctccgtacattatccacgcgccggaatggtaaaagtcagagtcagaattctccggtggttaagatcaccgccgtggcgaacaacgtttacggatgtttagtcgatgacggtggagaagagaggttaaaagccgtcggagatttgttgagccaactcggtgatcgactcggtatctccgtaagtttcaacgtggtgacgagtttacgactcggtgatctgaatcgtgaatctctcgggtgtgatcccgacgagactttggctgtgaacttagctttcaagctttatcgtgttcccgacgaaagcgtatgcacggagaatccaagagacgaacttctccggcgcgtgaagggacttaaaccgcgcgtggttactctagtggagcaagaaatgaattcgaatacggcgccgtttttagggagagtgagtgagtcatgcgcgtgttacggtgcgttgcttgagtcggtcgagtctacggttcctagtacgaattccgaccgtgccaaagttgaggaaggaattggccggaagctagtaaacgcggtggcgtgcgaaggaatcgatcgtatagagcggtgcgaggtgttcgggaaatggcgaatgcggatgagcatggctgggtttgagttaatgccattgagtgagaagatagcggagtcgatgaagagtcgtggaaaccgagtccacccgggctttaccgttaaagaagataacggaggtgtgtgctttggttggatgggacgggcactcactgtcgcatccgcttggcgttaacttcacacactcttttttttcttcttattattaccatattattattaattttcgagattattctgatattattatcattgtgattttccatttcgaaaagtgtaggaatcttatgtaacaaagaaaaaaaaaagacttttatgtttttctaataataaaagaaagagtgattgggttctttaatattctatattttgtaatatatcttagaatcacgaagatatcatagaatttatgccttaaaaagatgtaatatctgaggaaattttgcaaaagaatctcgcaggtggagcaataacaacttgacaaataatgtgattcttagacctcatacctatgaattattttattagactattaacaagtgaattactacatggtattgtaacttgtcatgttggatatgaaattctttcttacagataatcatattgtatatatgcgtgtgataaaaatttatgattggactcagttttaacgtgagtgaatgtgttggtgagaatataagctaaacaatactagtatacttagaggaaacaatgtatggcgacttttgtggtcatggaccttatagttcaattattttaacactaataaaagttggcattcgatgggtccatatccgatggcattcgatgttcttattttatattatgcttataaagtatccatctttacgcgagacttgtaaaatccgtgtccttggaatattttaaggcatatatgaaatataacaaacctggtcattagaaaaagataatattattattgtttggtgcaagctgtttgcggctaaaattatgcaaaatctttttgaaagacctctcttcttaacctcttgtttgttaattaagatgatttctttctaatatacgcaactaataccgtgttgagtgtttgattggattgttagattgttttccaagaaaaatcacatagacaaaattttatccataatttcttcatagaacaaattgagataaactttttgatcaagccaagtatgtaatgttaccaaatatataaataaaaaacgaaattttcatttattcattcgaaatgctacgaggtcttaacacttcctggtcctatctgaatttgtgatgtaaccaactttcctgatgaccacattacattatacattcatatgaaataaatgttacattcatttagttagagaattttaatgctttgttttttgaataaactgaaaagttcatttatgactcacacatcttatgcagttgacgttggtatatctttcacttgatctgaagtacctagtagctgcaagaaaagaaagtaacaaaagacttacacacgcttgcaataaatgtaagatggttagaaaaatgtggccatgtaggcctagtgcattatattattggagcactaataagtcaatatattcttaagaaaatatgcgatgtatttcaatatggtttggtgtggttcatcttcaaatatattatacagacaatatagagattatttgaaaaataattcttcttagggatcaagcatgaagcaatataaaaaaaaaaatggctcttgttgaaaggtaaaccaagcatgagtttctcgagagtttataaatggttagttttaatagtttacacaataacttatttatatcaatgtggattcttgtattagaagagtaaattgttgcttaaaaagctagaaaaaataaatcaattttgtattttgttagtattatgataacaactaacaatgtaatggcttgagtattaatattaagttttatgtgtccagtccaacgggcaagaaatgtaaaagaacccagactctcactttattgggcttataggtccaattaataaaacttaatgggcttatccacacaacgagtttacgaggagactgtgagagtttgttttcacagtcatcatcatctctaagaaacaaacttgtatgacctttaagcagcaaaaaaagaaaaaaccacaaaacttctctgaaaggtggataa

SEQ ID NO: 15157 - DNA, 3000 bp, Unknown
  misc_feature (1)..( 3000): cDNA_ID_3094658_gDNA_ID_2926067_Annot_ID_196214 3000 nt of promoter + ATG
aagtattttttataatctttgtatctatcaaaatcacggtaacatatgtaattggtacttgataattaatttttatcatctttgtatctatcaaaatcatggtaacattagtattagacttttaaatatgatacattcttatttgactataaaatatgtttactccattaatatttagatatacatttgaaatcataattggtaagaaaaagttgtttacctttttaccagtaagtttattgcaacatgtcattaaaacatagtccattcaaattctaattcataattttaaggtttgaacatgaataacatttcaacctatgaaagtttagaaatcatttgataaacttttatattcattatagcaatttaattcttgaaaattggtaatcttagattcctttgactaatcaaaaacttggtaatgttgagatatatataagtgatcaatctagtgagggggtggccatacataggtgtattagtgcttatgagttggtaagaaatatagtctcaagaaatctcttcttctcttctttagtctccgcatgattattatctcgacataatcatgtaaaagatttatgatttaatataaaactattacatagatgatttgttttaatatatattttttctaaatattctagataccggaactttcgagaaagagataatatcacaaaaaaacagcaaatagtaaggtaaaattttcattattcttatttaaacattttttttaataacatatggattcacccaaatgttataatatccatggatatagatatccatattatataagatttatgaaagtatatctttgtatttaattttttttatataagtcacataatatgagaacaatattttctaaaactatacaaaatagattatataaatcttgaaaaagaccatgtattttgatttaaagattaagatctctggatgttcatcttcatatttatttttgtattatatatttatattgtaattagtttttgttatttataatatcaacaaattcagatccggataattgtttctcgaggtaattcgaatcggaacatctcgaaattttaaagtatctagttctgtgtcgactttattgtattatatcattatttacacacaggaaataagttctaagcatatgatattttcagtagcaaaactttttcttatataagctattaaatattttttttcataaaatatactttcagtttttagaaaatttataattggtaaaaatttatttacaaagagcgggagccaggaaaaaagaattgttattatttcaagtgtaattttcttaaacgttgacattttttttgattatatactatacattgatcaaaatacacacgtgcaaaattttaatctaatcattaataaatttgatcttttttattttaccgttacgtttgaaattataatataacgatgattattattttctatatatcaaaccaaaaatagctatttatacaatccaaatctttttctttttttaatcacacaaatcattaacatttgatgaagttgtttctttttcaatctccatcaagatcattaaaaatatcattttacaataaaaaaaaattaggggttaaaacataaataaaacagaaagtataggggacaaataacacaaaaacaccaccacgtccgccaccaaaagttttaactttcacacgaagctagccatgtcactctctgctcttcttgaccattgactttttttagagatacagagatatgtcttactatttaatttcctcattttgcaaaatggtaagaacgaaaaagaataccgtcattgagggtaaaaccgtaaatattaggatacaaacgagggcaatttaggtataaaagaggatgataaatacgtggtaataggtcaccaccaccaagctcttcttatgttcatcccaaaaaagctttaataaaaaaataatcgtttctctatgaagaagaagacgacgacggaagaggaagacctagcatcgccgacgatttatttttgaattttcttagtctaagatatctccggcgaggagacgtagattcatcgatctaatattcatcgatctcgttcttgtggctttttaaatcgcccagacttttaagagacgctggatttgatatccgagaagagccgtttgataaatacgtaatcgattcgagcggtggatagtgaaattacggcggaggagttgaatcggatctcggtggtggtgtgtttctgtatttgagtgaggaggaaggagaaatataaaaagtaggtggagactcaggtatatgaaaaccctaagttctttgattactactgctctttgtttattggttcaatcaaggagagatctgttttgcttatggacgtcaatggaagatcccttaggctgcgatacgcttcgaatattcttttcgccatggaagatcccttaggtttctgcaattttcttgggagatctcttaatcatgagaacgatttctttttaactcatcttcctcaggaacttagtggacatgagtctagcctttacccttctgatttggctcatctatatgatagaattaggacacgatgatactctgattttgggcaagtttaatggatcttggcttcacgcggccattcaagtttttccagaatcttcgatttggccaagggcagtgatctgaagtcagatttaatcggactagaaacatgaataaatacttgttttgtatgcttttaatgtcaaaactctggaggtttttttcagacttatagcgcaatctgtcttaaggtaaaggctcatagagtctttaacttgactgtctagctatgaagtttttttgcctgcagtgactctattattgtatactagaagtaggcaatagctcttgcttatgttttttttttaatatggtttactaatgaaaggttattgcttgcaggtgaggtaagcgttcataaaacaaaaatcaagttttgtgggagtgcattgaagc

SEQ ID NO: 15158 - DNA, 3000 bp, Unknown
  misc_feature (1)..( 3000): cDNA_ID_3094679_gDNA_ID_2926068_Annot_ID_196220 3000 nt of promoter + ATG
caagaaacttcatcatcaaacatgtgttccaaaacactatccattcggtgtggggtgaaaggaatgcaagaagacatggtgaacaaccatctccggtggggaagctggttaagatgatagacaaaaatatgcgcaacaaactgagtacaatccggtgtggaggaagactcacatatgaagatggacttcagttttggtttgcttcaagacagaacctaatctaatgtgtggattgattagcttatggaaaaaattatgcattaagttgtagaacaatgttgtaattttacccatcctttttttgaatataatttaacagctattcaaaaaaaaaaaaaaaaaaaaaaaagcttgcgagaccattggtttcttcaaagtggtcaaccacggtgttgacccggacgttatctcccggttggagcaagagtccataaacttctttgctaaacctgttcttgagaagaaatcggtcggatcggtggttaaccggcctttcggttatgggctgaagaatattgggctcaaaggtgatattggagaggtcgagtatttgctccttcacactaatcctctcttcctttctcagttatcatttggtaacgattctaccaagttcgggtacgttacataattacttggctactgtggagacctggttagtatgtagaacattaagattagggatatctcgcaataaaaacgagttctgtctatatatcaacgtatcttacagtctaatacgtacagaaatgtaaatgcagttttttcctttgtgtataaatgcgagaacctatccgtatatacgaaatttgcatgcatgcatgtgtatagttatatctgctagatagatttttcttttctactagagatagattactagtatatgagtttgattttgtttttcgcgtttgaatgtacatgttaaaagtgtgtctagaacataaaaacccacaagatgatttcagagtgttctattgactatagtggaaaagaaaagctaataattaacccataataaaaaatatatagttgactaattacaagtgaattggaattctgttttcagccaaacttataatatttttttaatcaaatgaaatttatgaattggtttctttcttacatattatgaaacattaaattcgagtcagcaacttgaatttcaaaagtacagcttctcgatcagtctgtctactcgacagggaatgggtaactttttttttaacttacgcaatgcatgttgtgtgtgcagtgtgtataacgctaacttatatcaacaataaaaaaaatccttttttccttttttttcccccccctgaaactgttatgctttcgaaatttcacttatctctctgacgtgtttagtttcatcctaaaagtgtatatatatatagcttaatgtttctatgttttctcttatcttataatatatgtatttcttataatgagcaactcgtgatgatgtatgatatgtctgtttgacagctctgcggtgacgtgttacgtagaagcaattaagcagttggcgtgtgagatcttagacctcacggctgaaggactacggctcccacctcataccttcagcaagttaatcagagccgttgatagcgactcagttctcaggcttaatcactacccatcatccaatcaattccttagtggagccaaggtttctgatatgtctgtgtcattaccgagagttggcttcggggaacacacagaccctcagatcttgacagtccttagatccaatagagtagggggcctccaggtggcattccctgacggaaggtgggtctctgtctcccctgacccttcaaccttttgcgtaaacgttggcgatcttttgcaggtcagtccctatattcattacccatttgattctgtatatgttactttaaaaaaaaaaaaaggttttcaggtgctacttgaaaaacttaaaatgcaggaatctaactatttaataatacatatcaacatgtaagaatctactaagattctataaatttccacaactattataactaaaatattaatcgatgcaaaatttctaggtgatgacgaatgggagattcttaagcgtacgacacagagcggtgactaccggacatgcaagcaggctatcgatggcgtactttgccggtccatccgtccatgcaaagataggccctattccgggaatcatcccggcggcagaacagccacggctttaccggacgttcacatgggctgactacaagaagtttgcttactcgctaagccttggagataaccgtcttgacattttccgctcatgtgtcgatgagcatgatgaattgggcttctagtaatataactgaattgggcttctaggaatatcactgaatttgggctaaaaggccgaaagaaacttcttgtagttggtaaggtaactatgaatcaaaaagtaggaccacattttgtatgggaaatttgcaattcaattctattattttggtgtctattatacaactcgaattaaacaattcgtacatgatattgaaaatcaccataaagatgagaaaccataacaccagtgatgttacaaaaaataaaatcaaccaaccaaccaatagacacaatttttttcccgtgtaacacgagacgacccaattattcgtcttcctcaaaaagactcgaaaacgacgtcgtattgaattcaccactcacgaagtttccgtcttcgttgttgagagtcggcttccgaaaactatctttcttaattgctttggttccttgccttgccttgctcctcagaaatttttgcttctgtttgattttgtttttgcccctttgcacacatatcatccaaattcgttatcatttttcacctttgaaagaatctatctccttgctctgttatctccagttctagggcatacgccgatcacatccctagctccttttggctctaataatacagtaatcttaggttttcggggagtgaatcgtgtattggtattctagttttagctcaagaac

SEQ ID NO: 15159 - DNA, 3000 bp, Unknown
  misc_feature (1)..( 3000): cDNA_ID_2113740_gDNA_ID_2926069_Annot_ID_196224 3000 nt of promoter + ATG
tagtgacacctaaagtaaagaagcttaattaatgccattagaaaaaagtagctgattcttttcatatgtttatgtcttttgcatgatataagtgggttataaccttcattaatcctagtcaatgtgtcacactcacacctatcgcaaaaaattgtatgaagacgtacaaagccaaaaattcccggactaatctattttctttctctgtttttcgaaacagagtttctaacaaaactaatttatcgtcttccatttgaacatgaaacttactcaggacttagctacggcctacgggtaaactcagtcgtggttttggaaaaacggtgacagctttgctgtgttcaaatccctctatgattttaattttttgtcaaatttcgttgtacttttgtgacttgttcatatcacatagtatggattgttgttaaaatagttcatttctgtgtttttgtttctaacaaacaacattttttataaaaaaagccaaaaaaataaacattttcagttccaaattccaagagccaaataagaaacatcttttacatattccctaattttcattaatatctctgtttctggtacaacttctcttagaactgtgagaagttaattaacagaaacttgttgtttatattttctaggaataaagaatagaatgtttgggcggcaactcgaacccggttgcatgaaccttgagaacaaaatcaggacatatctttaaacacaatatctagctaccagctttcttttttcccttatataattaaaattttggcagcaatatacaatagagaattttactctgtgggacaagaatactcttctaaagtggattactttttatgtaaaaaaaaagttgagaaaaaccaaaactttcttgcttcttttttggttcttcaagggaacagctacatgcctaagattcagttctcaggcaacatgcaccaataacaatagccaaacacaacttgcaacaattgcactttgaccttcttcttttttctctcttttcattttatccaattctttcatttttatctcccttttttaattcaacaacaaaaaaaaaaaatctaaaattttgtaatagttatagcatacattgtttaagagtaattaactgtgtagatcagtctttgtttgaggaaaaaatgaatgcttctttttagtgtaggataattaaaggtaggaatattttcagataacaaacaaagatcgaactaagatatcagtttcgctttagcttaacagaacacatgaaagcaagatttcccaagaacaactttttaagtttgaacaaaaagccactaagtaactcataattatatacataaaaaaggtatcagtactttgaaggcattcggacgcagagtttcagatattgatgatttactattcctggggaatgctgatgagattctattttttaagagcataattaaatccacaagtaggataagataagatcagctatggtagagtttaaaaatatcatatgacatgtaacactgacatcttatgatgtataatttgagatatttggaagatcttcttttttctcataaaatatttcattgtctagtccatgggacgagtttgaagttaagcagatcatggaaagagaatctaatattatgaagttgtacaatttcactgaaaacaagataaagggaagaaaaacatgtctccctttaatctttgaatgcatattcagtcatgtcatgactgacccatccatcatctttcttcgaatctcctatctcactgaacatgtttggaggcagccttccgtattttatatctacacttatgatctcctatctctccatcacccatatttgattatatttttcaacatattaatgtctcaatttcccattcttattagttaaaaaggaaaaacaaaccctaactcgtggtgattcagtggttgaaatttttttcatacggtttaaatggcaaaattcttcatagatcccggagattatacggaacttggtttataattcccggctcgaaagtttaagcattggcgaccagagtttagatatcaaatcttgtaaaatacgcatgcatggttgtcatgcaaacgtagtattatgatgtaaccagtgaatctaaattggactgaggaggtagggggtaaatagacacacaaatctaagttcatatacatttttgcttaaatatttattggtggattcaagtcatgggggctgttttgtacttggagtaatttataatgtaaacaatcgagaagaacatgtgttaagattctggagctaggcgtagggtttctctttacgtagttttcatagcgtgtgtatttgtgtacggccctttgaaataacgcgaaaacatttattctcggtttttaaaattctctttttttctgtttattgaaaaaatgacgagacacgaacattggcaactaaggacaattggtgtggcttaaattagatatctaattattcggctgtgctccattgtctaacgtatcacaattcgacagatgtatcttagtatctacaatatatcaattattaaattcgatgacttaagctgtttaaagtttcattttctcgtagttgaaaattttacaaaaagaaatgttcttaagggagataaaacaagcacaatggcaaatccgaaagaaggataggtggatgaatgtagaaagaaaagtgcaaaaattaaacgaaaatagaaacagttagaacataaaaggaaaaatgagctggtaataattaagatgtttaagttaagaaaatggctttgacagcatgaaaagagagtgtaaagaagttattaacagagcatagagtctcactaactgtaagtttggtgttttcggtcagcccaatttgtgttacggtcagcctgcccgaacccaacaacttgtaacatcctcacacaaaaactcctctctatgtttcctatatatatagacacttgcacacactctcatttcctcccaaacaaccccaaacttataacaaa

SEQ ID NO: 15160 - DNA, 3 bp, Unknown
  misc_feature (1)..( 3): cDNA_ID_3094746_gDNA_ID_2926071_Annot_ID_196233 3000 nt of promoter + ATG
ggg

SEQ ID NO: 15161 - DNA, 3000 bp, Unknown
  misc_feature (1)..( 3000): cDNA_ID_3094772_gDNA_ID_2926071_Annot_ID_196234 3000 nt of promoter + ATG
tgatgttttttttatgcaaagccaaaggtaatatgtatattgatttataatgttttcttgtgttgtttgtggatgcagaacgaatgtgttattagtcgtgtttttcatacacggactgatggtacgaaggagcatatgtccgttggtttacctccgctgatggattcttctccatatctaaagagtagaggacaagactctttagccgggaccacccttggtgggttgttgtctcacgttacctacttctccgaccaaacaaccgatgacaagagtcttgtggccgattttaaaactaccatgtttggttccggatcgactaactttttaccaaacataggttctctactagacttcgatcctctgtttctacaaaacaattcttcagtactgaagatgttgcttgacaatgaagaaacccaatttaagaagaatcttcacaattcaggttcatcagagagtgaactaacagcgagttcttggcaaggtcacaattcttatggttccactggtccagtgaatcttgattgcgtttggaaattctgaatttggaaaatcgaaaatttggatgttaactagggggtatatagggtttttaaaaacagtgtatatatgcgttatgtgttagctttagattctaggatatacaaagatgacactaatagattcttataacattttgtaaaaaaaaatcattgtagtgaatactctcttgccatttgaaatccattgtgtttgcatatttaaggtgttcataaattgtcatgctgaattgtgtttgcatattctcattatttccctgtttgtaattaatgattgtaacatacctaagtagataatattagattaaaaatatgactagtttaccaaattttacttgttacattttgggttcttaatcaaaatcaaaaggctgcaaatggttgtctcaagtagaaaatattaagttgaaaaaaactgagatcttaataaaacttctgataaacagaataaaaactaaacaagtgaaacaataaggcttcatgatgaaaagtgaatttcaggagattactggcagcagagacacgaaaaaaaaaccgaaactgattcgggtcgggtcataagctgcaaagcggatccctaattttgatatatgcacataaaattattagacagattccccaattgtttttacagggatgtcccagtacttgtgcaatcataaacagcctttgatactcacaaaaaaaaaaaacgaaaataacgaagaagatagaaacggcggaagaacataagtgtgtattgtcttttagaaactatcggtgtgataaacaagcttatatataaactagtaaaaccctaatcatgtgtttgttgatattttgggcttttttgacctaaatattaatgggcttttattatatgtcaaaatgggctttgttttttcattcacaatcccgagaagaacttactcatttcataagcaaatcaatcattcacattttcgaatatataatttagtcatctttgtatatcctagtcatttttgatttgctatacaattataattccaagtctatctctttatgataattgccaaaagacatttctaagggaagacacggataaataccatttctcgaattgtaatctcaataactctcaataatagagggtcaaaacctctttttcttatgccaattgccttcaagctttcaatataaaaaattgtattcatatatatatatatatatatatatatatatatatatatatatatatatatatatttaataggagcaattaatctcaactccaaagtctcctactctacagaaattattactagtttgagtagtttatatgtaatggtatcaacccactcttatcaacaaagcatatttcccaagtcaattttgagatttaaataagtttttatttccggtgaaaattattattaatctgtggatttccaacttgaaatcaaattgagtggagagactcatatcttatatatactatttaagattctactcaattttcaatgtgggacaatatctctaatacgtctcttcgagataatggttcttctggccattcatctcgatatgttcagacattgatcagcgggtcaactactgattgagctgatgtggattgggttgagcatgtgcagatcgtggtatgatattttattagattgtaggcttccaactcaaaactaattggcaataaatagagaaatccatctcttatatatactttttaaaattgtactcaacttccagtgcaaatcgtactcaacttccatgcaaagccgtgccggccactaaccataaaccatttttttaggccacaattccaagaaaattgtgttactttggttggtttgagctgactcaaatattctttatgcttcaaattcaatctattttagtgacatttattccaatatataatttgaacatttggttttgtattgtttttgttatgctttatttttatattttaaaatttcttcttatatatgtatatataatttagttttctttaatttattatttaattatttaactagacaaattggaacatatttttttttgcccgaaatctcagcagggcactgttccaatgtgagacaatatcttcaatctacctattttgaggaaaaaagaattcttgttattacataatatactaagactaccttcatttcaggttgacaccgttcgtgtcgtgtgaccattttatcggccctctcttctcggcgcaaataccaagtctcaacgtccaacttctctcttctctctcacagacagactaatatagaatatgtgttatatatagtaatgaaatgatcaatcgaatttgtatactaatagttatcaaattattaaaaaagtatcagctccacttaagatccaaatccctcatcatcaactctcctatataaacattcgaactcctgacaattcatctcataaaaaggttataaaaaaaaaaggaaagaaaacccaaaca

SEQ ID NO: 15162 - DNA, 3000 bp, Unknown
  misc_feature (1)..( 3000): cDNA_ID_3094781_gDNA_ID_2926072_Annot_ID_196246 3000 nt of promoter + ATG
taatttttggttaactggtcggttcaattggaggtgtagttttaaaaacaaatctgaaagtacatgtagttttatcgagattaaaattgtttatggtggtttttcaagtggctaaaagtttagggtggaaagttgagactgtcacctaaagttcatgaaactgtcaaatccttacttgccggatttagtagaccgaaaatactctaagccaagttacttcatcgaagataaaagacccgtagtgtgctcttgcgatgaaactggtcgggcttggatctatgttttcagggaaaataagctgaccagtaaaacttagatagataatgtggttgatccttgaccttcgcattctacatttattcccaatttggtacatgttcctcaaggttaaagagaagaactagcagagttaaaactttaattttcttacatttgggcttcttgtttagttgttgagggagctaagtttgatttggattttgcattttggtgctttattcacaaactatcctctttgttggaactagagattgtttttggtaatttttgttttttttgcaacataaattatttattgtttctagaacaaactagagagaattgcattcactctcgtggtcttggctttgttccgataataaaaatatgttagacttcacttgttgttgggtcaaatatgactaagctttggtgatagttttaatttacctagcttgtgtacagaatttaaatacatgatggtatgaagatcaataagtagcaataaatggaaattttctctttttcctagtgaataaatgtaagagttccatattttatactagttaatacttactaaaatgtaaaatttacaaatttcacggatgttttatatgtatgtaaatttttgtgttgataaatgacgatatactatatataaatatatgcccaatggttgaccaagggtttattaatgcttctacaccaagaggtcggggttcgagtctcagctactgcgatttattagcagatttgcagattaatggaggcaagtgtgcaaaagatctacaacgatgtacaattatagccgttcacctaggattctacgcagagaagatattgaaggtgtccatcaagcgcatggagaaggagaatgatgtgtcgtctgccatagatctaataagggtcggaaggaattatccgtggtagaatcgtctatgtaacaattctcataatttgtaataaataataaatctagacggtaaaaaaaaccagaaaaaaaagacgggagaaagaaaacatttgtctgtgtgcaatatgaaatgtatttgaacatttccctcttttaacttggtatatacatattgaaaactcggtactcttgtagccttgccattttcaaatataatagttgcttctgactcagaagttctgagtaatctggacaagtagggaagaagaaacaagcagaagttaccatgccatggagaggaattgagcttcaaaaggttaaccaagagccatgaacgattaagtgttttattgtaaaaagatgaaaaattagttcttatctttaaaacatgcaaaatttagcttgtcattccattgtattcctccaaacacaattacatagcctttagacgatcaattagagccttgtgcatcatatggtcctcattaggaacaacataaaaaaactaaactaaataattaaatcgaaccaaaattcatcaatttaaaactgaattgagtaaactggtttaagaaaaacggcatttttgattgatcaagagagttgatttaggatttagactacatgatctcgatgtaaagggtgcaaactaaacaaaatgatgtcagaatctagcaaaattttacatggtgatttgtggcaaaaatctcgcgaattagttaaatatttaaatcgtaacagagaaatcttcctaacaaattgattaatatttttgtctagttgaataacctccaaaaggaaaaataccgtttgagatagtttaatttagtttcaacgaatacatattagatcttagacaaaacgatctaccggatcaggtaatttaagttggttaaaattgtccaaaaattctctaatgccagacttgatctagtcccaattagtaagaaaatgagtactgaatataaaaaaacaaaaacctcatctggtgatagaaatcgagtgtaacatcatattttttcttacccatttcatcaaaattccacataaaacaggtttgccatttacttattacaccaaaacaaaaaactggttgagagtagaaacaaacttgacttgggacgaaaatactcttaaaagtcaaaacacaaagattcgaaaccaaaacaaaccaaaccaaaccaaactgataaaatcctaactaaaaaaaagcatttactaaacattttaaaataaataaaatttcccggaactaaaaatggagggaaatacgacgttacaataccaacaacaataaaatgacgaatttacccctaaacacaattatatctccattattttctcgattcgcgcatgtttctctcaagtaaataaaataaaaatcccaacaacaaaacattaaaaaccctttctctcttcccactttcacatccatagctaaacccttgaagaagattgtttagtgtgttctcgtctcttcgtttatttcttctccaccgatccaacaatgctactctccggtcaatctccgactctgattcgttaatctccctccgtctctctcgtctgattccttccgtatctctctctgattttggccagagcacgcttgataatcaaaatttctccggtacggttatgtaatccgtttcctgattagggttttgaatttcgtcttcgtattgtttctcgatctgttatgatcgtacgtttttcgtttattgttcgtcagttattttttaattttgattttgattcgttgtgaaattttgactgtaggggtctttatatgactgagatttgagaacattgtgtagaaaagtaaagaa

SEQ ID NO: 15163 - DNA, 3000 bp, Unknown
  misc_feature (1)..( 3000): cDNA_ID_3094800_gDNA_ID_2926073_Annot_ID_196251 3000 nt of promoter + ATG
aaataagagctgaacttatacgtaaagttgccattgatttagtagactattctcttattcgtggctgaatacatgcactagacaacacatatggttatatagacaaacggtagaagaaaatattttatataattaggagatcaaaagatctaagggtgtaaaatatttttcaattaatagctaaaaaagcttttataatatattgaccgcaaaaatgcttaatctatatctgttacaatattttcaacttttatacattataatcatttcaacttttaaattattaaataatggtacaaccgtacaactaatctaactaaatctaaatgaaaaaaatatcatttaactcatcaattattatttttttgatgatttaaaacatgaactttggatctgataattgtacacatttgtataattgtcatttaaatcacacacttctttttctccaaaagctccttgtgtaattatacccacgaggccactatatgtatgtaaatttgatatcatagcttatttgattagataatgtccaagcctaaatgatttgtgtacctcgtgattctcgtgttatatttggtgacgttattatgtacaaaaaaattatactaatggccccttcaggtagaacagccattcgcacaaaaagtgaagtcaaacaaaatgtatcttctccaaattctaaatgttatgtgtatctcgtgatcgtcgtgttatgttggcaaacaaacatggcccttttaggtagagttagtcgtatggaaataaattctccattcgaagcttggagaaagtataaaataaagtatataatgttcacttggcttaacaatcgccactcgttcactgcacattatcttaatttatatcaaattactattgaaagataatagaagataacgtgcgtgtatctccaatatataagacgtcacaactcatcacttgctctgtcttattagaaggaagacaagaagagttctttgtgtcgtttgtttatgcatcaaattttgcagcagaaagaaaggatttgtggagtgatattaaatatcatcatgattcccctttgttctataacaaagcttggttaatatgtggagactttaatgagatattagaaggagaggaccattcactctatgaatcatctccattcgttctccaagggatgagagattttcaagacttaatcagacattgtgaattaacagatatgagctaccaaggccagagatacacatggtgtaacaagagaaaggaaggagtaatatgtaagaagctggatagggtactgattagcaagcaatggatgcaatagtatgaacagtcctacagcgtctttgaatcaggcggttgttcagatcacctaagatgtcgattctatattatggagcaggaacaacgagtcaagaggccttttaaatttataaatgctttaatttcgtattcggatttcagaagtgagacagaagagctttggaagacaactcagcctctctttcattctacctcagccatgcaccgcttatcaaaaaaattaaaaggtctgaagccacatttcagaaagatggggaagcagttacttggtgatatctcaaaaaaagcaaaagaagcctataaaactttatgtgaaaagcaagcagaaactatgacaaggccatcttcacaggcagtggtagctgaagcggacgcatatgagaagtggttaaggctgtcgggtattgaggaaagctaccttaggcaaaaagcaaaactgcattggatgaagataggagaccaaaataataaaactttctacaatgctgcaaagattcgggaggttcgtaacaatgttagagagattaagtgtgatgatggacatattgcatcaaatcagcagcaaataaaagcagaggcagttcgatacttcagagactttttaacgctcaaaccgccagactacgtggattggtcgcgggaggaactggaaactctactggattatagatgtgatgagaatgacaagacaagctcacactagaagtcactgcagaggaggtgcggaaagttctcttctcaatgccttcaaataaatccccaggccctgacggatatacttgtgagttctttaacgagacatggtcgatagtaggaaacgattttgtggtagccatccaatctttttttaagacaggcttcctacccaaaggagtaaactccactattttggccttgatacccaagagaaaagaagctgtgatgatgaaggactatagaccgatatcatgctgcaatgttctctataaggtgatatcgaagattcttgcaaacagactcaaaatcattcttcccaagttcatctcttcaaatcaatctgcctttgtgaaagatagactattaatgaaaaatctcctcctagcaacagagattataaaggattaccacaaggaaacagtttctcctcgatgtgccatgaaaattgacatatcaaaagcttttgactcagtccaatgggggtttctcaccacaactctacaagctctagattttccggagtctacattaattggataaaggtatgcatctctacagcgtctttctcggtacaagtgaacggtgaactcgcaggctattttggtagtgagagaggattcagacagggctgctctcttagtccctattgttcgtcatatgcatgaatgttttgtccaagaaaatagacaaggctgcaagtgataaaagaatagactaccacccgaattgtaagacgttaaacttaactcacctctgttttgctgatgatttaatggtgtttgttgagggaaacaaaaaatccattgagaatactttagaagtgtttgaagactttgctattcactcggggctaaagataagtcttcaaaagtccaccttatatatggctggtttacaagagcaccagagagatgagatcctacaacaattccctttcgagtatggctctcttccagttcgctacttagggctcccgctttggttacaatg

SEQ ID NO: 15164 - DNA, 1625 bp, Unknown
  misc_feature (1)..( 1625): cDNA_ID_3094800_gDNA_ID_2926073_Annot_ID_196255 3000 nt of promoter + ATG
aatgaagaggccttacaagagaaatattcaagtgaagctttcttctttcttttcttttctttttttgattgaaatttatgctttctagattcacccaatccccacacactcaccatgaccgaaaagaagtttccttttcacgatcatcctttagcatatgagaaattggacagattttcttgcattttgtgcaaaaagaaaggtggttttggctatttctgcgataagtgctatttttgggggcataaggaatgcatcaagcgctcacttctgcatccatctccatgcaaacattctctcaaaatctacacactcgaggcattgggctatgcaggtgaccattgtcatttttgtagagattatcttcttgatgatttttttcattgtttgatatgcaacatcaacatggatctcaaatgtcttaaagatccaccaccatcaagtatttatcacccaaaaaaccatatgcatatgcttactcttttgccgagagtggtcacatttacttgtaatgcatgtagcgtagaaggtaagcgtaatccttatgtatgtcttgaatgtaatttgatgttccacaaggattgtatatatctaccacgagttataagcatcaactgccatgatcatcgcatttctcgcatttttcatcttggtctcggagattggaaatgtggaatctgccgacaaaagattagttgctcccatggagcttttacatgcttgcgttgtcctagtcttgcatttcatttaaaatgtgcgatgaaagatgacgtgtgggatggaaaagaattcgaagctgaacccaaagaagagcttgaagatgaactcgaagatgattccgaaaaggaaattgaagatgatagttctgaagaagaaatcgaagaaccataaaactaatgaaaaataaatattggcgtgtatgttatgagaaattcattttaaagcttgatgcggattctgttagtgacaaactgacaatgtggtgcaacgattgtgtccaacaatgatccattctttttgtatacataatgtttgactcttgaccaaacgaagaaccctgaagtctaaaattttgtctatgactcgtcattagtaattctagagttaatggaacatgaccacattagcctaacacatgattaaaggggccaaactcatttttaaaagattttgaaataaattattacaattacaaaagaaaattaatttattgaaaaaattgtatataaatgtcttcctgatttctaccataccaaaaatatatatttcttcctgattttctatgtaggagtttcaagatttaaattttaaaatatggcatatcaaatttaacactagtaatatggagtcatatctcaaaattgttttttataccaatttcacaaaaccttttttatctatatatgtaaaaatgttttaatcatttgttaaagaaataataatgatcaacctctatgatctaattcaattttgttgccttaaataaaataatacacatatgccacgtttgccttatttacataaaatccctttaaaaagatgttacaagcaattctggtcgcgattctataccaaaatttcttgagccttaaccctaatttcgattacgacgatactctctgatg

SEQ ID NO: 15165 - DNA, 107 bp, Unknown
  misc_feature (1)..( 107): cDNA_ID_3094834_gDNA_ID_2926074_Annot_ID_196257 3000 nt of promoter + ATG
ttgagaggttttcatataatgtcagcaagtgtttgttttcacatcaagctccgtttctacagagtttgcatctcaatatgaactttgggtgtgaccctcgtataatg

SEQ ID NO: 15166 - DNA, 3000 bp, Unknown
  misc_feature (1)..( 3000): cDNA_ID_3094855_gDNA_ID_2926077_Annot_ID_196264 3000 nt of promoter + ATG
ttattcagattatgatttgtaggattctttaatcatattctaatgtaatctatttcatgaatcttttgtgtttgatagtgaatgagctagttacatagggttatatatattaataggatgcttggacaaccgtcacttattcgagaatcttcaatacgtagatttccatggacatgctcagtgtctcaatttaagatcaggatctcacggaacaagttttctcagtgaaactcttagtttaaaagaagaaaatgaggtgaacccatctcttgattttgattttgtcttctatttaatcatcaagatactaaaagtgtttttttttaatctctccaacatttgagatgctattaaggttcatattctcttcgtttgtcatctggtggatctgacctgatatgtgagggtttattctctcatcctaatgagatttgggaccttgcttcaagcccttttgatcaacgcattttctccaccgtcgtctccgctggtaaattctcttcgcttgatttgattagttgcaagaatttggagctctggtctatgtactgatttatagcgtgagtgtttcaaaaacacaaaatggttttatccgtgaatcatttggagcaacgatttgccaaattcctgagttatatggtcaatagaattctcaacaattggagaggagcgtgttgcttctcttgatgcacatgttggtaagattaattggtgactttatgatcaaacgtttacagcagtctattgctaacaatgatataagagtgttaagaacttattttcttcttgtcttcattctccttttacaagtgttaagagtgttaatacaattatattaaagacaaatatacgaacaaattactactgtagatgtggagaaaagagtgatagagattgcttgttaaataaataaaaagacacaaaaattggtaaccgagttcacggcctcaaccggtacgtctagggggagatctcttgctcccaaagcttcactatatcaaaggaattacaaacacaccactaacttgtgatgttgtcttttggtttttacatatttgcactcaagaagaacaaagatttaagaacaacaaatagaaagaagaaagcttgcttaggaagctcttttttatctctcttctctagaacactctttagattcttttctcacctacctccaccatacgtcgtacgttgtaatgcatatataggtgacgtaaatgggctacaaactttttgcccacacttttgttcttcttcaccttgccaattttgttgacccattaaagcccaatgcttgtgttatgtcaaacccaaataacagtaggaaaaatatgattggtgaacagtagtaattctaccaatttcacaactaatatcaaaataaaatattctgacatattttttcaaaacgctggacacattatacaaattgtggggaaaaatcaatattaattacgattttgatatatctacaccaaaaaaacaaaaattcacaattaattaaatatataagttctgtgaagtccagaattgtacgcataatgatatacaattacgtaaaatatattacaattatgcaagggagtaaaaagacacaaaaatattaataagtaacagcatatagacccaacggctataatgctacacattacacataaatccaacaaataataatgacaattaaaagctcttcaattatataatcaaataacagtaatgttaaaccttaacaatgtcactatataaataacaaaaacacacatgcagaaaaccataattacatcaacaaaaatatcaaaatggaatatatacaatacgcaatgcgctatgaagcaagtccaacatcaacccatccacccaacgagctccatctggatttatgaagaccccatcgacaagaaaacaacatcagctacagaatctcattctcccacgaccaaatacttcaaccaaataataacatttcagagaacttaccaacttctatcttaccttccatgacattgacgaagcaacatcatgtactttgatcaacaatttgacaaattttatagaagcagctcttctctcatttggaataggcaatccacaaccactcaaagtcatttttataatcgaagataacaatccaaatgcaacgacaagacttgatgtggaagtcactatacaacacctatcaattttacaaaggcaaaccacaaaagaagaaaaagctgaatgctcaatctgtcttgaagagctacatggtcttcaaaacattaacactatcttgcaatcacatatttcaccatgaatgtatttcaacttggttacgtcatagaactacatgtcctaattgtagaatccaaatagtataaccttcatattattttcttattattcatgattaataaaataataatgctcttttatcaatcatgcttttgttgattcgaacatttgtaaagggtttactaaaacacaatatttatatatataaacaaataccacataccaaaataataataaaaaataatatatttattaaaaatagaaaaaacaaaaaaaaaaccaccatttcacataaaacatcataaaaataaaaaaataacataattacattttaaagacaataaaacactatattaattaaagaagcaagaagaacacaaccatataccaaattaaacaataaaaatatacatgtgcaacaacaataaagttatataaaatatatatattttttccaaaagtttaaaaacaaaaacaaaccaaacccgcccaacgggcgggcctttacctagtatatgatgtattgttcctactattgagatatttgatttcattgggttattgttcttcattttatcactacaagaaaacaggcgatttgcgagggaaatttgcggtggaaaatctccctcgcaatttgctacggatttgcgagtgtattgcgagagaagaagacaacctcgctaatccctcgcaaaatttgcgacgaacaaatccctcgcaaatatg

SEQ ID NO: 15167 - DNA, 3000 bp, Unknown
  misc_feature (1)..( 3000): cDNA_ID_1396414_gDNA_ID_2926078_Annot_ID_196272 3000 nt of promoter + ATG
tgatcagtaccaaactactaataatttcagaaagataaaccattaataacttaatatatgagcaaccatttttggtaatcaattgagttttcttttaatatcccattgaactttatagttaaccaatgattgcaagtacgtactaggtttaattagggattagatgcacgttggaaacaaaagttgtggatatatatattttttattaacatatatacatggggcatgatggtactagtcctgctaaccgttccatttaaatttcttgaactggaaaattgatgtctccgtttgcagaaatcagcgaactatgatgccacgcacggccaagcgtagatagataggtagatgagaggttcgatccttatcctgataagttccggagacacacatctttttctttgagtgacttcccaaaattgggaacattcgcaaggtggctctatccaacgtcacaccaaacgacactgatgagtcatatcatcttgaaaaaatatgaaatgacataaattcacattgaaatgaatcatggaaaagaaagtggtgtgcgacaatgtcgattaaatttaaggttaggtctcagctcgaattgtatacgttgtcttacctgtcattatatttttgtagttgcagctttcgaactttgtaccttcgtattgtgggtcgtctaggcgcctatgtatctctatgttgatttgattagtactttttctctaattaattacgttgtaattattacaattccacctagtaaatattccttttatatactaatatggtatattttgtaagttcactatcaagagccaataggttgatatgtctagattgatgtgatttgtaagtttcttttgcaagtaaatgtgacttaattcgttctagtgtctatagttgatgtgaatattaatggtcaggaaatattagtataaggttgtgtctactgatatgtgtgacttgttttttggtgtgtgtgacttatgtactttatcaacattagtttggtcccaatatcttttgacaactcaacttcagtgaatgacccaaccaattttcacgtacgttaggtttgtatgttgggaatcacatgaacattttgttgaacatctataaagtaatgtctggtatgtaaattttattttgataccgtgtcggtggaaaagccggcctgagaatttaatggcttagcttcacgccaagaaacatacataactgacccactaaatatcgattaatccaaattctcttcaaaatatatatatataggatcgatcctgaacatccaaaattactccaattgatattatcagcagaactactggggttttctctctaaaattattatataaatcaaaaaccctatactcatgaatgtttgagaagctcttaagtcttaacaggggaaataactagaccttcggttcgagtcttataattaggaaggacataattaatttatcagctatgctaatatgctatatagcctaagaaaattatggaccgatgttatatatataattgtatttgtacatctaagtttataaaattctatatatattactaaatataggattatacaaaaataaaaataatataataataataatataggattatacatcgatggatagtcccaatgatttactagaatagaataaaacatgttcaacttaagaaaagaagagttaaaagccaaaagaaaaaaacgtttagataaaacggaaaagaagagtgaaaatattatgaagacatatctcttatgagttgtccaaaaaaaaaaaaaacatatctcttatgataaattgggtatgtgacgtttctccttttcattttcaactgctgtgtatctccttcctgcagaaaagactttcttgaatattctacaaaaatgcttctcattaaaaatttaaaatatttttaaagattaacttgctaaaagcctaaaacatgtacaaatgcatttagtaggtagaacttaaacagagaaggaagttatgtgaatggctgataataatctgatatgatgcctaattgcctaaacctttttccattccactcttttaatacaaactactaggattacttacctaaactacttgttagaatcttcataatgggcttgctaatatgattatccctaacacataatgtagaaatcgttgagagcatataagtaagatactataataaattttttcctttacaaaaaaaaaaaaaaaaaagatactataaaatactatatacgcatctttttgaacccccaaaccacatgcctcttcttattattaccaaccttgtaatgggcttctgggacatattgggcctttaggacatcttatttaatgaagcagctgatataatcaagccaacgtggtggcaacaaaggttgaacaagttagagagaagtccgggaactaaatactctacatcagctacattctatatttgatacacttgcgcttttccagtgtgttgacttctctcattactcaattctattggacaactacggtagtatacagtaatacgatacacctagccacaggtgattagtttgagcaaaacaaaaatgagagtttctgagctcagtatataaatcccttaaaccctactctttgtcttcatcctctcactgcctcttttctcactcactgttacttcgctaaaaccctaatttcgccattcccttctctaaggtttgcttcatctctttaatgtctttcatagctttagaaatggctttggtttcgatgatctattgcaaagaaatgattattatagcttgttgattagatatggagaaatggaattgattttagtcttctgggtttacatgttgtgtttgcagacatttagaaatggctttgattttagggtttgggattctttgtggtctaattgaaaagaaatgactttaatagcattgttgttaatcattttacagatatatagagtaatggaattgattgttgatttagttttgtgtgtagacatttagaaatg

SEQ ID NO: 15168 - DNA, 3000 bp, Unknown
  misc_feature (1)..( 3000): cDNA_ID_3094909_gDNA_ID_2926078_Annot_ID_196293 3000 nt of promoter + ATG
tgtcgctgcttagttggccattcacattcagtacgagaacattttggtaagctacgtttccattagcttagatctttcctatttttttacacaaaacttttgatccattcatcaatagagaacaacccaatatcattcatgcttgctcttctgttgtcttgtacataagtttattagtacttgagtcgttgcaagatatattgtcttgctttagttacatatgttgagacgtattttttgaaatatttggaatttgaccatttcagtgaaaatatgctgcaattgctcttctctcatatattaaaattttgaccaagaatggcgaagaagccgctcaagaacttgattattacaaatttgtaaaatgtgtaataaaatcatctattcagtgttatgatgtaatggaaattatagaatcaaattatttagtaataatatcgtcgttagtcgttaccattaagtaataagctacataattaattaaactatataagaaaaaaagattctatcttcagagttcgatgcgtactgtgaccattacatactacagttagctttcttctctagccgtcgaagtttcacgcgccgccgtgagaaaatgcagcacacaccggagcaaccgagagtcactctttacataatcctcaccaccgcgtttctctctctatgtttcctcctctctctctcttcctcttcccagtactcttcatcttcctacaccggacgacccgatgatctacgacccgacccgagactctttccttcttcctccaaaatcgccgccgatacagctcctccttcaatcgcttacctaatttccggatcttctggtgacacgcgacgaatccttcgacttctctacgctacttaccatcctcgaaatcgatatcttcttcatctcgatagcttagcgacacaatctgaacgagatcggctcgctgttgatgtacaagatgtaccgatttttagagctgcaaggaatgttgatgttattgggaagcctgatttcgcgtatcagagaggatcgtctccgatggcttctacgcttcatggtgcttcgattcttcttagattgtcaggaacttgggattggtttgttagtattagtgttgatgattatcctctcgttactcaagatggtttggattcttcttgcgaaattctctttgatttgtgatttttctgtgtttgtttttactgattctgagtttgattttgcgtagagcttcttcatattatgtcacatttgcctaaggacttgaattttgtgaaccacactagctacattggttggaaagagtaagattatgtttccctttagtttcacttagagagtctttgtgttgtaggctggatttgattccatagagctaagattcattgttttaggatcagtgtaacattttctcttggtttcttgtaggtccaggaagttgaagccagttattgttgatccagggctctatcttgtggagaaaaccgatatgtttttcgcttcgcagaaacgagagttgcctaaggctttcaagttattctcaggtatgcttagctacgttacattacgttttcattttcccttttctgttttctgcatttatctgtggatcattactaattgaccaccttgtttgctatttagcatattcagtgttgtgcaatcatttggattgatattattatggaagattactttttcctaattatgctgttttgtagaaacttaatccctttttcttttacatggttagcagtttcttggcaccatttcataatttggtaggtagatacgtgatagtgtagaagtggataagtttaggtgaaagctctatcagaatatagactacatgacgtcttgtttatcagtaatgctattagctgctttaagcagataagtgaggaaagggaagccagtgtctagaaattgcttacaatggttctcattactgttatattttgttggttgtttaacaacaaagttctcctattgaatagcataattatatttagttcctactgaatatagcatattgaggaaaaagaaatctttggaggggattgagaaaaatatagcataattaggaaaaagaattgacacatctgaaaagaagggtttgagataccgtttatgtctttgatgatttaaactaaatgccattatctctatttggcaggtccatctttctccatcttaagccggaatttcatggagcactgtgtcttaggcactgacaacttccctcggactctactcatgtacttgtccaacacacctgattctctttccaactacttcccaactatcctctgcaacacggataccttcaaaaagaccatcatgaacaacaacttactctacctagcttctaacgacacttctaaagaaagataccatcagcttgatcacaaagagttcacagaaatggttgactccggagcagcttttgcaagaggattcaggtacgacgacactgtccttgatcgcatcgatcatgaacttctgggacgcaaacctggtgaagttgtgcctggtggttggtgtttaggagattctagtaaaaaccgtagctcgtgttccgtctggggtgactcgggtatccttcggcccggttctggttccgataggctcgagagacgaattgttgagttactatcaaacgattggttcagattgcaccaatgcgtacctgaatgatcggatgatcctcaccgcactttcaatagagtaaatagttgtccaagacacgaagaagataacggtactttatgcttctgtatctttagagagagttccacttctacattgtaacctgtgactttgagagtgtttgttccattgttgttgtagaaaaaccatctcaaagctgagaaatgaaacgactcggttcattggttgaagtctaaaccggtataaaatcccggttttaatctaatctagaccaaaccgtgtttcttatatatatttgaatccgtgatttacgcacgactggttaaagcagaatg

SEQ ID NO: 15169 - DNA, 3000 bp, Unknown
  misc_feature (1)..( 3000): cDNA_ID_3094950_gDNA_ID_2926078_Annot_ID_196284 3000 nt of promoter + ATG
aaagccatacgcaacggtattaacggtaaatttgctatagttccacatacaaacattatgtgtgagtcatttggattgtacgtttggtattcgggtcgagctatttgcatgtggtgaggttgtatgaaactatctgctaaaaaacatttagtcttacgaggccagaactagtcggacatttaccctgccactaaagtaaattaaggtaaacctaatttcagaagctattaaacaatgttttcaccaaaagaacgactaaaattagggagacagagcactaagtaataattagggattcttgtaataaaaggaaaatatgagatatacttaacaaataattaaggacagatagaggagccggattaatagggaagttcacgtgaaggcacagcttaaaccagctgagccaaacacatatactaaattctcattctcacaaacaaaaatcgtgggtccaatcttgattatgtggctgtaaaacctaaaaacataaactattcacatgaataagattttgattagacaacagtcttacttttgtctcttcctctataagattaatctgacccttgagccactcaaaaacaggtatgtctatattcatttcctaatgtgacatctacacacatattatctcttttttttttaatcatgtgactgtagaaactgattagtaaatagtaataggaaaacaaaatacttagtatagagttatatagagtatagagagagggatgggtccaaatagttgatgatggaccatgtgaaaaaaacaatgaaagcccacaccattaattgtggtaaaggatgagaatctagtgttgtagttttccatgtccttaaacggttaaacctatcttctaacaaaattctccaccttcccttctgacatctcccatcacttctctcttaatttattccatccattccaccaaatttttagtttcactttttttactgtagtgtgtttacacttgtgagtgagtgaaaaagtaaagctagagaggttactgttttgagatgctctttttagaaagggccatatataaatggtagtgtagtagtactagtggagcttcttcatatacaattttgacttctcttcattgaatgtaggagagaggctctttacatcataaataaaacaagaacacagctttcagagagatagagtgagattctccttcattaacatattcttcttcatgttataagaagaagaagaagaagtgtccaaaaggattagagatgggtggatgcacaagcaagcaagagaggagaggtgtgagaagtgtgaaggagacatcaaaagaccaaagcagaggaagaagacacctgataaaagagagagatgagagagagaaagtgatgtttcttcagcttaaagaggcggagagagagtggagaaaagagaggaagaagctgagagaggaagtgagaagactaaggaagaagctagaggaaagagaagaagcaaagacaacaacaacagaggaaagagagtattggaagtgggtggttgaggagatgtgtgtagagagagcagtgagagatgaagccgttgagaaatggaaacaactctatttagctatcaagaatgagcttgatcatctcatctcccacactacttcttcctccggtaaaataaactcaacttatttcaacttaaaattagaaaaagtaaataggatctttaaagtgtgtgtttgtaggagaagcaatcatgcaaaggaaacttgaggaacaagaagaagaagaaacagaagcaaagagagttgaagtattgagagatgaagttagagttaaagaagagacagttgagacacttgaagagcaaatagttttgatggatagacaaaagtatgagaaagaaagagagattgacttattgagacagagtctaaggattcttggaagcaagaagaaaaagaagacaggatcattcgcatcaatgaatctgttgatattgaagaccaaatgtgtcgaatgtacataaacactttttactcaaatagtcttctgcaaacagtcatatctcgtcagagaatcttgatccacaatgtcatatttatttctcttttggttattttacaatttttattttggaaatatagtaaatcatagcactatgagttcaaaaagcacatgtcccatgaaagatttgcacaaatcgtttttttttttttttgttggagttagatacaattctttagcaataatgataatgaaccatttttccaaagaacagaaactgtggaaaaaaacttactagacactaaaagtctaaaacaccacttgcttttttatagcccaagaaacttctagttctaattaagaatgtccaacttccggttcggttactgaaaattatcaaatttttgttagatgagataaagaagtgaatcctacaagaaatatatcatgtggttcggtttggtacaattttgatttctgctagggttttatcctttttagcaaaatttactttaatttccgtagtaaaaaagaagaagttttagttggtttatttcttatttttgcttcgattacggcatttaattttagcaatatttcattaacaaaaaaaaacaattctaattggtttatttctacttctttttctgtcttggtttgatctctattactatattgattatgaaaaaaatatgaaaccaaaaccatttattatgtcttcaattccatttttaacccaattatttcactacaattgtaataaccggttattgcacccctaattataactatttaagcaatcgcatataccaaaccagcgagttaaaccaaattgtttcccaaattatgctaaacgacagcgttttcacaaattaccaaaaaaacctatttttctgtatctatctgaattcagagtcctgaccattttatctcactctcacaaagtcttcacttttgaagtgtctcctccacacgcactgcgccgccaaaaaacccttctttaaaccctttcctcctcgcgccgtc

SEQ ID NO: 15170 - DNA, 2388 bp, Unknown
  misc_feature (1)..( 2388): cDNA_ID_3094882_gDNA_ID_2926078_Annot_ID_196300 3000 nt of promoter + ATG
gtagcgaacaagcgatcctgagagagatcagagatttccgacgatggtgaaccaaatccagacaaggaagaagatttgatggaataaattcgattatttatatgattttttgtacatattgttttgggtccaaaatcgtaatttccataccatcgaaatttctaggcctagactttggttttcttttctttattatccgttgggttcggtttactgatttttttggttttccggttttcctattttgagggaaattaatgtacattttcggtttgttaaaaatccggtttgggggcaccaaattgagacctatgtatgatttcagtgctttttcttgatgtgattttgagtacaatgaacttagccattttttactttttgttttggttttaattgtatttgtgtttcaatgttgaatctatttatagccaataatatctaatactactaatattatactaccaaagtattggtcaataaaaaaaataattaaaatacatttgcatctaacatatattgactaaattaataatttaaaaagtattgactcatactacagtaaaatatttatataatgctatttattttgtaaagtactagcataagcttgtcattttttaaaatctgtcactactaattttactatgattattttcaagttttataaagacactacttctgttgatgtatgacatgttgttgatttttatgatatatatatttataagtgaattattaataaaaatcattagaatttgcacatgactaaaacagagcattgtatataccatgaaacaatataataaaaatgggattgccatgtgtatgacatgatatattttattaagtttaaaatataatatgtattaggatttccattttttttttttgtttgacagcagattttccattttctaaaaacgcctactcggatatggattaggaaatagaaacagctctatctgactatctcctatatatatagagataagtttacatttttactcaacaaaaaatacaaacacagaagagagattaacaagtttatgataatgcatacgacgaacaagtatccgataaaactccccaacgattgctcgcagaaagagtttaagcgagcgttggagttcgtgaagaaagtaaaagagattgatgaaaaaggaaaccacagaggaatcttccttcgatatactactgcaatgaagctttactattctggatctttgagcgaagtcgatctcaaaaacagaatcacgactattttcaagaactgcgacgttttgctcgatgcctttgatcgatttctggaagattcgaattccagttctcgtcaaaaggaagtttttgttgatccaaagaatgttaaacgaataaaggagttcttaaagtcgttgagaagagactgcgaggaattatgtggagtgcttatagaggctttcgtgaggttcaaggaacataacgatgtgcagattttaaaagatgatgttgacctaatgttacgagattatcctcgtctaaaagaggagtttaggatgatcctactcgaccacggtttaatacaagatgagaaacgagatgagatgacgcgtggggaagaggacgagctgttcaaagatgatatgtactttcatgccatagaatcggccattaagtttgcggtggcggaggataatgagaagccggaggtgggtgtttatggagccattagacggttttacaaacaacgacgcagaaagttgccacgaggaatcatgaaagatccgaaacttggagttagaagaattttaccaaatttgcagaggaagtacaacgagttgctcaagaacagaacaaagtcgcttgagaaagtgcgaaaagtgaatgaatcattggttgtttttgattgggtacggtagaatgttgtgttttttttttgttaagggaagtatttggtttgttagggttaattaggatattgtgtctactattctatttagattgatatttggcttttgaaacttgattaacataatgataacttataaaccacatgttcaaaacagagagattcctaattatgaattgatttttactgtatttaattatgaattgatctgaacttagggacagtggctagtggcctatatcagcacgtgacactagccacgcgtagcggttccgctccaacaaaaaagcaaactcgctatctgtccaatcaggaacaaccacgtcatagctcctgacagaagtgaaaaagacgaaactatccaaacttatggatcgtatttacaaagtcaaacccaaatctgagtcaaaaaataagaatctcaccgttccttacttcttcttcatcttccctcgaaaaactgagaaacattttctttcaaaagagagattacaacaaccatg

SEQ ID NO: 15171 - DNA, 3000 bp, Unknown
  misc_feature (1)..( 3000): cDNA_ID_3094887_gDNA_ID_2926078_Annot_ID_196298 3000 nt of promoter + ATG
ccagatataaaaaatcttatctaataattaataaatctaaaaagtagcacgagaaaggaaacaaatttcgaaaatcaatgggttatgtgaataaaaggaacacaatataatatttgttttggaaaataaatgaaatctaaaaattatataatagggatcacttcggattataatgagatacatgagagattggcgggcacatattgatgaaattttccttgtgtgattatattttatatatagccatcaaccatttgtgacttcttatgaatgaatatccataaggatttgtgagagatcaaaataaacaaatgactatatatgtccatggcgtagaaaaataagcacaagaaagataagaaaactaaacgacataggataaaagaggaagaaaagagagctcggaggtgaaaataatcatacttttatttttttgtgacttcttatgaatacataaggggttttataactacaattatatcataaagtttaagcatactctaagagtattatgatatatatataactcaacgatacaataacacaatgcaagttgttttgggaatcaccatttatattgcttttggtatttatgaatagaagcgacgtataggtagaaaccatcaggattgatttgccatagacaagaaccatcgggtttgcatcttgatttgtctctatcgagatcaaagaggacgaaaggagtcattttggccgatgatgagaagatgacgcaattccatctagttgattggtcggtgtcaaacataagcacgtaagtctcacctcgaaataacacctgagacgaagtatctaatttggacgaggtgcatcttatggtgaacggatgagagtcaagtgcaaggttgttggttacctttacggtgaagactggagccgtgaaagataacgaagaagtaaaggctaaggctaaggagacaaggaagaggctatatgctttggtggatatcatctttagttttgttttacacactatatatcaatattcgagtgaatcatatatatatataagaaacttctttgactcacaatgtaatgatcttaccatgtaatcttttaataataaaaatgagtcaagtcaagcaatgagtcaagtcaagtcaagaaatttatcaaaaggaaattaataatgaaatatgcataaaaggaccacgaatcagaaaagagttaacaaactagccatggtatgagtgtacaccatcgctcttcgattacaattactcgtatacccatttaagcattttatttgttgaatgctatttgtttctggcataaccgtggggattacaaaccgggatgacaaatagagaaagaatgcgaataagcagaaaatgttaggatacctattctataagaaaacaagaatttgttgacaaaagaaagaaagttcgctaaaagagttatttagtgtctcaaaataaagagatcattgtttccacaaatagctagcatataatcatcaaaaatacaagaatgagatatttacaaaaaaaaataaaaaaaattaatacattttatcacaacacactagtgaactaaaatccatagacatatacaccatcagtgatggtccatccccatgcgagtggattacaaatatataatttaacataagtgtgtaaacggagaaaaactaggtttacaagcgttttcttttttcctaagacggaggtgatgttgttgaagtgttacgttggaaactgtatgatgacgaaactctatcaaaaaagacgaaaggatgatgaaacgcaatggttaccacaattatttcagattttaagaatgagataatttcataattaaaaaaaaaaaaaaaaatttatgatgatgttaagtatcggttcttaaagtgataacatcgagttagccaactttcgtatatgtgatatgaagaagaaaaaaaattgaatcatacgtatgttttcgttacgacacctaaaccaagttcttttctgtgatttcttcttatgaactaaatcatatcataaatttaaaaataccttagaaatcttataattatattatattatacgactgaacgatacaataacacaatgcatattgtttggtgtatcaccaattgaattgcttttggtatttctgaatagaagcgacatataggtaaagaccatcaggattgatttgccatagacaaaaaccatcggatctgcatcttgatttgtctctattaagatcaaagatgacgaaactactctttcttgctcccgatgagatgtcacaagtccatttaactgatcggtttgtgtcaaacccaaactcggaactctgaccttgagatacaacagcagaccaaatatctttttgtggcgagatgcaacttatggagatcggattagagccaggtgcaaggttgttgcttatctttatggtgaagactggagccgccaaagataaccaagaggtcgttaaggctaaggagaccaggaagaggctatatgctttggtggatatcatcttttgtttgtatcaatatttgtgtgaattaatcatttatataagaaacttatttgactcccatatatagtaatgatctaattaccatacataattatcaaaaagatagaaaaagagtcaaaatcaataaattagtaactaaattaaaaactgattcttaaagagtactctaattaattagagagaaatttacaaactagtgtttggtagactattaaaaataaaataaaatgaatcaacaccatttttcattctcttcaagaatcccattaaaagtcaaaaccatgtttgggctaggaaaaatatgtttgggctttagtaggcccaactacccaaaataaccacataaagtaaacggttatcattaatgggcggttactaatacttaataaatataaatatagttaaattaatatcatttctagagcttatcctaatttctctccctttcgaaaatcgaaacaaatcggtgcgattactccgttttgaatttcaccggcgacg

SEQ ID NO: 15172 - DNA, 3000 bp, Unknown
  misc_feature (1)..( 3000): cDNA_ID_3094899_gDNA_ID_2926078_Annot_ID_196295 3000 nt of promoter + ATG
gggtcgggtcgtagatcatcgggtcgtccggtgtaggaagatgaagagtactgggaagaggaagagagagagaggaggaaacatagagagagaaacgcggtggtgaggattatgtaaagagtgactctcggttgctccggtgtgtgctgcattttctcacggcggcgcgtgaaacttcgacggctagagaagaaagctaactgtagtatgtaatggtcacagtacgcatcgaactctgaagatagaatctttttttcttatatagtttaattaattatgtagcttattacttaatggtaacgactaacgacgatattattactaaataatttgattctataatttccattacatcataacactgaatagatgattttattacacattttacaaatttgtaataatcaagttcttgagcggcttcttcgccattcttggtcaaaattttaatatatgagagaagagcaattgcagcatattttcactgaaatggtcaaattccaaatatttcaaaaaatacgtctcaacatatgtaactaaagcaagacaatatatcttgcaacgactcaagtactaataaacttatgtacaagacaacagaagagcaagcatgaatgatattgggttgttctctattgatgaatggatcaaaagttttgtgtaaaaaaataggaaagatctaagctaatggaaacgtagcttaccaaaatgttctcgtactgaatgtgaatggccaactaagcagcgacaaaaaatgtctacccatcaaaaataaagtatgtgagatcatacaagcacaagatggtgtggaagaaaagtaattaatcaaccatttgggtcagataaaagattttatgttgcttaacaagcgtaactacatttatacatatttataaaagtacaaaatacacaagcaaaaagaatacaaatcgacacttaataaccaatttccaagatatttgagatcaatgtcaatatcgtatcatcatatacatgaacatacatttcaattgtagatttatgtgtcacatcgttagccaaaatagtatactaactaatatgaagtcttgagcatatattgatcacttaaagaactgctttaagatatatcttccttaccatcatcaactcaccataattcaacataacatttgatagatgagcttaaaatcttaagaagaacaaaccaaacctacatcttataacaagctagttagtatttgaccgtcaatccacaagtaaacataaatcttaacgtatgagactatgagtaagcatcaacacaatatcagatttgaaacaaaatggttttgaatggtaatctcgcatcgaggatagaccctgaaattttggtggtctaaaaattttctaaaagttttacaaatttgggagcctatgtataaaagtaaaactaaattagaggcctttttgtaaatacatgttttatggaaattcacaaaccattgtttctcctatttgtttaaagacgacactgtcattgtgatatatcgttttgacaattaccgattttaaaaacgttattaaaatttttttagcttttagagatacaacattatggtcagcaatgaaagctaacattatggttaatgaacaagaggagaacataaatgtcaaaaaataaacattaagaaagtggtaacgtttgattctaatgaattgtgttactttcatgatataaattgaatttagatcgaatcttgtctttgtttaaccaaaacaaaaaaaatctaatcaatccaatttgagagagaagtcataacttttttaacacattgttgacttaagtatcttctaaagatatattcaaatcagatttattttctaactataaattacaaaaatgttaattaaagatttctaatgttgtactccctccgtcctactaagatgaattttttagaaatttcacattctttaagaaatattgtataaagacaattttaacctcttaatatactttaaaaataataataaatatttatctaattatttagtaagggtaaaacaggaaaaaaaagtttataacattaagaagatttgaataacattaaaaagatttgaataattagaatcttgaacttgacaatatttaaggtaaatcgcatcaaaaaaaaaaaaaggttatcccttaattttgaattcataatggcgtaattgtcacaaactcacaactgtgtaatattcacacctttatttttaattataggttttttattttaaaagtaatgaaattcacttttgctttcaaaataattcatagtgtagtgcgcgtagatcatacatatccccaatctaccccgcaagttgcggtggcaattttcataaagtcaaaaaagtattcaacacgtgtcgttccactattcgtccaacactcacgccctcgtaatcctattggttcatatgcatcaccctcttggtcactcaattatattatcacccttcaactttatccataatcacgtgaatgccattacactaaaaacagtaatcaaacttttttatgttaataaaataagaaaatctaatgagagtataagatcaaaaagcgtctatcataagtacggtcgatcttctccttctattttataaggtccactgaagtaaataacaaaacaacgactcacttttggaataattacactcacaccattcaatcacgccgttgattttggtgactaatattaaactcagtggaccgcgttacacttgattgtggcttcaatatacgttataggaaaaagtgaatttaaaaggcaaaggaaaaaaaccattttgtgtcatccccttccccacttccaaccaaaattaatttaaaatgtcaaatattttttcattttcctcttttcgaaattaaagaaaaccctaaacgccgttgtctgatattgagagagagagagagattaaaaacttcttctggttccttttatcaacattttttctctctcttaaaacttcgaagcgatttttgatttacagact

SEQ ID NO: 15173 - DNA, 3000 bp, Unknown
  misc_feature (1)..( 3000): cDNA_ID_3094904_gDNA_ID_2926078_Annot_ID_196294 3000 nt of promoter + ATG
gtattaaagagaccgaaggagtctgttggccgtaatccagttttccggcgagtaatattcctcggtggttgcgtatgttcgtcgtcgtcttcttcctcttccggtacagagaagttcaaaaggtcgtccatgaatgattccatttccatagtctgtaaatcaaaaatcgcttcgaagttttaagagagagaaaaaatgttgataaaaggaaccagaagaagtttttaatctctctctctctctcaatatcagacaacggcgtttagggttttctttaatttcgaaaagaggaaaatgaaaaaatatttgacattttaaattaattttggttggaagtggggaaggggatgacacaaaatggtttttttcctttgccttttaaattcactttttcctataacgtatattgaagccacaatcaagtgtaacgcggtccactgagtttaatattagtcaccaaaatcaacggcgtgattgaatggtgtgagtgtaattattccaaaagtgagtcgttgttttgttatttacttcagtggaccttataaaatagaaggagaagatcgaccgtacttatgatagacgctttttgatcttatactctcattagattttcttattttattaacataaaaaagtttgattactgtttttagtgtaatggcattcacgtgattatggataaagttgaagggtgataatataattgagtgaccaagagggtgatgcatatgaaccaataggattacgagggcgtgagtgttggacgaatagtggaacgacacgtgttgaatacttttttgactttatgaaaattgccaccgcaacttgcggggtagattggggatatgtatgatctacgcgcactacactatgaattattttgaaagcaaaagtgaatttcattacttttaaaataaaaaacctataattaaaaataaaggtgtgaatattacacagttgtgagtttgtgacaattacgccattatgaattcaaaattaagggataacctttttttttttttgatgcgatttaccttaaatattgtcaagttcaagattctaattattcaaatctttttaatgttattcaaatcttcttaatgttataaacttttttttcctgttttacccttactaaataattagataaatatttattattatttttaaagtatattaagaggttaaaattgtctttatacaatatttcttaaagaatgtgaaatttctaaaaaattcatcttagtaggacggagggagtacaacattagaaatctttaattaacatttttgtaatttatagttagaaaataaatctgatttgaatatatctttagaagatacttaagtcaacaatgtgttaaaaaagttatgacttctctctcaaattggattgattagattttttttgttttggttaaacaaagacaagattcgatctaaattcaatttatatcatgaaagtaacacaattcattagaatcaaacgttaccactttcttaatgtttattttttgacatttatgttctcctcttgttcattaaccataatgttagctttcattgctgaccataatgttgtatctctaaaagctaaaaaaattttaataacgtttttaaaatcggtaattgtcaaaacgatatatcacaatgacagtgtcgtctttaaacaaataggagaaacaatggtttgtgaatttccataaaacatgtatttacaaaaaggcctctaatttagttttacttttatacataggctcccaaatttgtaaaacttttagaaaatttttagaccaccaaaatttcagggtctatcctcgatgcgagattaccattcaaaaccattttgtttcaaatctgatattgtgttgatgcttactcatagtctcatacgttaagatttatgtttacttgtggattgacggtcaaatactaactagcttgttataagatgtaggtttggtttgttcttcttaagattttaagctcatctatcaaatgttatgttgaattatggtgagttgatgatggtaaggaagatatatcttaaagcagttctttaagtgatcaatatatgctcaagacttcatattagttagtatactattttggctaacgatgtgacacataaatctacaattgaaatgtatgttcatgtatatgatgatacgatattgacattgatctcaaatatcttggaaattggttattaagtgtcgatttgtattctttttgcttgtgtattttgtacttttataaatatgtataaatgtagttacgcttgttaagcaacataaaatcttttatctgacccaaatggttgattaattacttttcttccacaccatcttgtgcttgtatgatctcacatactttatttttgatgggtagacattttttgtcgctgcttagttggccattcacattcagtacgagaacattttggtaagctacgtttccattagcttagatctttcctatttttttacacaaaacttttgatccattcatcaatagagaacaacccaatatcattcatgcttgctcttctgttgtcttgtacataagtttattagtacttgagtcgttgcaagatatattgtcttgctttagttacatatgttgagacgtattttttgaaatatttggaatttgaccatttcagtgaaaatatgctgcaattgctcttctctcatatattaaaattttgaccaagaatggcgaagaagccgctcaagaacttgattattacaaatttgtaaaatgtgtaataaaatcatctattcagtgttatgatgtaatggaaattatagaatcaaattatttagtaataatatcgtcgttagtcgttaccattaagtaataagctacataattaattaaactatataagaaaaaaagattctatcttcagagttcgatgcgtactgtgaccattacatactacagttagctttcttctctagccgtcgaagtttcacgcgccgccgtgagaaaatg

SEQ ID NO: 15174 - DNA, 3000 bp, Unknown
  misc_feature (1)..( 3000): cDNA_ID_3094978_gDNA_ID_2926078_Annot_ID_196278 3000 nt of promoter + ATG
ttagcaacgatctctctagggttatagtttggtatgaacgtgctccacccagttccaatgccttcagcgccattgacaagtacagttggaatgatgggcatgtacctaaccaacattaacatgttaagttaactagtcttaggaaaaaaaacaactaattaaggagcgcaaagaattaccaagttggctctatcctttgcccgtcttcattcaagtaatcaagaaggagatcatcatccttgggaaacaagatccttgttactggagagagcttagtgaaaatgtatcttgcactagctgaatcttttccaccctacaattgtgtacactatgatgagtacaagcatagataaatgacaacagttggtctattagctatacttaccgaagttcgtgtaccaaattgaccatttggtagaagtaagttgatattgttgctgcccacgtaatcctgcgccatgcctatgatagcactggcaagactctgctcgccatgatgataagctgacagcaatgatacataaccaacgagctgggcaaccttcatttctttacgagcgattttcttgaatgcaacgaaaagtatctttctctgacccggtttgagcccatcaaccattgagggaattgaccgttgaagatccgccatggagaacaagatcagttctttgttcacgaagtcactgtacgtaactttcggttgtctctgatcaagatgattgccaggctgaatggaaaataggaaatcagaacaggcagatgtagtaagcaataaacacacgtttttaaagataactcaatcctccataccacatagctcgaaagccaatttttccgggcttcgatcttctttttactgaaagcaagttcaatggcttctccatcttgttcatcctcccaaacaaaatcctttttgtgaagaccaagattactaaagtactctttgccctcctcagccgtacttgtacccaacccctggagattataaggacaattagtaatgcaaacttgcagagaacatgagcactttcaataagttcttcctaaatagttatagcagagagcaaaccttgtagtatttgatatcccacccggttgcattacccttcagactttctttccattcttcgtattcaggcattgagtagaatgacagaactttttttgtacccttacgcgtagcctgtgtaaaatatattcagggcagttgttagcattcttatatctactatgtcaagcactataagatattataaaagaataatgtttttgtacttaccttcacaatgggtgttataaactcaaccaggaatgatggaacctggagtaacgacggccaaaaagagtggataaaattgattaagagaccctttatatgagaaccatcatgatcctgcacaaggtagagagggagatttcgtcaagaacatatccatatagaataatgcactgagtgtaaagttagggagtagacttttaacatacttgatcagtcatgatcatcatctggccatatcttaatgagttaacattctcgtacttcatattttgctttagtccaaggatcttcttgaggttctcaatttccttattgtttgtaatctgagtggtgctggcttccctgacattcaatagctttcctcgaagcggaaacacaccgcagtagttattacccaagacagacctccccgccaactgaccataatgagtattaggagttttgttatcaaaatagggaggtagcagaaactatagatcaaaaccacttacagcgagagattttgctgagtctccttcagtcaaaattaacgtacagagtcgagagttcttccctccagcttcggcggcatcgtctaacttctcaactagaaccctccctgttttggctccatcacttttctttagatctttgttctgcttgaaatctgcccatgaaagcaaattctccactacgccagattttccaactaaaacaaacattacataagaaaaaggggttaatcacacttctagaaaccagttacatcacttatccaaaaagacagatcgagcacaccatacctttcttcagaaaatcttctgaaagttcacatttcgacccaaaactgctctgtcgaagagtcagtgtttcttttgtttgagaatcaaaagcaggattgtcaatcaatgcattgacaaagacccacagatggtttttcacattatgggccttaacatttgcgtttttattctttttgttcacagcagccacaatatggtttgtaatctgactcgtcacatagtcaacatgtgtaccacccttgattgttgctatggagttgacaaagctgacctggtagcagcagaaaaggttgttaagacttaactcattcttcataacaacaaaaaataataacagccaaccaaatacatacctgctgaaattgtccttcacttaagctcacacaaacctcccatctatcattaactttctcagtcaacctaatcacacaaaactcaaaaagatcaacatccatttcaagaaacacaattataatcactgagcaaaaacaaatcatagaacaaaccttgggagaggatcctccgtcctcgatttattagctgcacttaggtataggtcaacataatcagtgaatgacttcactggtatttgtttcccattcagctcaactttgacagacttccccaaacatccagcaatatcaaacactcgcttactcattagagcaaccacatcgtcttctaattcagtcatgttaaacttcttcaaatctggtttgaatgtaaccttcgtccagttctcactcttattacacttggttataaccggttcagatttcttccccatgttgttctcaaagacctaaatcatcaccagtaaaagttcagttcctaaacgaatcaattacgcaacaattgaaacatcaacaacaacacagaatcataaaacaactgtatcaatcgaaatcagatcataaaactcaacgaaggccacaaatg

SEQ ID NO: 15175 - DNA, 3000 bp, Unknown
  misc_feature (1)..( 3000): cDNA_ID_3094966_gDNA_ID_2926078_Annot_ID_196280 3000 nt of promoter + ATG
attgagcaagagagaagaatcacgtacgtgacagagtcaccaacgttgccaccacactgatgaaacgacataacagcttgaaccttaagaccaagcttcttagccagctcaagcaattcattataacctccccaattataagttccaggagattccttctcaaccaaaccccaccacacatcaatcataatcccttcaacaccagcactcttcaacgcttgcaaactcgctttcatcgcctttcttcgattcaccgtgttccccatggtaacactatcaagcggcatcatcacaaacacaggaacacctcctcctccttctttctttccaccaatccctccttctctatacgttctctgttcttcaatggtcccgattccattctccaccgcgaaagctttacacgccaccgacagatccgcacgtgtcgcacctaaaattggactcatcggcggtgatggatctgttccgtgagccttgtagtttcgattcattgctttaggtgtcatcattctcgccgatggtggtgaaattgataacaacgatgaatctgtcatttcaccggatttgatcggagttccggcgagtactcctagctgatgcgataaattaagcgccatttttctctctatacgcgagaaaacgaatcaagaatcgatcgtcagaatattccttttgacaaatttcaaattgtttttttgaaatcggaagttttgtgtgacggaggagagatcggagaaggaggaagagaagataatttataggggaagcataaaaaggataagattaaaataatgttttttatagaataggtgatcgtgtgacacgtgtataaacgtatgatgtggataaagacacggttaagatctaaaagagtcagaatggacggtggggttagcagagcgcgtgaactttccagcagacgcgcttttagcctcagaatattttttgtggttaccaaaatagagttttattttatttattattgttaagagtataaatatgactcacgagtttataggtgagataagcctttttcttacaagcaaacggtgatagtgttctacaacgttctctttcatgaaacgtacgtttttcatattggtttgttatgtaaataaataaatatatgaaggaaacaaatatgtatgtaaaagtgaatatatacaagtagtgttttcctaacgagtctctaatacgttcgtctattatcgttagaacaaatggtttaggtgttggttcgagttatttcgagaacatttagaagctgacctatgaatcgctttacaaattattgctttttgtcaaccattaaaaaaattattgtttcgaaacttgaatgctttgcgcaatccttgatttgttttggctgtcttgtagaggcttttgggatcaattgaaggggtgaaatgtatttattaatctacgcatgtacaactttgagcagaaaacaaggtatcacagtggatacttagatactaagtgaagtagagaattagagatggtcacattatttttattccacgtgagatcacatgatgtacaagaatatgaacatataagcaaattaactagtttctgctatgtctatgagtatattttagagaatacgaaatcaaatcaatttaataactcattatagaattgtatcgttgaaataggtatgtcagtttattagggtatatttttagactgactttttttttttaattctgatgaatacaagtagttttcgatttttcttctctacaaacagtttttttttttttaaaaatccttcgattcaagtcaataatctaatatgcaatatttttttatatatgtacacaatactttaaacataaaaaggaatatccttgacgaaaaaagaagaaaaaaatgtctaacatagattaatagataatacacggacacaaaacaacatgcacgaacaaacaaaatgttgagtggtggagaaagtaaaccaatattgaagttttcctctgtaagcttaccacgtgccatggtgatgtggagtggcaagttcccacctttttgggatgacttttcctgagtatttaaatcaatccaacggctgggaatgaaccgattcgttgctcgtcaaatcttttaggacaaaaactgtttgccttttacaagattggattatggatttctgacaaagactagaaccttcttttcctttcatgaaagatcaatgattcgtttaaagagtaattaagatgtgaagtattattaatcttttacacaaaacgcaattagtagaaacagattatgtatttgtgtgacatgatattaagatcacattcacatgaaagagttgttgcaatccactttgataactgcatcaatcaatctcatccctctagctggcagtttcttcaccgttcttgatattattattgactccatttgatgtacaaagatatatccaagtatataaatattcgatacaatcggtacaataagaataactatatgtaaatatcaaaatctctaccctgaagtaaggaagattttttattggacattttaatgggggcagatttactgaaagataaaataaaataaagcagatgtggctactagagggtcgaatttgggagctgagggaacatactcactgatatataattatgattttgattaaatttaattaagttttttttttctttttttttaaaaggggaagtaaacgttacagattaaaattaaagagtcttctggttcaatacgttacgattggtcataataaattgaaccggaattgcaattaacttcaaccctctgggtcaaattgattcaaatagaattcaggggttaatgttgaagaaaagtataaacctcggggagagttatgtttctcttccgtttctctttcacctttcccatttgaaaattgaaatcgtcttctctgctttcaacttcacaactacactctcttcagttctctaacagtagcgccaaaatgaatccccaagactaaagctttcttcaatg

SEQ ID NO: 15176 - DNA, 3000 bp, Unknown
  misc_feature (1)..( 3000): cDNA_ID_3094961_gDNA_ID_2926078_Annot_ID_196281 3000 nt of promoter + ATG
actctatatgatctaaaactaaatcagtagaagaaaactaatgaagaaccttgggcatgagactgagaaagacgttcaatttcttcagaaactttggcactttcagcctccacagactgaagctcatttctcaagtactccaagtaagcatctgtcagatttccatcacttaatttcaccattatttgactttcatacttcatcttaatctcacaggaaacaacagagcaaacctgaatcttcaacatccaataaatcaacatcgccgtattcttcaacaatctctttcacctttggctacacgaaaacgaaattagcaatctaatcgaaaattagacaaatttgaaaaacggaaaagggttctcgaaatctcgcaattacttcaaactgaagaacaaaatcttgaaccaccagagtctcgtaatcggaactacacgattctacaggctcttctctgcaattccggggaaagaaatcgagctctttcacgcgcctgagaaaaatgagaacaaatagatgaacaaagcagcacaaaaatcaatgaaagaaagagacgaaagagaagtagaaaacctgcgaatctcttggagatcgagagatccgtcgtgggtttcttcttccattgaagaaagctttagtcttggggattcattttggcgctactgttagagaactgaagagagtgtagttgtgaagttgaaagcagagaagacgatttcaattttcaaatgggaaaggtgaaagagaaacggaagagaaacataactctccccgaggtttatacttttcttcaacattaacccctgaattctatttgaatcaatttgacccagagggttgaagttaattgcaattccggttcaatttattatgaccaatcgtaacgtattgaaccagaagactctttaattttaatctgtaacgtttacttccccttttaaaaaaaaagaaaaaaaaaacttaattaaatttaatcaaaatcataattatatatcagtgagtatgttccctcagctcccaaattcgaccctctagtagccacatctgctttattttattttatctttcagtaaatctgcccccattaaaatgtccaataaaaaatcttccttacttcagggtagagattttgatatttacatatagttattcttattgtaccgattgtatcgaatatttatatacttggatatatctttgtacatcaaatggagtcaataataatatcaagaacggtgaagaaactgccagctagagggatgagattgattgatgcagttatcaaagtggattgcaacaactctttcatgtgaatgtgatcttaatatcatgtcacacaaatacataatctgtttctactaattgcgttttgtgtaaaagattaataatacttcacatcttaattactctttaaacgaatcattgatctttcatgaaaggaaaagaaggttctagtctttgtcagaaatccataatccaatcttgtaaaaggcaaacagtttttgtcctaaaagatttgacgagcaacgaatcggttcattcccagccgttggattgatttaaatactcaggaaaagtcatcccaaaaaggtgggaacttgccactccacatcaccatggcacgtggtaagcttacagaggaaaacttcaatattggtttactttctccaccactcaacattttgtttgttcgtgcatgttgttttgtgtccgtgtattatctattaatctatgttagacatttttttcttcttttttcgtcaaggatattcctttttatgtttaaagtattgtgtacatatataaaaaaatattgcatattagattattgacttgaatcgaaggatttttaaaaaaaaaaaaactgtttgtagagaagaaaaatcgaaaactacttgtattcatcagaattaaaaaaaaaaagtcagtctaaaaatataccctaataaactgacatacctatttcaacgatacaattctataatgagttattaaattgatttgatttcgtattctctaaaatatactcatagacatagcagaaactagttaatttgcttatatgttcatattcttgtacatcatgtgatctcacgtggaataaaaataatgtgaccatctctaattctctacttcacttagtatctaagtatccactgtgataccttgttttctgctcaaagttgtacatgcgtagattaataaatacatttcaccccttcaattgatcccaaaagcctctacaagacagccaaaacaaatcaaggattgcgcaaagcattcaagtttcgaaacaataatttttttaatggttgacaaaaagcaataatttgtaaagcgattcataggtcagcttctaaatgttctcgaaataactcgaaccaacacctaaaccatttgttctaacgataatagacgaacgtattagagactcgttaggaaaacactacttgtatatattcacttttacatacatatttgtttccttcatatatttatttatttacataacaaaccaatatgaaaaacgtacgtttcatgaaagagaacgttgtagaacactatcaccgtttgcttgtaagaaaaaggcttatctcacctataaactcgtgagtcatatttatactcttaacaataataaataaaataaaactctattttggtaaccacaaaaaatattctgaggctaaaagcgcgtctgctggaaagttcacgcgctctgctaaccccaccgtccattctgactcttttagatcttaaccgtgtctttatccacatcatacgtttatacacgtgtcacacgatcacctattctataaaaaacattattttaatcttatcctttttatgcttcccctataaattatcttctcttcctccttctccgatctctcctccgtcacacaaaacttccgatttcaaaaaaacaatttgaaatttgtcaaaaggaatattctgacgatcgattcttgattcgttttctcgcgtatagagagaaaa

SEQ ID NO: 15177 - DNA, 3000 bp, Unknown
  misc_feature (1)..( 3000): cDNA_ID_3094955_gDNA_ID_2926078_Annot_ID_196283 3000 nt of promoter + ATG
tccggagttgtttcaggcggataactggggaaaattcgtagcgtttgtgaagaaaatgggtgaagggagagactcacatagatgtcgggaagaagttgagcgtgaggctgagcattttgtgcacgttactcagccgctggttcaagaagctgcagtggctctcactcactagagagatagattgtggcatggttctatggtttatgtttgtatgcgattataatgaaatggttatatgacaatgccaaaaaagatgtttaggcttgttggagcttgtgtatgtattgttagtaaaactgaaatgtatgccacagctctggtttttttccggtcaggttgtggcatgctactacttttaatatatgctaaaagatgtacatgttctttaatgaagccaaaataaatagcatttctttaatacatatcactctgaatcaataaaatgatagataaattatgtgtgtgattggtttgtctgtaactgtagattttttactgtaaaatttttgctgtatgtgtgatggtggtagctgtagattttattgctgtagaaattaggctgtaggttttattaatttaatattattatttgaagaaattggttgtagaaataagattatggttgtatgtatttttaaacaaaataatattattggtaaattgtacttatgtgttatataatagaattcacaaatatcaatttaatatatatatatatatatatacatttttgcagtcattttgtgaaataaatcatgaagttggaatttatttataatggttgccattggcttttaattattgttttttttttggcaataaattgattaacaaacgaaaaacattccaaatatatttcaatcccatatatcatgcagatttctccaaaatttgaactagattttgacaactatttaaaacaaaaaatgtttgacaaaccaaaatacaattgcaattccttaaaatgagcaaaacgcacctaaatacattttttacaattcactaaatcttatttctccaaaatttgaactagatttcggcaactattttaaaaaaaatttgtttgacaaactaaaatacaattgcaatcccgtaaaatatttatttaaattatatatttaaattagcggtgtaatgcaggtttttttacgggacgggtttggcaagacgaatttggaatgactttacttaataacaattgtaaactataaaataaaaatattttatagatagatataatttgtaaacttttatatatattaattttaaaaaataaattgtatccgcggtataccgcgggttaaaatctagtatattacaaaactatagtaatgtttttaaagaaatgagaaaataaagtgaaaagaaaaagagaaaaaaagggacagacattctaaagacgataaaattatgctttagaaaaacatgaacttacagacaaaataattaaaaaaatattatttgggctgtgagaaaaaatagaaaagctaaaacatgattgtttcaattttagggctttaacttttttaggtggtttaaaaatttcttacagcccaaccaatcatggcctatgtaatatcatttgtaaacagtaaacttataacagtagttcgcaatttgcaaatagacgccttctaagttatactttggtaggtgcttttgcagtgtgtatagtttgctaggtcgaaaccgtgtttcttattcattggatgggtgtaaaatgtaaaaacttagacagtaaaatagctaccaaaagccatacgcaacggtattaacggtaaatttgctatagttccacatacaaacattatgtgtgagtcatttggattgtacgtttggtattcgggtcgagctatttgcatgtggtgaggttgtatgaaactatctgctaaaaaacatttagtcttacgaggccagaactagtcggacatttaccctgccactaaagtaaattaaggtaaacctaatttcagaagctattaaacaatgttttcaccaaaagaacgactaaaattagggagacagagcactaagtaataattagggattcttgtaataaaaggaaaatatgagatatacttaacaaataattaaggacagatagaggagccggattaatagggaagttcacgtgaaggcacagcttaaaccagctgagccaaacacatatactaaattctcattctcacaaacaaaaatcgtgggtccaatcttgattatgtggctgtaaaacctaaaaacataaactattcacatgaataagattttgattagacaacagtcttacttttgtctcttcctctataagattaatctgacccttgagccactcaaaaacaggtatgtctatattcatttcctaatgtgacatctacacacatattatctcttttttttttaatcatgtgactgtagaaactgattagtaaatagtaataggaaaacaaaatacttagtatagagttatatagagtatagagagagggatgggtccaaatagttgatgatggaccatgtgaaaaaaacaatgaaagcccacaccattaattgtggtaaaggatgagaatctagtgttgtagttttccatgtccttaaacggttaaacctatcttctaacaaaattctccaccttcccttctgacatctcccatcacttctctcttaatttattccatccattccaccaaatttttagtttcactttttttactgtagtgtgtttacacttgtgagtgagtgaaaaagtaaagctagagaggttactgttttgagatgctctttttagaaagggccatatataaatggtagtgtagtagtactagtggagcttcttcatatacaattttgacttctcttcattgaatgtaggagagaggctctttacatcataaataaaacaagaacacagctttcagagagatagagtgagattctccttcattaacatattcttcttcatgttataagaagaagaagaagaagtgtccaaaaggattagag

SEQ ID NO: 15178 - DNA, 3000 bp, Unknown
  misc_feature (1)..( 3000): cDNA_ID_3094972_gDNA_ID_2926078_Annot_ID_196279 3000 nt of promoter + ATG
gaaacaaaccaatccatggcacgtccccacgacttgatagtaatctcttcctaaaagctcaccatcatgttctgagacgtagaccgttgacgcgttgtagagagaatggatgcagcatgacttgagatggtaccgagacgttgttatgactccgtaaggactcttcgtggaagtagttgccttcgatgtctccaagatcaaagcgtgtttcagagcaaacagagtctctgagatcaaagatctccaggagctgcaaacgcatttgaatcgcgtcaatgactttacgggtagtcttaagagaatctcttccatcatttcaagaggaagattatgaggtgagaacatctctctggtagtttcatccatgagccagagcagaggaaccaatagtgttgaaggataataaataagaaatattaaaaatcatttctttaggtatattatccgcattggggtataccggtatagcatgcacaagtggttgtggaaaaagaggagatgcatgtgtcaggataatgtaaattattaaatataatgtggatattatgtactttatgatataaatacagtatacagtatatatttagatatgggggataataaataatgccgtaaagatgttgacatttaaatgaaacttgaggatatgctaaagggtatgaccagaagacgttaaagtttgctacttatttacgtttcgtattaaaaattttggttcttgtcataagcaataagcaccaaagctccatcattaactacgatggaccgtggcagaaaatttccaaagtattataccaaaacaacaactttgtagggatatattgaaactgaagacaaatcataatggctttgaatggaggcagcggacaaaacggtccaatttggttgcggtttaatccatttcatttttgggatggacaataaacagctgcagactaaatttatttgtatgtataaatggtatgtagatggtccactgcgatttttttttttttttttttgtccggactactgcggattataattgatgaatgataaataaaaaacggtctgattcgttgacggttttgtccatcccaaccgttgtaaccattcaaacccaatatcttaaaaaaacgctatagttatggagttaagaaagtttttgttagacatgttttgggatgtttaaatggattgggttcctatatctacaaagtgagcaagctcaacacgagatccactaagcatagaacccgcaaatcatataatcaaatcaacgtacaaaaaacctcttatattaacaatggggtaagaatgggtcaacatttgctaattctttaacaaactacataaatgcaaaataaagaggatgttacaatgtctagtctacttagtagagtttttctagttcactctcggattgatcaggcctcctgggtactttagtatcaaattattacataccatataaaatgttatttttgcatgaattaatacgaacattttaccaaataatcaaatatataacaactttgatcaaagatactattaaattgatcaacttagacaaaattttgatattcaccattagttaacatatttatatgtaagtttgtaaaagaaatatagaaataatcaaacaacctaaaagaaatacgtaaattagaaaataacgttacaaaaatgacctatgtactagcaattttttattatttaatatttacaaaaaagacacttgctttaggttaatcacagccgtcaaatcttcccaatacgatcctcaaaattctgttcgtatagttaatcacagccgttagattccttataagaatgtaggctatcttctctcccgctcctaccccaaattcaaaattcgaattttgattcggtcaaacaccaaccgttgtaattctctctctctctctcttttcaataaatctcacttaaatccctattttcaaaaagctaaacgatacactcctttgtacgctcttcttcttcttcttcttcttcttcttcttcttcttcttcttcttcttctcctctctgtactttcgcgaaaaccctaattttctagatctgtttctctataatcgcctctctcactttgtagatccttcagatctactctccagtttctctctcagaaacacccaaccatggctaccaaacttccccttcaaaacagcaatgccgccaatgttgcgaaagctccggctaaatctcgagctgccgccggcgggaagacgatcgaggaaatgtatcagaagaaatcgcagcttgaacacattcttctccgtcctgatacatacatcggatctatcgagaaacacacccaaacactttgggtttatgagaaagatgagatggttcaacgtcctgttacctatgtacctggattgtataagatctttgatgagattctcgtaaacgccgctgataacaaacagagagatgcgaagatggattccgttcaagttgtgattgatgttgagcagaatctgattagtgtttgtaacagtggagctggagttcctgtagagattcatcaggaagaaggaatttatgtaccggagatgatatttggtcatttgttgacgagtagtaactacgatgataatgtgaagaagaccactggtggaagaaacggatatggtgctaagcttactaatatcttctctactgaattcatcatcgagactgcagatgggaagagactcaagaagtataagcaggtattgaatcgtttattgcttctgtgatgttgttgttgcatttgtggccttcgttgagttttatgatctgatttcgattgatacagttgttttatgattctgtgttgttgttgatgtttcaattgttgcgtaattgattcgtttaggaactgaacttttactggtgatgatttaggtctttgagaacaacatggggaagaaatctgaaccggttataaccaagtgtaataagagtgagaactggacgaaggttacattcaaaccagatttgaagaagtttaac

SEQ ID NO: 15179 - DNA, 3000 bp, Unknown
  misc_feature (1)..( 3000): cDNA_ID_3095127_gDNA_ID_2926079_Annot_ID_196312 3000 nt of promoter + ATG
agccgtccaagcttagcaggtaccgtgactctcactcaaaacatactaaagtcttagtttttttgtctgtgtgttcacagcattaataaacaaaagccctgattgattaggaccaagagcgctctcttacaattatctggacattgctttctctccttttgatgattactggaaagaattaaggaggatatgtgtgcaagaactcttcagtgttaaacgagttcaatcttttcaacctatcaaggaagatgaagtcaagaaacttatcgattcagtctcagaatcggcttctcagggaactccggttaacttgagcgagaagtttacttctttaactgtaagagtgacatgcaaggcaacatttggtgtgaacttccaaggaactgtgctcaacagtgacagattcgagaaactaatccatgatacatatttgtttttggggagcttttctgcctcagattattttccaaatggcggctggatcatcgactggctcacagggctacatgggcagagagagagaagcgtgagagctcttgatgcattctatgaacaaatgtttgatctacataaacagggaaacaaagaaggtgttgaagatttcgtggacttgctcttgaggttggagaaagaagaaactgttattggatatggcaagctaacaagaaaccatatcaaagcaatcttgatggtaactatacaacgtttctcattccatcattaagatatattgtagccctagatattctaactttttttttttttatgatcttacacagaacgtccttattgggggcataggcacttctgcaataacaatgacatgggcaatgacagaacttatgagaaacccgcgagttatgaagaaggtgcaatctgaaatcagaaaccaaattgggaaaaagtcaatgatcaccttggatgatatagatcagctccattacctgaaaatggtgatcaatgaaacatggaggctacatcctccatcaccctttctgattccaagacaagtaatgtctgaatttgagctcaatgactacgtgattccagttaagacacggctttatgtgaatgtctgggctatcgggcgtgatcccgatacatggaaagacccggaggagtttcttccagaaaggtttgttaatagtagcattgatgcgaaaggacaacactttgagctgttaccgtttggaagtggtcgaagaatgtgtcctgccatgtacatggggacaacaatggtggagtttggtcttgccaatatgttgtatcactttgactggaaaataccagtaggcatggtggccgaagatatcgacttggaagaatctcctggacttaatgctagcaagaaaaatgagcttgtacttgttcctctgaagtatttagatcactaatcacttaaactttgttttttcttgagattacaaaataaagtgtatacaaataaatcttgtcatttattactttttatttgttatcagttggtctaattgctagctcaaaagaaattattcaatattaaaggtgggcacgagaatattctggatttggtagtatttgtgatcagatttgctatgttcgaataattaattttatgattagtatttgcttcgaaagtaaccgaagatccggatgtacggatatccgttagaatcaaagatatttgctgatttgctgaatatctatcaaaaacaattataaaaattataatgaaaaacaaaatcagaaattgaatccaaattaagtaatatttcactgaaaaattatttctttttaatttttaaaactaatagttatataattaatttgatgaacaaaaacttagaaaatttacattaaaaagtgtaaaattataatatatatctgtaattatctacatacatatacatatgttcatgtacaacggatcggagcggatatccgcctgtttaaattttagtatttgttatttgctccgattttaaccaatatcatttttagtatttgatttgcctcgtaaaatcacggatatccgaatttttcgaatcaaactgaaccggatcgaacctaacgaatattttgcctatcccttatcaataaattgttttatataaaacaattgttttatataaaacaattgtttttgtagtatcggaaagaaaagttttatttgaatataaaagtaagttttactatagaaaaaaaaatttgacacaataagacaataatgtttttattattattactagaaatcaacccacacgttgtgtggatttattggtatcctatactattatagctatttttatacaataatcttgtcactcaattttatattttaataaattactcttatttattttaagtttttatatatagtttggatctaatactcttattttatgcttgttttacctattttaatattttataatgcataaagtttgtattacaaatttacaatcaaatacagtatttaattaataatattatactcataaatacttcatatctttttatatattattattaatatttatttattatacttaaactcttttcttatatattttttaaaaatttcatatattacaaatagatttgaattgaatgatatttttaatatattttaaatttattaaattaatattttgctgatgttgacaccttagatggagatagtattctctaattatatatatgatttaaattaaaaatattatactcataaatacttcatatttttgtatatattattattaatatttattaattatacttaactcttttgttatgtatttcaaattattctcatgtatagatttgaattgaatgatatttttaatattttttaattttattaatttattgttttgctgatgtggatattttagatagaaagagtactctaattatatatatgattatctataaacatggattacccgccagtcagaaaataattgaagacagcaacgtgcttatacattttttgaggtttcccttcagaaaacagaaatg

SEQ ID NO: 15180 - DNA, 3000 bp, Unknown
  misc_feature (1)..( 3000): cDNA_ID_3095096_gDNA_ID_2926079_Annot_ID_196320 3000 nt of promoter + ATG
gttcccggatctttcctcgacgataatcctagcaattctacgtaaagataacttgcatgagaatctaaccgaatcattacttctttgttaaacttcaacttgtcaccatgataaacctttatcacttgtgtttggtctcgttcttcagggtctgtatatagcacaactacgtacttcttaaagccctcgtaacgtttcagaagagttttgtcatcgcttgcgaatgctcctaccctcacgattaaatctgttgtttcgtcttcattaatttttcttttccctttgctaatcattagtcttcgtttcttcgccgctgcttgccccaagttcttcatcatctctagagaacaaagtgaattaagatttggagttttagggttttatatacaattatttcctcttttttctagggtttattctaaatatgtttttccttttttctttgcatggtgataatgatgaaattatatactccctctgtttctgaatatttgtattttaagggttttacacacaaattaataaaacatacaaatctcatttaatttatctcttacctagaaaaacatcattaattacaactaatctaaccaataaaaaaatatgatgtaaaatataattggttaaaaactattaaatatatttaatgtttgcatagaaaagtgaaaacaacacttatattgaaaaaaataaaaaacttttaaactacacttaattagaaacagagggagtatatgaaaattggtcaagtctctccacataaatgacatatcatcacacaacaaagtgacatatgtcattcgatgttttttaaattaataaaactaataaaattaaataagcaaattaaatatatcatcaattctactcttaattgatttctccaaaataaaaataaaaaataaaattatgtaaacaaattaagtactactttcattatactctttttattttattaattttttatcatcaataatcatgactaatttttttattgtgttgtaattgtttgctacctaacctcttattagtttagtaatttaattttgagtatttgataaccttgacattcaagttttttcaaataataaaccttcaaaatattagacctaccaaataatgtaatacacgatcatttctcttatattgatatatgcaatgacagacgatataaaagtattgactttaatgatactttaatttttgcattctttttattcttttcatatgaatactcttgaaatcttgttcagtttatatcaattctatatatttaatcatgagcctataacatagttgttggagtattatatctagaaaataaataaaaccataaatagtttatttataatcaagttgaacaattttcaaattatccaagacacgatcatttctctaatattgatatatgcaatgacaaaagatccaaaagtgttgacttcaatgacattcaatttttgctatctttttatctttttgtacgaatactcttcagatctttttcagttgatgtcaatcgaaactttaatcatgagtctgtcacaatgttgttgaagtacataaaacaaggaattgatttatttataatcaagttaggaaaattttaaaccacaaaaattacatagttacacagaattgtatcaaaatatcattattgttgttatatgtattcatgaagtgaaaaaatattaaaatcttacaaataatcagctttatacacacaaatatataaattgatatttcaagtcacaaatgaatctaaccataaaaattgtaactacatattatagatctaattttattaacaatacaagaataaacaaatagtaaatataaattagcataaagaacaatcaatgtaatttttttttaacaattttcataacaacgctagggtaatcatctagttagaattgatttagttatgaattatgatgtgtgatttggtgagtgtaagtcactcgcttctcatgtaaactataatatattgaatctcctctctcttctctttttcgcaactttcacagagaggtagtttttgatgtttgccggccggaatattttccggtgaatagccgtcccgagtggctcggacttctgcccggtatctttcagctttgatagtggagatagccggtttacgtctggcaaacccaatttctatgaatggttttggccgggtttttatcttttctcgccgtcgatcggtttataccgattgcttttcacttttatttcaataatttctacagatctgagttaggaattgatttttaggtactagatcctaaaaattaataattctggcttgtgattttggaaacctcgatttgcaggaaatctatcaagcggttatttcttggttgaaagattgaagaatattccgatgcatattaccattcccttatgttgtgttctttaggagttccgttcagtgttatttcggtggtaaacaaaaaaatttcgtgcgatgtttcgacgatattttcttcaccggattctgggcttctcgacggcaaggttgatgtcgttaaatttctgatgatgacttatcggcatgtgttacagttgaattctaaagtcaacacgtgttttcggataagagtccaacgttaagaatctttttgctgtacatgttactctaatgggctattgttgggctccaattttcttgctgcacaatcgttgtaggctttaagtcttgtatcttttgtttaataaaattcacttgggaaaaaaaaaaaaagtcactcgcttctacagcgcgtgatggcttgtttctccacccatctctccttcgttgagaagcatgcaccaaaaaaaaaaaaaggcttcaaagagaataaatcccaaaaaatttcaatctttacgcaaaaggaataaacatttctgtgacggtttcaaggtttcatcggaaccctagatctaatactttttcccgatttgaatttgcgatttcagatctgagagaattagtcaaattctgaaatttcaaaattg

SEQ ID NO: 15181 - DNA, 3000 bp, Unknown
  misc_feature (1)..( 3000): cDNA_ID_3095081_gDNA_ID_2926079_Annot_ID_196323 3000 nt of promoter + ATG
gcccatttattcaggcccacttgtacttaaatgacgaaattaccccgttagctgtcgaatacgagatatatcgcgtcgtttgctttcacttgtgtcttgtgtgttctgccaaagtttctctgcagcttctcctcttctcagaaattagggttccgtctcaaattacgagcagatctcgtactctctggtaatgatttctcgtttcttatactttgtttataccgaagtatcgattcgcttgcatgtctcgtcatctttgtaccgattctgatttgaagtttctagggtttaccatcgcgcaattacgatttgtagatatgttgtttgcgagtagagatcaattgaaattaccttcgtggatttgtctcgtaagcgcgaaccatgtttagagaaacgagttcagatttgcttcacgcttaattattgtgttgtagctgtgtatatcttctggatctgctgcgtgtgtttggtttttctgggagtcaagtcatattaacgttgttcaaaaacacttttggctgtttgttttagaagatgtctgaagatccggagtaccgttgcttcattggtgggcttgcttggacaacgtctgatcgtggtctcagagatgcctttgagaagtatggtcacctcgttgaggccaaggtaaattttttatctctctttcctcagtggctctctgttcttctggttactgaaacttagaagctttgttctgtttcgccttcagattcaaacactgaagctttgatatgttttgtaatttgtttgctttctgcaactctgtttatggtgaggcgtgtctgtttagtaactgacttcttttagtggctatcagctcttctgattgctgagacattgaagctttgagtgatttgttcattttcttgctctttgcaaatctgtttgtagtgttgtctgtttgataattttatttgaaatttatcttactaccttatttttattgccataactattatgagagataaaccttatctattgatacacaggtggttcttgacaagttttctggtcgctcccgtggttttggattcatcactttcgatgagaaaaaagctatggatgaagctattgcagcaatgaatggaatggatttggatgggcgaactatcactgttgataaagctcagcctcatcagggtggtgcaggcagagataatgatggtgaccgtggtcgagaccgtggatatgatcgtgatcgcagtcgtccctctggtgggcgaggtggtggagattgctttaaatgtggcaagcctggacattttgcaagagagtgtccttctgaaagtagtagagatggtggtggaaggttcagctcaaaggatgataggtacagttcgaaggacgataggtatggtgcaaaagatgataggtatggtgcaaaggaggataggtatggtgcaaaggatgataggtacagctccaaggatgataggtacagctccaaggatgataggtatggtagtagggatggtggaggtagtcgctatggacctgatcgcagtggtgaacgcgctggaggacgcagccgggatggtggcagccgtggagctccaggaggtgagaggcacagtcgtgctccatatgaccgccccagagctggtggtttccactagaattctactccaaagggtatgtatgcattctgttattttaactttttctattgtatcccttcaaagttaagttctggtaagacttttgttgaagtcgctttatatcttcttttgcagttaaagaagttgaaggtttctgctttcagctcgtgtcaagtcaaagttacgcttgatggtctattttcttcaatgtatttggatagctcgagaaagaagatgtgttctctattttggccctaaactcaagagtcgactatgttcctaaagtgctctctctccttttgatatgttgatccctatggaaaccttgtgcttggttggtttgagacaatttgagatgtgctactttatgcttatcgtaatgaatgcgtgggttatcccccaacaccaaatatgcaaaagcctcaggtacgtgattgatctccacggaatatccgaggtcgacatttggtaaaattcaaatgttgttatatatggggatatgccgtttattgattctggtaaacaatgatgcaggatggtctgatactcgggtttagccgtgaaaattaaagactgatctataaaacttgtgatgggattgggaaatatacattgctgattgatacttggctactggaactcaaacatcccttcatgagcaacaaattgtcattttcaggaaaaagattgactttgtgcaattttagatcttggcaagtcaaatccaatagttttcttcaactagggaaatttctacagccaaatggtctctggttggctcgtctagtatagctcactgggtttatcttcgatctattctttgtgggttcttcgtgcctcttcgtctactttgtttcttgctcgtgacctctacctctgcctttgattctcaagctctaaactccaggaattgggaaatggtgttaatgtatatatagttaatatacgcttgaataggtatccttactttgataatttgttgaaattgcatacataaataggtcacacgagttatgtcgggaaaacactgacttgattattttatacaagtgaatagtatatgtatggttagaacttagatgcatgactagttcgttcaccttctttcacaattttgtattgcatacatacatacattgcttaggtgaatatataatcaatttaccataaataaatgactttgtaagtctcataatttaagactttgtttctaacataaagaaagactttgtagaacatatgagttggtgtatagcttaaacgttgactcaattatttgatagaaatcgaatagcatagctattcgacgccactattcggttactcgtacctcgaccacaccaaattaagaacacttaccggaagaagataaaaggagaaa

SEQ ID NO: 15182 - DNA, 3000 bp, Unknown
  misc_feature (1)..( 3000): cDNA_ID_3095071_gDNA_ID_2926079_Annot_ID_196326 3000 nt of promoter + ATG
cactttcatttgtggaagatggtaaaaagtctcagccgcttctcgcgtatgtaaacaggagccatgaatatgttctatttgatccttatagcgatgaaaaactcgagactagcgccatagattatgaagtttttcttgcagcaataagcaaaaagaagaagagatctaggaagaaagcattgatgtcagagaaaccttgggaaacaatgttttgtggatcaacactcaatttcccgcctttccccgacttgtgcgcttcgttcttcagttcccggatgcagaaagaggtgtgtgagagagcagatagacaacctgaaagacatagctcttgagagaccccatattttggaacccaacttggataacatcattttgttggtagcctttttgttagagatacaatctgattccttcagctactaaaagggttgttttgatattaaaagggcttcattcatcatgtagaacctgctgatttgaggtgtataaaccaattctctctttaatacgtaaaaaagtaaggtcaattgtaacgtatggaaaaagaagaagctaaaacagagtagtggacgataaattatatttaaaattgtgactgaaacataatttaacaaattgaaaaacataaatcgaaagcaatttgtgttttaaagatcgtagtccgcaaggttgagtgggttgcaagtatcctaagtcgtatgtggtcaagcaggaggattcatggaggctgcaggaggagacatcatcggtaggagggtctcggggtcaaagccgttggctcgtagtaagacatcttgcgctcgcttcatcgcaagcatgttgttgatgacgttgttggagaaggtgcggaattcagcctccaaaatggtgacccgcatatccatgtctaggttaggctggatgtgctggtactgaattgagccaagtccgtcgtagtcacaccctttggttgatgtgacgtgctgcaaaagaaacgagtattatagagatggccttcaaacttggtgaacaagaaatcacaagggagagagaagaaaacaaagatagatagacctcatgggaacgttcatcagaattggcccggagaagatgaagatcggcaaggatgtgtgtcaaaatggaagccctaaagaaatcagagagggtcttctctagcttctccattttcttcatgagatataactgtcgaatcatattccaacgattgcatgttaagaatttgtccatgagtttcttgcccttctctagagactcaaagagtatacggatttgagcctggcggtgagcaggcagctcaactccactgtactggatctctttgatcgtcggttgaatgttctcgatcaaggtgctgaggttgtcggctgtgtttttgtaccggcctgctctcgcagatatcagaaagagctgcttcaaaagctccgtcgctatctcaccggcgaaataatcagtgacggccatttagtaaaggatatgttaaagagaaaaagtgtggagatagagagctgagagacaaggggatatgaactaattaatctgtatagaggaggaattcaccggtggaagtttcctagcaactcgaagtgacaagtgacatctccatataatatttgttcaagagttcaatgaagaagaaacaaggaaattaatgagaaggtagacgtatattttattttggcatattgtcttgtttacaaatttttaattaaggtttcttagagtcaaattactgacatatacactgacgtaatatgatcatattaaatcgtttgattggtgtatgtacatattactgctgagtttgtggttacaagcaaatcttatagattcctttttattttttactttttttctttaaaacttaagcaaaaacataaacatgaccatattgttatagattctaaaaagttcaaaaacttaagcaaaattaacgtcaatgaattacaataccagttgtatactattaaatataaacaaattataaaacgacgaaaacttatcatatatttttcaatcctgctctttaaggcaatatcagaatattggataataagcttaaaaagcaacgttaaaaaaaaatgagagagatatttacattttttgtagtgtgtgtgatggtacaaaatacaaaaaaagaattgtgcttttatagaataaaaggttaatattttattttaccttttgttttttttatttattacaaaattatggactgccgttggaccactcacattaacgtatgagaaagaactgtacgcagttaatctacttttattactaaaaaagcaataaaacaaaaattgtatgcagttagccgcctgatttttatttttttgcttattaaaaattaaaaacagtttatctgtcacacattttggactaccaaaaatctgacttaccattcaaaacttttaatatcgatccataaaatgcaaaaataaattaatcttttcgttctacctcaaatctctaaattaataaaaatatgtgattttaatttatacatattttcatgtataagtataacttccacacgcaagcacagtcacactatcaaatctatggattcaggttacttatgacacgacgattatatattaatatttatcaatcactatacaaatatgacacaacatcacaattcagtaccgactacaagtcgcagttgcgattaatgattggataaaatttagtaaacatatacgcgataattgtcctcacgattagtgtgtttcgcgtatgattgattatcttgtaaaggatgatggaccaactatacacattaataacgtggtcgcggattcgtttaccaaatcaagaaaatacatttctatgatccactaatgctcttatattttattttaatgattaaaagaaacggtagaaaccatatttgaaagcgtcagcttctgatctatataaaccaacaagtgttatttcagcaaccaaaacaaaaacacgagtggaaacttttaaacaagagagggagagagcgaaatg

SEQ ID NO: 15183 - DNA, 3000 bp, Unknown
  misc_feature (1)..( 3000): cDNA_ID_3095055_gDNA_ID_2926079_Annot_ID_196329 3000 nt of promoter + ATG
ccaaattccaactaaatcagttttgattataacaattattatcaattttgtttatctagaaattgtatagttaaatgattgtagtaacatagaataatttggttagtttttctttctgtcaacaatttgtggtttttttttttaatggaaacaagtagtgttactatctatctttgaaaatatagagacttgggacgtctgatgtacccatgcaactaaatacaacatacatttgaaaaatggcgttcattgtctccaaaattagggttttgagttacacttacgcaaaccgatgacaaaaaacgcgggacaaggaagacacaagatttgtttttggtcattgctaaatgaagataaattaccataatggtttttgtctaaggtttgtctacaagagaggaatcatcatcccaatgggaccataccatcgccaccacaaaacacactttgtctttgtttcaattaattttggacccaattttccaatttattttcatactatttcatttcattttctatctttttcctgcaacttgcatttagttgaatttttagttggatttctttgttcctttttattgatatagaaatcaaaatatctgcatatctaatcagcatatgacaaaaaaaaatccaataatataattaatgtcgtttaaaaaaaaattaatatctaaaatacaaaattgatataacatcttttatagagtaactattaagaaaaatatatatatagtatatatcttttgtaaaatgcaaaatttatttaatattatattttggttatcggcatcatacgcttgttctcaaggattttctcaactctgtagcagatatatatctttcattctctttagagtttatgtcacgctttatcttttggtttatgtcgatgataacgttatcaaggatatttttttcaacaagttcatgatttatggatcccatatgctcgtttctcctttataattaaggatctagataattgacaatattttcatggaatcgagttctctcgcacttcaacttcatggaaactctttatgagttctagatcctttaatccaaaaatatatgataactaccttgctatcaacaaaattatcctaaccaatccatcaataaaagaagagcattaatggttggcctccaaaataattttgtgctacttgtgtggaattagatctctctcacatccagtggccgttcatgcttcctcggatgcgaattatcaaataaacagattcgggatacaatggattttttatcttcccggtaaaattggcatcacataagaaaatctctgattatcaactgtgataacattggtgcaatctatccactttcgaatccaatttttcatctttgaatgaactatgttgtcattgattttttattttatcagaggtacttgtatgaggtggtttatgtctttacagaagatcagcttgattttgctttaaccaagtcgcgacgcactctagggacatttgttttttaggtctagctagggccaagttcatttcttcatagtaacaatattagaagaaccgtacctattgaaatcattagattatatgtttacttgttctaatacactaatcacatatcccatgtagatgtaacatcagtgtatttatgctttggattttttaatcatgaatataggagtcactcattttcttacatatagtgaatatcctttggtacaaattattaataaattaatttctaaacatatcagttcagaatttgaacatatttggataatgtttccagtttaaaaatctgtgattcttagttcccagtatttaaaatgtgttggcaacaaaatcaaacaacagagtacacaacttttgtctgtctcggatcggtcgttttccaaagctttcaatgggtatctcgagtgccccatataagggtccataattataaaactttttactattagctcctcataatttgtttttgttttgttaagcagctcatacattaatatgttacattttgagtctttttattttctgaatataatattaaattaaattcaagaaaaaataaagggtaggtcatcaaaatgcaaaagttgcttctttttttcctgaatttgaagatgcatgaatttgttaagggcgtaaaccatgtttaagagtaatagtaataccgtatgtcgctttcctttcgaatgaccgagagtttattttaaatttgcttttccatccaattgacgagtttagttgcaggaatcagctgctcatcatgcttccttccattacgctcccgccatatcgaatgtatattgttatttgaaaactgtagggagctaagaacgtttgaatcctgcctaattgagattcttttttcttcttcttcggactgttgtaagttgttacaaacacatcagtgataaggtatatattgtgcaaaatccgtaattaaagaaaacattaagaagaaataaactggatgagttggttattagagagaatgcatcttgtgttgagacaacagctcggattggtgaagagaagaaccagatcagagctgtgatcggacacgaagcagaggaagctgtaaaggtaaactcttcagatgacattatcaagaaggttctgagattgggccaaattgagaatgcagcaaacctcaagcccaataaacaacaggcccaagcgcagaccctaaacaactctcagctccaacggtcatctactgcaaaagaagacaaaaccaaaagcacatcaagattggatcaaaggacaaaaacaaggagctgtgctggaaaagaaggagtggttttacaaaaccgttttgactgtctaggatcaatagagacctgacatgtgtcagtgaaaaccctagtgtcactaagattgtaatgcctataaaaggaaacatgatgtaaccttaaaccctaaggagaataatcaagagaaatgaaacttatcttcttcatatttagcctttgagcatctttactttcatggtatcagagccatg

SEQ ID NO: 15184 - DNA, 3000 bp, Unknown
  misc_feature (1)..( 3000): cDNA_ID_3095060_gDNA_ID_2926079_Annot_ID_196328 3000 nt of promoter + ATG
aggcattgattacctggaaacttatagcctagtggtgagaactccgacagttagatcagttcttcacctagcaaccatcatgcagtgggacataaagcagatggatgtgaagaatgccttcctccatggtgatctcacagagacagtgtacatgatgcagcctgcaggttttgtagagaaatcaaagccagatcatgtctgtcttttgcataagtctatctacggattaaaacaattcccacgtgcttggtttgataaatttagcacttatctgattgagtttggctttgaatgtagcaagccggatccatccttgtttgtatacatcaagaacaagagtatcatcctgctgctgctttacgttgatgacatgataataacaggaaacagttcagatgcgatgtcaaagctattagacagcttgaatactgaattcagaatgaaagatatgggaagactacattactttttggggattcaagtgcagtttcattcagaaggaatgtttctctcccaacagaagtatgcagaagatcttcttgctgtggctgtgatgagtgattgtgctccaatgcctactcatctgccacttcagttgactgctatacctgcacaagatgaaatctttgacaatccaacatatttcagaagtcttgcaggtaaacttcaatatcttaccttaacaagacctgatatacagtttgctgttaactttgtttgccagaagatgcatgctccaacagtgtctgacttcaatctgctcaaacgaattctgaggtacatcaagggaactataacaatggggatctcctttaataagaacacatattgcagattgagagcttactgtgatagtgattatggaaattgcatagactcacgaagatccattggaggttactgtaccttccttggtacaaatatcatctcatggtcctcacaaaagcaagattcagtctccaaaagctcaaccgaagctgaatatcgaactctgtctgacactgcctcggaggtaacctggttaggatctgttctcaaggaattgggcattcctctacttgacactccagaaatctattgcgacaatctctcctccgtgtatctctctgcgaatccagctttccacaaaagaagtaaacactttcagctacactatcattatgttcgagagagagtagcacttggagctctgattgtgaagcacatacctggtcatcaacagatcgcggacatcttcaccaaatctctccccatcaagccgttctgcgatcttcgttacaaactaggcgtcgatgttccacctacgccgagtttgcggggggctattagagagaatgcatcttgtgttgagacaacaactcggattggtgaagagaagaaccagatcagagctgtgatcggacacgaagcagaggaatctgtaaaggtaaattcttcagatgacattatcaagaaggttctgagattgggccaaattgagaatgcagcaaacctcaagcccaataaacaacaggcccaagcgcagaccctaaacaactctcagctccaacggtcatctcctgcaaaagaagacaaaaccaaaagtacatcaagattggatcaaaggacaaaaacaaggagctgtgctggaaaagaaggagtggttttacaaaactgttttgactgtctaggatcaatagagacctgacatgtgtcagtgaaaaccctagtgtcactaagattataatgcctatgaaaggaaacatgatgtaatcttaaaccctaaagagaataatcaagagaaatgaaatttatcttctttatatttagcctttgagcatctttactttcattggttaagagaacactgaaagcaacaattcatatgtataaaaatctgaaaaaataattcaacattctaattcattaaacgtaggatttacaaaagtcccactttgtctcccatttttagtcatcgttcatgatggttgtatgcgaatagtttgatgaacaactataattattacatttagtttgtttccaacgagccatatgtcaatgtttgttacgctacaatttttatttttcttatttcttaaactttttactttggaataagttgatatgtatatgaatcatctaccatttctcgttttttcacaataaatcctaaattttttgaacattttgtctatatataacttttccatgacataaattaaccttagataatattgtatctaaaggtataaactaccgttccaagtctgattaaactattgaccctaaacatttttaaaactgttagatccacaagacgcacaactagttgattgcatagtcttttgaaacaagacaaacaaacactatatcaaaacaatatcatctttctaattttattttagttatgtcgctatctatatgaacgattttccgataagctagtcatatgcaaaagatttataaaaaaagtaatatgttgacgaggaaagtgatagattgataaattaagaacataaatgtttttgaaaagaaattatagctaaactgtcataaaataaaattataaaatagattaacttatatataatagaagcaacttcagttttttaaaacattcatggaattaacgatggatatcgaagtttattggtcaacctaaaatcatacccatacattttagtatttattggacgacctcaaaaatcaaagtcattgtcgaccattgtaatacagttaatgtcgcatactatgcctctgaatcatccatccatattttgttaaaacgaagtgagtttgttaactacaaaatttccaattattggactatacattatattttgtttatccacagggtttttcacataaattaagaaaatacaaaatacttaagatcttgaaaaattatgtaagttattttcttgccgtctcattttattaaagataaaacagaaaaaataaacaaacaggccgaggcccaacaaggtcaaggcctagtccaagaagcgaaacccaaacatg

SEQ ID NO: 15185 - DNA, 3000 bp, Unknown
  misc_feature (1)..( 3000): cDNA_ID_3095036_gDNA_ID_2926079_Annot_ID_196325 3000 nt of promoter + ATG
ctggatctctttgatcgtcggttgaatgttctcgatcaaggtgctgaggttgtcggctgtgtttttgtaccggcctgctctcgcagatatcagaaagagctgcttcaaaagctccgtcgctatctcaccggcgaaataatcagtgacggccatttagtaaaggatatgttaaagagaaaaagtgtggagatagagagctgagagacaaggggatatgaactaattaatctgtatagaggaggaattcaccggtggaagtttcctagcaactcgaagtgacaagtgacatctccatataatatttgttcaagagttcaatgaagaagaaacaaggaaattaatgagaaggtagacgtatattttattttggcatattgtcttgtttacaaatttttaattaaggtttcttagagtcaaattactgacatatacactgacgtaatatgatcatattaaatcgtttgattggtgtatgtacatattactgctgagtttgtggttacaagcaaatcttatagattcctttttattttttactttttttctttaaaacttaagcaaaaacataaacatgaccatattgttatagattctaaaaagttcaaaaacttaagcaaaattaacgtcaatgaattacaataccagttgtatactattaaatataaacaaattataaaacgacgaaaacttatcatatatttttcaatcctgctctttaaggcaatatcagaatattggataataagcttaaaaagcaacgttaaaaaaaaatgagagagatatttacattttttgtagtgtgtgtgatggtacaaaatacaaaaaaagaattgtgcttttatagaataaaaggttaatattttattttaccttttgttttttttatttattacaaaattatggactgccgttggaccactcacattaacgtatgagaaagaactgtacgcagttaatctacttttattactaaaaaagcaataaaacaaaaattgtatgcagttagccgcctgatttttatttttttgcttattaaaaattaaaaacagtttatctgtcacacattttggactaccaaaaatctgacttaccattcaaaacttttaatatcgatccataaaatgcaaaaataaattaatcttttcgttctacctcaaatctctaaattaataaaaatatgtgattttaatttatacatattttcatgtataagtataacttccacacgcaagcacagtcacactatcaaatctatggattcaggttacttatgacacgacgattatatattaatatttatcaatcactatacaaatatgacacaacatcacaattcagtaccgactacaagtcgcagttgcgattaatgattggataaaatttagtaaacatatacgcgataattgtcctcacgattagtgtgtttcgcgtatgattgattatcttgtaaaggatgatggaccaactatacacattaataacgtggtcgcggattcgtttaccaaatcaagaaaatacatttctatgatccactaatgctcttatattttattttaatgattaaaagaaacggtagaaaccatatttgaaagcgtcagcttctgatctatataaaccaacaagtgttatttcagcaaccaaaacaaaaacacgagtggaaacttttaaacaagagagggagagagcgaaatggcgacgtcgggaacatacgtgacggaggtaccgttaaaaggaacagcagagaaacacttccagaggtggaggaacgagaaccatctcttccctgacgctgttggccaccacatccaaggtgtttctgttcacgacggcgaatgggacactcacggaagcatcaagatttggaactacacattgggaggtatatacctttattatacgttggaaattatttgcatcattacatatgaatatgacccaaatataatttgactgatacgtacacatgaatgtaaagatggaaagcaagaggaattcaaggagaggagagagatggacgatgagaataacacaatgaaggttgtaggactggaaggtcacgtgatggagcagctcaaggtgtatgagatcgatttccaatttattcccaagtctgaagaagattgcatctgcaaaatcactatgatatgggagaagcgcaacgatgatttccccgaaccaagcagctacatgcaactcctcaagagcatggttattgatatggaggaccacgtccttaaagcttaatcaacatcaccatcatccctatatgtttattaagttgttttcaattatatctaataaagtgtgtttcctttcggaatgctatattttcaattatatataataaagtgtgtttcctttcggaatactatatacgtaccatgtggtttcttaaatcaatatataagaaaatgggtcttgtggagttactttctgtagcatatacctttagatgttgacatcttttccattcaagatacacttggagactaaattttacggtttcaagatgatctaaagcttaccaattgaagggaactgaaatatttgtaatatataacaaaacttctcaaattcttttattttcatgtcgtatttattgtaaaactgttttttggggtaaaatataattttacattcataccaaaaaaaaaaaaaaacttaatttttctgaactagaaggatgatggaccaactgtacacattaataacgtggtccggaattattttatcaaataaagaaaataaatttctatgacccaataatgtaatgctctaatattttattttataatttgtaaaattaatgctcactaaatactttaggttgaaaaatgaagaagagaagtttctagcatgattaaaagaaacagtattcttaagcgtcatcttctctatataaaccaaggcaacaagtgttatttcatcaaccaaaacaaaacaaaagaagaaacacgagtggaagcttttaaacaaaattaaaaaagagagagagaaatg

SEQ ID NO: 15186 - DNA, 3000 bp, Unknown
  misc_feature (1)..( 3000): cDNA_ID_3095086_gDNA_ID_2926079_Annot_ID_196322 3000 nt of promoter + ATG
tgcagttggtacaatagatgcatttaggctcatcatatctttaagtttaaccaaatttggtgaatcgatgttatactaatttctaaatctcgggttttcgacaggtcttcctctagggaaggatggtaagaagaaaacgaagaacaaccaaatgtgggatatctttaactactactacacagttcccagattttgaagaagacttagagcagcgttaatttcattaataaaatattcataaaaaaccctaatctttgttctttttttgttggtccatcttcggaatcggagctttgttgtttcgttttggtcttctctactcagcgaaggcgtgtctcaagagaatgtgtctcttcttgttattatattgttagacattttcgaatgttgattgttatattttttgtagctattcctggagtctctcatctccttttgatgtattttgttaacacaattatttgccagtaaccctatttgtattggaacaacaagaaagacaaaaacgaaattgtttagcatacaacaagaagaaaaaaacacaaaactaattgcttacacatacttccctctatacttaggttttggatctttgaaggctttggaatcagtgtcaatctgagaagaatcaatgggtttgaatatagaggagtgaatattaccatcctctaaccacttaagatgattctctctaaactctaaatgcattaaacgagcagcttcttcaacctcttcactataaggctctactttcaccatcgttagcagaacccgactgtaccgcgagctcaggatctgttcagatacagctactaacttgaaacacgggtgctccgggaacttaacctcgctgccagtctcatctctcaaaaccgggaagaaaaagacgagcctgcctttcatcaccaacattcttgcagcaagatgaagtagatcatgaacacactccactagactatatgcaccagtggatggaatgtgatctgttcttttgtcatcagggacagtgtaaggatccactgttcctctaaggattttcctaccaccggatttacgtccaccagcacgaaccccgtaaggtggatcgcagataattgcatcaaagatctggaccaatagatacataagacataaactcagtgatctctctactcaatataccaaagataataatgaaagaactgagatatagagcattacctcctttagccccgatcgccaaggaggaacgttattatccattctaagtaaagctaccggcattggtaatccatactgcataagtattaacagatgtaagaaccagtgatatcgaaagaaacataacaatagaagtcacacactcatactaacctgtttgaaattgctccaaacattacaatctggaccacgtccatcacgcactactctgatatcgatatctgcaccctaatacaacaactcttttatcagttcgagattcagaaaccacaaaaggaaatcaataaactaagggaaaggttgcaaaccattgtcattgcgccaaagcgtgcagcagaaacaagaatgctcccagtaccaacaaaaggatcatacacaagttttcccgaagtagctttcgcttgattagccattaagaaagccatttcagcatccatagcagttggaccaaggtaagtacgagatttcaactgaaatgtaggtaaaagcttcctatcagcaaaaccaacctccctcccaaaaaatatccttctctgtagaataggttgaagtccattgttctcttcagattcaatcatttccattagaaaaaagttatgatctgggttcttcaagttaacacgaccctgcaacaaccaaatcaccaaagaatcaaaacaatgaagataaacaccaaaagagattgaaacaagaaagtggaatcagacctcaaatggtatataagtaaacgactggattcgatctttctgctcgtcaaaagttaaagcctttccaaaagtttcaacagagattctaaaagttgaatcagaagtgagaaatggaagctttcgagaatcagggtagctttgaatcgagtctttaagctcttcataacaagttccttcaccccaaagctcatacattcctttcaccaatatgcttcgtttagcaatgttacgagcgatttcttcagatgaaagttgaacgaaatggaatggagtatcgttatggtgattttcaggtagacgccattggagagactcattctctgcaatctcttctccgaagagttcagctaaagcttccacttctggctttctgaagtctaatagcctgtgatagaagacacacagaaaccacatctctctctctctctctttcccctgaaacgaaaaccctaatttgacaacagaactgagaaagaagacgaagacggagaaggaagaaacgaagaacgacggcgactaaaaccttttcttcaaaacccttatacatgggcccaataaagcccatttattcaggcccacttgtacttaaatgacgaaattaccccgttagctgtcgaatacgagatatatcgcgtcgtttgctttcacttgtgtcttgtgtgttctgccaaagtttctctgcagcttctcctcttctcagaaattagggttccgtctcaaattacgagcagatctcgtactctctggtaatgatttctcgtttcttatactttgtttataccgaagtatcgattcgcttgcatgtctcgtcatctttgtaccgattctgatttgaagtttctagggtttaccatcgcgcaattacgatttgtagatatgttgtttgcgagtagagatcaattgaaattaccttcgtggatttgtctcgtaagcgcgaaccatgtttagagaaacgagttcagatttgcttcacgcttaattattgtgttgtagctgtgtatatcttctggatctgctgcgtgtgtttggtttttctgggagtcaagtcatattaacgttgttcaaaaacacttttggctgtttgttttagaag

SEQ ID NO: 15187 - DNA, 3000 bp, Unknown
  misc_feature (1)..( 3000): cDNA_ID_3095105_gDNA_ID_2926079_Annot_ID_196318 3000 nt of
tgaacattcgcaaacattgacgttttcttaggaaccttgaaaggttcaatgtattgagttgctatgagtgtgttgtaatagtaaagctcgaatgtcacatagctaaactccacactacttttcttgcttgggtttgtgacgtttgctaaaatggttagatcaccgtttagaagaaaacccatgtcgagataagcagcgtttaggttagcagctgagatgtcgacgtaaggtgagcgaggacggtagacgaggtaaacgattaggatgataagaccgccgagaataagaatgacccagaatattgcacagcaaaatgcagctgaccatgtcattgcgtttgtctctcttgagggtggtggtaaccgtgggccacggcggtgatgcggggatggtgttggagcggttctccatggacttggtttgggtattggaggtaatgttgatccataaccccctccgttgcgttgtggtgcttgtggtggtggaggtcgttgttgttgattatcttcagggcttaatagcaatggtcttttcgatgagttttgagtttttcgtggtggaagtctctcctctgggcttaatggtacaggtattacagaatgtttcggttcttggattggattttcacggtggcgaccacgagtcttgattaggattcctggtggagctactgggtgaggttgcgtggttttgtggtgcgatttttttgggtgcggaatgggcgggatgtgtggttggttcgaagatgtttgtgaggtagaagcaccaccgcttttgagatgtggattctgcgatggaattcgcgcaaaatgagggttagtttcatggtgatgatgatgagacatttagatgaagaagctaaaaagcatcaaaggaaactaagttaagtaagacttgagatgaaagaatgagaacagagagattttgaactgttttaagtttctaaatgagatagagagagggagagaataacttggtgacaagttcaagtaaggattctttgttgtagaaaacaaaataaagaaggaaagtgatagcacgaagcaagtaatctttgttgtagattccttgcactaaaattaaaatcagtttctaatctcatgaaaaagtataaaaacattctctgtatctttttctcattcaaaagtttttttaagaaaattgtaattactcggtccaatttatctaaaacccaaataaaaagatctcgattttaggagagacagggttaaggacttacagtaacagtcatgaatatgtcaatctttctacttcagctcactccaggggaaagatgttgattctcagagcaacttacgaaaacttgtcgaatatgtcagtaaactatgaacatgttaagatatgtctcccatagatcaagaaggccgcagattagttagcgcaaatctgatgcgaaacacgttgcttctgcaggtagatactctgttctctgctcaatttctgcagcatcaaacatgaaaccaactctgcaatgccggttactgcaaacgttgacaaagacaactaccaatcgagcctgaccaaacagatactagtaaaaaagctggaagcaaactgaaaactaaacccatacaaaaggtattttccacgatcttcggtgcaattgttcttcctatatctcttatccccattctttggcatggcatggtatatagtaacatgaatatacataaaatgaaagtgtaaacgcctggaaagagctaacctacgctttacacgcgaagaaagcagaacaatctcagagtaatcatggccggaacaagaaacacaattcaagcacagagacccacagaacacagtcatacagagtgcaggagaagcaacgcacttgccctgaaacaactttcaatacatgtactcctaagatctgatgttctttctcaagatcattgaaaacttacgaaagagaagccatagagtaaacaactaatcaaatccaaaattccaattccacattgattcaactcatcaaaagttcaaaatgtaaaactgtgttatatcacacacagatactagtactgatcaacatagcagcactcttgcttcacctcagctctcataaacctctgcaaagaataacaataagaaatacgcaagatcttactaaactaaacaacaccattaaaaccctaaaaaatgtgaagcttttgagaaaaatcagaaaacattacctgactttcttgatgaggattgattggagttttcgagcaaagtcaatggatttgattctgcgttcaagattcttcctagcgagaaccttcttctccgaattcttaatgtgatgagtctgagtccctttgatcagcctctccattccactcgattgcatcttcttctgcaaaatcgtcagtgccttgtctaaatcattggagaacaccttcactcttatccctcgctcttgctgcaactgctggtttagactcggacgagtcaccaaccccgtaactcgcttcgctatcgtgttcatctcttttacttgttttctgaaaaagtatgtttctgaaaacgtaaatgagattgacgagagacagtgataggatctgaattcgacttaccggtcggaatctcgccggagagaatcaaagagccaatttgagtgatgatggagaatgtctaggttaaaaaagaggcgatggaggaaatgagataaaaaccagagaatttactaatataggggtggttatgtaagttttatgagatatagggatgtttttgtaaatatccttaaatctaatcttctgtttgattcagagagtattgactttaaagaagaacattcaagcctttcaaaaaaaaaaagcttctttaatttctctctctctctgtggagtgttcgaatctccaagctctctctcaaatggcagcgtccacatagtagagctgaagaagcactgtatctatctacagagaaagtgaagaggaagaaaaggaagagaggatatagaaattaagctggcgacttttagtccgaggcgagca

SEQ ID NO: 15188 - DNA, 3000 bp, Unknown
  misc_feature (1)..( 3000): cDNA_ID_3095182_gDNA_ID_2926080_Annot_ID_196345 3000 nt of promoter + ATG
catcaccggttctcttgttgatttgtatgtcaagtgtggatatctctttagtgctcggaaagcttttgatcaaattaaggaaaagacaatgatctcatggagttcattgattcttggatatgcacaagagggtgaattcgtggaggcgatgggtttgtttaagcgactacaggagctaaactctcagattgacagttttgctctttctagcatcattggagtctttgctgattttgccctcttgcggcaagggaagcaaatgcaagcacttgctgttaaacttccgtctgggttagaaacatctgttttgaattcagtggtggacatgtatctcaagtgtggattagttgatgaggctgagaaatgctttgccgaaatgcagttgaaagatgtgatctcctggactgtagtgatcactggttatgggaagcacgggcttggcaaaaaatctgttagaattttttacgaaatgttgagacataacattgagcctgatgaggtatgctatttagctgtactctcagcttgtagccattctggtatgatcaaagaaggtgaagaacttttttcgaagttactagagacacatggaatcaaacctagggtagaacactatgcatgtgtagttgatctattaggaagagctggtcgtttgaaggaagctaaacatctgattgatacaatgccgataaaaccaaatgtcggaatatggcaaacacttcttagcctctgtcgagtacatggggacatcgaattagggaaagaagtgggtaagattcttttaaggatcgatgcaaagaatcctgcaaattacgtgatgatgtccaacctttatgggcaagccggttattggaacgaacaagggaacgcacgagagcttgggaatataaaagggttgaagaaagaagctggtatgagctgggtcgagattgagagagaggtacattttttccgtagtggagaggattcacatcctctgacacctgtgatccaagaaactttgaaagaagctgaaagaagactgagagaagaattgggatatgtttacggcctgaaacatgagctgcatgatatagacgatgagtcaaaggaggagaaccttagagctcacagcgaaaagctagcgattggtctggcattggcaacaggcgggttaaaccagaaaggaaagacaataagagtgttcaagaacttgagagtatgcgtagattgtcatgagttcatcaaggggttgtctaaaatcacgaagatagcgtacgttgtgagagatgctgttcggtttcacagttttgaagatggttgttgttcctgtggagattactggtgatcatcaagcttgattacttcgtccccgtaccggtgcttcctagactgtgaccctcccatgtgttagggaagaacagctcgtggtgctatatcagcagggtgaggattcaattgatatattggagatttaggtttcgaccaagattgagcccaatgctgtgtcctggagcaagtttttgaaagtggatatgagaccactactcactggttttgttgctgttcgatttgaccacaactctatcctctgggagcttcttctttgatgagcaagagaaagttgctgtggttttagatgtagacgaacatctacacaccgagaccgctcggtaccgcacaacttttatcattggagatgacggctactttaaatctgtgagcctcggagaagctctgaatgtctatgtgggggaaactgggaatttcggatatactctgcgaatatattgtcccccacttgtgtgctcttcctgttatctcctgcaaatcaaccaaccacgcaaaaggaaagaaagagatgatttcgatttgcttcttgctaatctaactgcttgtcagtagtcactcatgatcttcgttacggttctatctataatagctaataacttaggatgtcgtctatttcatgtttcttggtcaattgtgtttcttgcgttgtctgactgctagcgattgttcaatttgctgttgatttcggcttttttcaagtttctaagcccgttcttaacttatcttaagatttctcatgatgatgcaagttttataagcacagctagaaggagcaaagtccaatctaaaaaacgtgagtttcagttcagaacaagataaaaccatatatatatatatactcaaattaagcttagaatacacagagattttgagtattagaagattagtctagggaagaagacaatgtgatgtggtgatgagaaggatttgcagatctactggcctgtgttctaagttgattagactagaggtctagaggtcacccattttcttccgtctcttgtgagattatttataaatgaaattggttggcggcaactttttgtaggaaaatatgagaaatagcaaaacaaaaaaaaacaggcccaggactaagcccaatttcagccttaagatatgcatgtgttgacattcattattaagtcaaacataattcgaatcttattggttcactcactcacacacacactcgcttcaaagaaaaatcattaaacaaaattaattcttaaatattcaatttttcattgggcattagatttttttttccctcattttctagtatttattggacttgcgcaaccgtggagccctaagactccgaggtaaattgcggaggagtaatcatcggagagacgaactctcggagtaaaaagcttccgattgtatcactaccatcccaattttgaaattcgcaagttaattagtggaaagtaggatctagggtttgggttcattcgaaataatttctgcaaatttgggctgatcatggaacgaaggttagtcgctccaatgcttattcttaagcatatccgtcgcgagactgcttcattagcttaatttggaaggcgttaggttcgttgagcggttaattttatttatgttcatttggatcagtctcgagaagaatagttgtatgcgtagtatctctatacctgttgattcgtcatg

SEQ ID NO: 15189 - DNA, 3000 bp, Unknown
  misc_feature (1)..( 3000): cDNA_ID_2991281_gDNA_ID_2926080_Annot_ID_196351 3000 nt of promoter + ATG
ccgtaattttcccttctgaaaccaacgatcctacacatcttcgtaaccttgctgcaaggtgttcatcactggtaatgcatcgcatgataaaacttttgtaccatgatgttccatttcttgttttcgctttataattttccaactgtttttcaggcacgagtccgggttttgtcgttgatagtgaagcttttttcgatttctcgacttgtagcttcagaagttaagaaatcggggcttcttgatttactggaggcagaaatgaagggtacaaaagacactcttgtgatcttaaatgttctggaactctactatgaggttggcctctgatgtctgatattattattcaatctgtttcctttgttgccctcttttgaaaggaaaagatagaattatattgaataattgtgtatgaacgctgaagttaatggaagtggagcacagttcagagttcgtgccacaaacatcacttattcagctgttgtgttctatcatcaggtacaaactgttgaaccttacccttaactattaagcttgcatcagctcatccttcagttttttttctctgggtcttatgttttgtatagtggtacatcgacgggaccctatgaaaagttaagagcaatgatgataagtggcagactactctcaaaggaaaatatctacaaagtcgtggaagaagctagtaagattttcattgtttttagcctttattggttaggaaatgagattgttttgttttctttctatgtgctttcacaacagggagtttttagggactatgttatgttaggaccagttgttccctgtctcaaagcctctgtttgttgtgcccataaaacgagtgacgaagttgaaaagttaactacgaattgctttgtttctgaatgtaatctaaggaagagaaaatagctttaataataatagacttaaatttgtaggctgtactgtagctggcaataaacaactttcaacttgtcctgaatacaggtgtgaaggcgttaatttcagctattgatgggagtctggagtcagttgagatgaatgatactgatgcacaggaagctgccattgatgcacttggtcagatgggatcaagtaagtgggtcacttttctttgaaactttgtttgttgcagtcgtcttctaaaagagatagctagagaggccatacatttagaattatgaattataagagcatccgacaagatattcgtttcccatgcaatgatcttgtaacttatatggatatttttacaataatcttagcaacgaagggagcggatcttgtcctttcaacttcacctccagctgcaagacatgttgtagcttctgcctttgatcgtaatgcacatggaaaacagttggttagtgtgtttttgcttctcatcaattgaaattctgccgattatatgctcttactacatttttgaagatccaatttttccagttttaggatttctaattctaactattgagggttgaaattttgcttcattagtagagacattcatgaaattatatgattgtttcgtaaatggcatgtgcaggctgcactgcatgcactggcaaacatcgcaggtgaaacacgacctaagagcaacagaatagttgatggaaaagctgaagaaagccttagatgtttgatatacgacgctgcagcacagagcacaaaactaaccccatccgtaagttcgtttcctcttttacttattcttctctcagaagtgtgcagattacatatttttgtttgatccgtagcatgagctaatttaagcatgtcgcacaaattgcagggtttattcctctcagttcttcaacaaagctcagagattcgtcttgcggtaaacctttaactcagcatctgatctatcatatcttctccccctttgtttctctagttggaaatttcaaaatgacacactacatttcattcaaaattaagaaatctcttttgtccttctacacaaaactcggatacatgtcactcatttgatctcacataagaccttcacgcattgcctagaggtaactatgttttttgcttatagtatattgtttacaatgttgtttgcagggttatcgaacgttaacagcattagtggctcggccatggtgcctggtggaaatcttggccaaagaagagataataaacatagttacggatgcaaccactgaaactgcaaaaataggtaaaccaagtaacattcctcgcatcacccacactccagccattgtattggcttcttcctccctcaacctctttgatctacgagtctaaatctcattttttttttactcagcaatggaagcaaggtataactgctgcaaagcaattcacgaagcgttcttgtgtagtaactttgttgatgaccctcgtcgtctaaaaaccggtgacaaggttccatacttttcctctgcgctctttaagatggaagtttcgaaaaggcttttctttgatgttgtacttttacttgctgatgacatgtttgacatttgttgcagttgcaagaagctgttcgaagtggaccatatatgtcgaagaagcacagaggcgcacgaccagaagtaatgacaggcgaaggattttaaagacaactaaagaaaaaaagttaaaacttctttgttaaccaaagttttttatatcttctctggctgttcgataagtaaactttagttctttctataaacaacgaaggctaggagtaaacgttttggcggttgaaatttgtgttctttaatttttagtgttgaacttaatcaaagaaaaaaaggaataacgagtttggtccgtttctcatcgtttgccattagcccacgcgggagatccaaaacactgggctaaactggagttaagacgataaaccaagggtaatatagtaattgcgtttccagacatcatctcttcctttatggataacactggttcgaaatggagccattactctttactaacagagggagaaagagcagagaagagagaagaggaagcttgtagaaatcg

SEQ ID NO: 15190 - DNA, 3000 bp, Unknown
  misc_feature (1)..( 3000): cDNA_ID_3095172_gDNA_ID_2926080_Annot_ID_196347 3000 nt of promoter + ATG
ctctgtaagataacgtccaatatggcagtgatacaggtctatacactaaaacgtcaaaatagcattggcatttctgaagaaatattaatggacgctacactcatatctagaggagagaaatcaataaacattgtcaattagcctgttctaatgattttctaaggaaagtcttcagaaaaacaatacagaagatgcgtgtacctcatgagaaaaaatcttatccggaaacattgtagagtttcttgtcatgagtagagggattaaagcacagatcagagctgcaaaagataaagttgtcaacggcctaactaagttggaaattgacttatattcctttagcaactaaaacaaactaggaaggctgtaaattatcttacagtcatttgcatctcgcaatgtaacactaaagtagacatcaagaagtcggggagcaatcttaagagtctgcttcatcctctctgaccgaggaccacttgcagcagcctgcagcgctgcattcaatgtaggagaagcgcggtgtctttcctgcagcacaaatttgacaaaatactttcagtttgtctaatatatcagacagtttaaaaaactaccaactttcacataggccctaaatttttactaatagacaattattatataaaactgtttctgttgagtttttggaataaagcaaagccagaggaaggatgcataccgctagaccatcattttcgtccttcagaagctccagaaacagaggatcagctacatctattgtattgttatcttcagattcagagtcatcccctccatccccgatggttgaaccagtatatgcttcatccataagggcaagaagcatctgcattcacaggtatccttgtcattcattgactatctaagaactgtcatatggtttatgtttttatgagatataagacctccggagctgcactcttctgaattgaagcaatgctacctccaacccttgaccccgaccccgagctcctttccaccttttctaatgccacgaccaatactagcaaaaatattaacaagaagatacataattagtacacagtacactcgtaaactcaatcaggctgagagaataaagtccaagcatcaatggagaaataccaaacaagctcaaaacaatggaaaccagtcagcttacaaatacatcttagtacagttggagtcatccaagtggtctccaaattagagtacaaacaaatatatgaagtcgagtagcattttttagacaagcggactcacttggcaagtctacaatggatggaaacagaggaagaaatgacccaggtgatatcagtcctggaaatatcttcaggaaggacttctccaacctgaaattagaacaaagaaaatttatttccttgagataattgttcaaatcacttgtgcatattttcagcttacttctcccaattccaggcaatgagcttaagcaacaacgggaaaaactgcaaatacaatttcttgaattagatagagatataatatatctgttatggcttaattgttcaagcggtggaaatgtaaatggacacaaattaagaaagatgaaagcagaaggaacagctagattgcataaagctataaggacagaaagatacagttctattacatatgttgatgcacacagtaataacacaataaatagaggcactttactaattaagagagtaatcttcttgagactgaaagctaaaagaaagtttaaggatttatatggctagtcattccagttaatacctgagggagtaagtttgggaaagatgctaagagctttctttggttcacaacaaggaattcacaagttgcctctgccacagcggcatctgagaactcactacaaagaaaatcatgatcatatcagcaaaatttatctacataaacgcatagtagcacacatctcagagcacagagccacaacaagacccagtcaagacataaaaggtagtccataccggctaagacatgagcggaagaatgtcctcaaacttgggtcagaatcgtgcagaaccatatccccaaaatcaagaaaaaactgaagaatggcctaaacacacaaacacagaatccttaatacacactagaacccaaaacgtaaaaaaacaaactttcatctgaaattcttcagggagaataatgtactagcaagagaaggcctttggacgcccctgactcggactgagatagtgaagcaaccgaacgatggaagactttattgaattgtggataaattctagccacaagatcatctgatttctccattttacagaacccatgcagcttcttcacctaatccatatacattcaaacaaaacgaaagcaatgtatcacttaataccagtctcaagccaattctcaataaatggacaaaagatgcgtactgattgtagtatagatggatcagaagcaggatccgtagaatcccgcgcgctgttgcttaggattctgaggtaaaaatcccagtctccttcttgatcactcatgttctcaatcaaaaagaagatcactagaaaaaattcatatgatatgatgatggatgaagaagtttcagcttcggcgactccagagtcccggagaaagaggattggaaagaagacgacgtcgtttattcaaagatctatatccttaaactacatgccatctcttcttgtccacatgtcgtttatagtagcataagacggcacacagtttatcaagcaaaccccctagacgggctatggattggctgcggcctttttatagcttgttgcagcgatacgacatcgtttggccagtacgacttcgttcggccggtacgacttgtcttcttcacgttttctaataggattaattaactacgtgtcgcttatagtagcataagacggcacgcattttattcagcaaacctccgtatatcgcaggctctctcactctttccgtcttctgatttctccctccaaaacaaacctcggaagagaaaattggagcgaaggagcgatagatatg

SEQ ID NO: 15191 - DNA, 3000 bp, Unknown
  misc_feature (1)..( 3000): cDNA_ID_3095177_gDNA_ID_2926080_Annot_ID_196346 3000 nt of promoter + ATG
aattctcaataaatggacaaaagatgcgtactgattgtagtatagatggatcagaagcaggatccgtagaatcccgcgcgctgttgcttaggattctgaggtaaaaatcccagtctccttcttgatcactcatgttctcaatcaaaaagaagatcactagaaaaaattcatatgatatgatgatggatgaagaagtttcagcttcggcgactccagagtcccggagaaagaggattggaaagaagacgacgtcgtttattcaaagatctatatccttaaactacatgccatctcttcttgtccacatgtcgtttatagtagcataagacggcacacagtttatcaagcaaaccccctagacgggctatggattggctgcggcctttttatagcttgttgcagcgatacgacatcgtttggccagtacgacttcgttcggccggtacgacttgtcttcttcacgttttctaataggattaattaactacgtgtcgcttatagtagcataagacggcacgcattttattcagcaaacctccgtatatcgcaggctctctcactctttccgtcttctgatttctccctccaaaacaaacctcggaagagaaaattggagcgaaggagcgatagatatggcgtcggcgtcctcgtctgacggagttgccggaaggattcagaacgcttctttggttcttgtctccgataacagttccacgcttgctgtgagtattttcgttcaaaccaaattcactcttttttttttttgatgtaaatataggtttctgagaagttcctgaaatctttcctccgagatgttaacagataggagcttcggcttataatgggtttgactagttagaagtgaacaagggatttctaatttgggcaaaatttatagcctagaatctgctttatctcgtatctgtttttacttttatttgcaggatatccgcaaagctgtggcaatgatgaagaacattgcagttcaattggagaaagaaaatcaaacggacaaggttggttattattttgtctgatatgagaggaagcgttttcagggataaacgcacttgtagccgttttacattttttttttttgctacaatgtagagtagtttcattcatctccttgagtttttgtattggctaatcataagtgaccttatcttaaacttgtgggaactgcctagactttcttctaatgtgattgattcttggttaattgcattgctgtaaaacttgttatcacgtatctctttcattctgacattgtattattgtctgctcttgccaacactctttccttgatgtctgtctttgtttttcttaaatgctctttatatatgctcttcatttttatattttgggttccacaggttaaggaccttgaaaattctgtggctgagttattggatttgcatagtgattgtaatcaccgttcgacagcaattcaatccgttgcaaatcggtaccaacccgtggaacaagtactcactttccctctttcatgtgttatctaatttcttattcggttgcatacttttagatgtagcaaattgatttttactctaatgactgcagttaacggactttaaaaagttgcttgatgatgaattcacaaagctcaaggctacaccttcctcagtgccacaaaatgatcatttgatgcgccagttcagggaagcagtttgggtatgtttttaacttaaagttcttggcttgtatctaataggtctatagtccgatttcctttttaagttattgtcaatgttttgctgcagaatgttcatcatgcaggtgaaccaatgcctggtgacgatgatgaggacattgttatgaccagtactcagtgccctcttctaaacatgacatgtcccttgagcgggaagcctgtcactgaattagcagatccagttcgcaggtacaatggatgtttcttgtcttttttcccttaacttggatgtcttgttttgttcggacgatttgcttgtcctctcccatgcctgatgtctatgtaggatgatcctcaaaagccatattcagtcgatactgacttctttctatacatgaccataaagcttgaatatgatttcatctttcgtgtagcagtagaactaatcaaataataatatacaattgtgcggtgaactgataccatgtctctctgatcctttttatggttgcagtatggattgcaggcacgtctatgaaaaatctgtaatcctgcattacatagtcaacaatccaaatgcgaattgtcctgtagcaggtaaaatagttcttgctcaaaaacatctttagacaccattactttgttctttcatgctgatttgtcatttgtatgacctcttgaaatcctcagggtgccgaggtaaactgcagaatagcaaagtgatttgtgatgcaatgttgaagtttgaaatagaggagatgcgctcgttgaacaaacaatctaatagggctgaagtgattgaagacttcacagaagatgtggatgaagattagagatcagacatttcttggaccgggttttaagcgctgcaatgaaacaagttgaagccatatgtttcacaactttttgctattcttagtccgttcggtatattttatcaaacgtgaaatttgataccaattgtttccactttatggaggatgtaaatagtcgatctcttccgattctgaattcaactgctgttttttttgccaagtttacgttcatttcctgaggctagtcaaagcttaatttcatttcttgtagtcagaattttcgatttagtaccattattaggtctactcggtttattagtttttcatggtatggtttggcattggttaagagtttgtgtggatataaatccagtttggttttcaaattcaatttttggttcgatttgaattggttactaaaacaaactaaaggcttttagcttcccagttcccagtccctgtactcgaaaggaagatcttcatcttcaatcttcatgctaatcgacgaaaatg

SEQ ID NO: 15192 - DNA, 3000 bp, Unknown
  misc_feature (1)..( 3000): cDNA_ID_3095277_gDNA_ID_2926081_Annot_ID_196364 3000 nt of promoter + ATG
agcaaagtctaacccaaaaaatacattaagggaaatttttcagcttaatatcaaccaatttagagatttctaaaaaagaaaattaaaactttttttagagatttatatttttaaaagagatataaaattgcctacagaaaatcttcaaataagccaaaccagctcagtttatgaatcattaaaatgaaacttccttaccaatataatttcaaacgaaaaaaaaattccgtatcgaatttttttgtaaagaaactcattttagtgggtttttataagctagactgatgaatttggtcgaagtacagcttattggcatctaactcattaaatgcaaatatcatacaaaattcgtaattacatgtaaatttcttccaaaattcgtaattacatgtatgtaataatctaattttgtgtgtgttagtgatattagaaatattattgaaaaaataatataggcatcgtgtgcaattttcaattaccttcacaaatgaagaaacattccgagcatatctccttggcataatgagtgggattttagagttaagccaacgaaatttgggcctaatttttcatcaaatacttgggcctagtcatcggttatgtcattgctacttatataagacccataggtataccgataaagtcttcatattgagatccaaaggccgggatcgaacaagttttgttcttattgaatcagcgttagacgcagccttgtctttattatgttcttcttcatccgttagaaaaagtatccgtatgatgtccattcgtttcatttgtaataatttgatgaagtcttcttaaagacatttggattggagttagaatgttccttcttttatttttcttcaggacacttggagtctcggattagtcaagagacttcgatcatattttctttatcacctcttcttcaatttatatggatcatctttaggaaaactataacgtgttaattgtgaaattatgatacaaactttataattcataaataaatatgtctgtgcatagtttttttttttaaattatccggataatgattatgagagaaaagcaggtaggtcgatcatgaatgtttaattttggcacatgttgaatgtgaggtcccagccaccaataaactgatcaagtcctacattatccaattcctttaattaccttaaagtatttacaaaatttgaattagtcaaatctttgagttaagacaccaaatgattttacaaaactcgaataatataagaagagtatacttgttgtaaccttggagtactacgaattcaacaatttgatgaagtgaaaacatagttaagaaatgattgggagattattcatctaaagctaccagtctaccaactttccagttttgacaatatttaccacgtggccctgaggaacatcattgtcagtttatcaaacactccatatttcgtggcagcttcgggtcaagaatccaaattggtattgtcacttggtcaggtcaaagttgaggagcttttatatatagtataatcaatgagtcggctaaaatgtaaaatacatgttctaaattaaacgtaataaattactataatcgtatcaaatttatccctcttatcaaattagtactttcgagtttcgatattgtttttctttctctgggaaactatatatatttacatttctagaaagaaagaaaaaaactatatattacattttatacgtgctaagcctagaaaagattaattacaaagaaattatacattttattgatcaagtggtgcttaaagcagtaaaaacaatttgaactcataaatcgtaaatacgtcgacatatttcgtgatctccattaatttttctttttttaaagattgacgcaaaataatattctgaaaatgaaaaagtaaaataagaggggacaaatattcgagatgtgacgtggcagatcgagtggtttaaatattctattagcaagtggtttgtgtaataagcaaatgggtggtcgaacctgaccgtattcttggatctattcaactgtagcatcagtccaccttccttacctcatctttcctaactttttaatacctttttaatttgctaaaaacatcactactatttatatttgatctctaattactgtttcaactctgaatattccgtaatccttatattaatatgtccaaaaatatataatttctggactttcccttgagatgggaatatgaaagaattgcatcatttacctaatcatatgaacacaaatagatattggaaaaaatgtggttttatttttcatgttttgttcgattatctttatctttatcccaaaaaaaaaaaaatcattcgattatatctaaaattcaaaatagattacagaaatataatttattagcaaaacggcatgtttaaagcgtttgaagttattaaatcattagtaagaatatataagaatgtaattagtggaaatacatagtaagtatcattggtttttgccacatatggtgagcaattttttattttaagaagggaaaatcaatttgtacatagatttatgtcacttattcaattgaataatacagaaggatttaaagtctaaagtaaaaacaggcaaaataataatatgtttttttctttgatcgctcagattatcgtattaaaatttggattatgacataacaacgataataatacaaactagttggttatgaactctgaataaattattttaaagaaagaatactactatttaattataaaatgactctgcatcatatcaataaggtaacctcgttattataaacgtcacactacacactattagtattttaattacacagtgaaaaaatttaattaattactaatctctgtccaggtacataatattattccaagatacggtccttcgttactataaactctataaaaaccaattttcacttccaattgaattgggaacaaaccaaatctctatctctctccattagagcttgaagcagccatagcctaacaaaaccttcaaca

SEQ ID NO: 15193 - DNA, 3000 bp, Unknown
  misc_feature (1)..( 3000): cDNA_ID_3095271_gDNA_ID_2926081_Annot_ID_196366 3000 nt of promoter + ATG
aacataagtaatgttgccaacaccataatcatcatactttgatgtttcgatcatcaaaatctggcattgactaatgttgaccaaacaacatattcattttttttttaataaattgtgttctcaactttgttcggagttagttttctaagaaaatggaattagatttgattcagtttcttctacttttggtaggctaggataggaggctccttcgttagcatatatatgggtattattccgttatcgtttcggatcaatcttttgttcttttttatgactgaatagtataaatctgagcggaatatttgagaattgaagagctgttaaggggaatgatttgatttagggttatattaattgtttgttgtggattaatggagttgataaataaaatagctttggttagtttgatttttttagcagttggtgttcctttagttagtagtgttttcaattttgatgtagttccttttttataagcttaacaaaattttgatcgcagatcatacaaattacaaaggattgatttacatctaaggatacttacgcaaacctgtgtacgctaatgagctgggaagaaggacctttgaaatgatcaaattagctttgctaatgtaatgtagagaacactattcttgttgacagtttttactttctatgatgctaaattttatccgtgtgaatggaaaagcatgcttctattgcaagaacaaaacatcagcgtcagagactcagagaacaaaagtggaccgactatacataagcccaatacaaataaaatgactttggtcaacggacgttaagaattaagaattgacttatatataatttgtagtcaataacaaatgaccacagattcttccacattggataagttatagtaatatgcttcttcttttttataattgttattgcagtagcgtactatcgaagaaaagttatatgaacgacggaagtctcaattataaacaaaaaaaaagaacagaattttttgggccccataaaatgtttatgatatgtatttttagggacttcttttttatcaagaagttttcgatttcgatttcacaaatgtccaagacaagttttcgatttcacaaatgtccaacagcctaaaactaaacctgaatggtagattttacatgttaaatttcactatccatcattcttgaatcttcataatatgtttatttgtattgggcttatggcctataggttttaaagtgcagcaaatatagtttgataaaaaaaagttaagcgaaaaccagatgattaaaaaacaaaacaaaaaatatcatctacaaagtgcaaaagcaaaatacatgtgttcagctataagtaatccacaaattagttaaaaaattgggtcaattctcaattgtaaactaaccataaccctatttcgccataatataccaatttattcccaaatctttccactttcttatgactctttgttgcttacgtcttcttccttatgtcatatctagccattttttttgtttctcttgacgggaaatatataacgtagacgaaaatgtgatgagtggttccaacgaggaatccattaatagtggttgagacttgctacattaagtccccatagaaattttggttctcattttcctaagttattattgcttattaactaaaataagcaatacctttaaattctttccacaacatatgaaatttctctacgcctgacgatcagattcggataattcgaggtggaaagccctgacttcgtcaaaaagttactgtccacttttacaacttttttttttttttggtaacaactttacaacaattccaagtaatttgttagtaggtaataatatatagccaaaaagtaacgtttggataaacaagattgataacgtagggtctaggtaatatgattgatatctagtattacgaggacaagttttatagatttttcaaataacttgtgtattcgaaaccacaaactagaacacatgaacaagccacaatatttccacttgatgtaggagttaattaggtttttaatagtaaacgtgtcaccttattattaaatagatttcatgttaggatcagccattactacagtctgagattaattcgaatttcacacgtatcaaactctttaaatgtttaataaagtattttgaagaagttaatagaaataaattaaaattatcaaattcaataacttaatcgttaatcaaagaatatactatacttacatgtataaaagtaggcatgtcgatcgatataccactacttggccaactttctcttatttccttcatattgataataacgaatgttagatattacacctaataaaaacacggtctatacacacttcatacatatcctatatactatagtaaaaaaatacaggtcatctctgtttaaaaaaaaaaaaaaatttatccaggtcaaaagacttttgagttttgagtttatcttataaagctcaagctgacacgtgtttccctgaaaaaactcgaaactgtttcgaactgttgcttctcagaaatttcactgttcaattgggatttggatcattgagaaaatcaagcaaatatctacttaatttatttttggttgacttattctttcgtggattaatatttgatactcattcatttattcattcatttggattatttttgcttaattgaataatatttttaatactcctcgatttataatgttaaatttatttgttgattcattcattttgtaatattaattgagctttaaaagcgttagatttttttggtgaatgtggctttcgttgtgattgctaggaaacttcgtggatgctacaaaaatgaccgactaatgaactaactataaaaaaccaacgcagattgtattgacatcacaacatcaactcttgttttgcattcttacccatcgctttcacaaaacaacaaatttacaacttttggttttcgttctattttcggtttatcaattccggttcagcaaataccagaaacaatg

SEQ ID NO: 15194 - DNA, 3000 bp, Unknown
  misc_feature (1)..( 3000): cDNA_ID_3095251_gDNA_ID_2926081_Annot_ID_196371 3000 nt of promoter + ATG
tagaagagatactctcaagacttccattgaagtctacgagagcagtgagatcgacttgcaaaaagtgggactctttattcaaaaatcggagctttattagtaaagcagcagcagcaagagaaggagagtctcagatggtcgtgttgatggatcacaatcttcatttagtgagcttcttcttcggcagtgatacttctgtagagattaaaggtaaacgtatttgtctaaacgacgattcagattcagaacaagtcaagatatctcaagtttttcactgtgagggtttgttgttatgtatcttgaaagatgataactttagtcttgttgtttggaacccgtattggggacaaacaaggtggatcaaacccagatgttctttcgaaataccccagggatgtgacatgtacaggtacgctattggatacgacaacaagagacgcaaccacaagatcttgaggtttatagattatgaattccattaccctcgagacaacgttgttttgtggtatgaaatctatgattttgagtctgatttatggacgactcttgatgttactactccacattggttgataaattgtggtaaccgtggtgttactctcaagggaaacacttactggtgtgctaaaaaaaggaactctgacctttttctcaatgctgatcatataatctgttttgatttcacaagtgagaggtttggtccgcttctgcttttgccgtttagtgatttggatggtgttgttactctagcttgtgttagagaggagaagcttgcggctttagtttgtcacgaggatgttgttgaggtttggattacgattaagattgaggccaatgaggtattgtggagcaagttcttgacagtgaatgttgatttgggtgatgagattccgagttcactgacatatggtagttttttcatcgacgaggagaagaaagttgctatgatttttgataaaactttggatcgcggcgacacagttcacatcatgggagaggctggatatggtggacaagttgatctcggagaaccggttaataaaagacgttgcccacttgtgtgctcttatgttccgagtttagtgcaaatcaagaaacctgcaggattccaaaggaaacagcaaagcaagttagaaaagcgtcaatatgttcgaaacatatcgaaacttcgcgcacttaaaacccaaagttcttggacattaagtatgtcacttgaatgtcatcaacagtaagatttatgtttcttggctcgtacttcgatttattactgctatgttttagactgatactttactaaatattacatggcttcatcaggagcttggtagagtgagaaagcattgccagccgatttttgcccgtatagctccgtctcagtttgtttcgggccattgttgaaaggacttcctgtgcgcttttttgtcgatcaatagtttagaccgctcttttttgttgccactttcttgcttaggggagtctttagatcgagttttcttcatcttcttactaagagcctcatcgcttaaggtttagttgatgcgatgaatctcgaaaggattatgcttccatgtttttttcctttttttggcatgggaccatgtttgtaggttttgcttcttgtaactcctaaactttcattttatatgatatttacattcttatcaaaaaaaaaaatatatatattacatggcttcatgctaaaggacatgatattaatcagatttttaaaatttaaagatggtggaacctcaggttttcgataatataatttagagatagcttctgttatctggcctagtctctacaaagtttttaaaaccgaaccagcgactcgactagatggcattgtcgatatatctatctagcagaatttcagtagcagagtctttttagtgagagggtcaggtgcattatcagtccttggaaacatcaaagacaagagcaagttgttcatgctcaaactaaaagattaccatccaccattttgggatatatattcaacttcttactctttgacatcttggaagtcttccacatcctcttcttcttaggtcgttatcttcataaacatcttcttcagtcaaatctgcctcaccttctgagtagcaaatattttaaaccagaccatttgtacttctgactattcttctgtccgatatgtatctctttagaagatcttggtgcataatggcctaatggggatcatcattaattaggaaataaaaatcaattcttatatgtgctgagaaaaaaaaaaaaaagctttgaagttaaaactagaaataataaaacatattggattaaagataattaatgtggatccatggaatgatcgatcatgacgagaaataaaatattatggggaatatataaagaaagaaaaatgtgcaagatgattagtatgaaaataacattcccttagtttcacaatataagtgttttggagaaatttttgtttcgaatgttttcaaaattttatgcaaattatagatttttttatttttataattatatatatatattatatggtctattttatgattggttaactttttaaaaaaataaacatgagttattgaggtttcaagaagaaagttttatgtttatggccatcaagactgaaataatgttttgtttttcttatttccgtcgactttcgtctttttcaaaatcgcaacttttatatatatttttttctctcgcctttcgatcatcggaaaagctctttttcaagtctccccaactcataactttgaattttctatttgccccctcataaaatttgcttctattctctttgtttgttggagttctcaagatctgtttgattctgaatccttgtaatttttgtatccaaccagtaacaaatggggttttgtgaaggtttatgagtttcccatattcaaatggcgatcttttagtctgagtaaaattgtggttcttatctgtttttgttaaagtttcgatttttattttgagggttgaattcgagaaattttg

SEQ ID NO: 15195 - DNA, 3000 bp, Unknown
  misc_feature (1)..( 3000): cDNA_ID_3095242_gDNA_ID_2926081_Annot_ID_196373 3000 nt of promoter + ATG
tcgtggctttaccggtaactttttgggcaatccaaccgagcccatcatacaatccttctccagtaaccgcacaacttgcttgaatatgccaatcatggttcttgatactgtgaaggttaagtgcatccgtgatctcagcaggagtcattgcgtctttcagatcctgtttgtttgcaaaaactagtatgaccgagttttgaagatcctcatgaccaagtaacctggctagctcatctttcatgaaagagattctggctctgtctgtgctatctataaccacaatcacagcatgtgttccacgatagtatgttgcccatgaagttcttagcctatcttgcccaccaagatcccatacctaaagacaacatatcataaaagtaaacatcgcctcaaatattcgattgccagtgtccaacagttagtttttgacaggaaacaattcaaactttagtaagtttagttacgtttatattcatcattgagttttgacatataagaacacatgcagattgtcataaaacagagatgaattcatctcaggccatgactttgaccactgtataaagatgttccaaacagtcctctggcaaaaaaactaagctaatgggaaatagcaaacagttcctccggtataacaaacaagctagataaacaacatctacaaaaatttactatacaaaaccataaatcgcacatacgaaaacgttcattatgagtttctgacaccttctcaaccaatcatgacaagaacttagacaaaaacatcatccatttttcaacgagaaaaatgcacacacccaagcaagaaacatagctagggacaataacacaatcaaaagatggcaatggcaaatttaagaaacatccataaagtttcaaacttctaaaacacgtccctagataagaagctaagaaacaacttcacccaaatgaataaagaaagagtccagtacctcaaagcgaatattcttgtagacaagctcttcaacattgctaccaacagtaggatgagtagtaacaacttcacccaaatgaagtttataaagcgtcgtcgttttaccagcattatccaaaccaacaacaacaatcttatactcttttgcaggaaacatcatgaaccaaaacctcgacatgaatgctcccatctcctccaatttctatcacaaacaagatcctaatcaaataaaacacatcattacttttacgatcaaattgttctacaaacagagtgaaatcgagaaaccctaaagatacatcctttaaattgacccatcaattttacaaacccaagtaattgaatcagagaagcccagatcagatttggatacaacgatcccagattcgataaagttaaccaaatctaaattatatatatacaaatcgggaaatttgtgatcaaaccttgaatcagctagaatctgaagattgcagaggtaagaatcggagatcaaaaaaagttcttcttctactattttgtaagcttttgaggttccttccttaaagcagatgggtggagagaagaagaagaagaaaagtatgcgggaaacaatgtcaaaactgtaaatatgatgatctaaattattaataacttttaatataacaaatattaaaatgaaaactatatagtaatgttttcttttacttacccaaacggctgcagcctctaccgtaatggcaccgaacacgtcaccgccattagccacgacgccaaagacgaacattgttgaagacttgaaatccacaaagatgtttttaaacgagaaaaaaaaaaactcaaacgggcttagggcctttccatatattttagattataacaattacattttctcggcccacagaagtatataaaattaaatagaagtaaattatattgaggatttaaaataacaaatttaattataatttgaaatcatggttataatacgatcgtgtgaaatgttaattaaatgcttatattgattattttattattaaatttgtgctaattttggtaacgaatcttatttttgttattgtatacgatgatttaaaatatatatatatatatatatatatatatatatatatatatatatataatagttctagaaaagtctaattggattttttagatcctatcatagttgatagttctctttttgtatatggctagcaatgcggaatcgactctctacattagattcaatgaaggcttggaatgtgaacttgaatcgaacatgtgtgttatgtaacactcttatcgagacacgagagcacttgtttttcagctgtaagtactcgtcggcagtctggtcctccctagcgaaaccactactctagtgacgattctctacaatatggcaagctctagtcattattattacttctgatcactgtaacagaatccatatattcttcctctaatacagttttcaaataatggttcattcgatttggcgagaacgcaataaaaaaaacacacaataaaactctgattcttatcacacatcttcctaagtgaatagataagctggaaaaaaaaaaaactctcaatcatttgaaaggagaaatatagtagatacgaaccaaatctccaaacatggtttgcatctaaaagtccttaaaacctctcttgtataatctaatttcaaaacaattttggaaaagttacatttgatgtatcctaactttattttttcttggtcgaatttaatattttattaaaaataataatagtaataatcacaaaatctaatttgatcattcttaggtgggtaggtacacttattttacatacagcctcgacggcaccaaaacatagaatatatatataaatacaaatacaaatattccaaatataacctctctcccaaagtcctatcatatcagaaaaaaaaaaaaaaatccaaattcaacactctcacacttcgatatctccgccttcattctcctcagagccaactgtcctgagatttcgatttcgatttctccgatctctcttcctccgtcgccggcgaaacc

SEQ ID NO: 15196 - DNA, 3000 bp, Unknown
  misc_feature (1)..( 3000): cDNA_ID_3095235_gDNA_ID_2926081_Annot_ID_196375 3000 nt of promoter + ATG
gaaaacgttaatgcatataatgacttgcaacaagccaacaatgcgtaagagcttcttaagatttgaacataataatttgcaacactgtcaataacccgtacttcaaaatcaaactttattagaatatatagcgaatgaagtaatgaaccatggtacttcaaatgtactactatcttttagagttagggttgaattgtataaaggatattcttaagcaatgtttggttagtttagtgtttgctttagctaggttagtttagtgtttgctttagctaagtaagacttaggcgtgggcattcgggttcagttcttttttttcgggtatcgagtctattcgggtaagaggttgagaaccattcggatattctaaaaatttggtttggatcaggttcgggtcgattcggttattttagtaaaaatttaaaaataaccaaaaatacccaaaatattttcgggttcagatcggattcggtttttttactcatatatacctaaatctacccgaaataccagattaccgataaatatattggttactttttatccaaatataaccaaatgtaagcaaaatacttaagttacctaaaaaaaatctataacattggttacttttatcccaaatatatccaaatgtatatgaattactaaaaaaatctagtatatttggatttataattttaattttgggtgtttgagatattacaaatataaatataactaatattttaaggtttacatttgtattcgggtacccacaagtattagattcggttcgagtttggttcgggtttttttgggtagtgagttctaggactcattcgggtaattttaaaaatcgggttcggtttggttcggttatttttcggattttcggttcggatattcggttctggatattataaaactaatacttaataaaattagatttattttgttacatgtatatacatggttatatatatgcacacagggggaaaaagtcgaaataaagtgataagaaaaagggttttgataacttgattgctgtagagggaaagtatcatcagcttttcgttttggggagacgaatctttgtttcttttttcgtgtttttcaatgttacttataactccattttctatattgctataacaatctagcattactcttttataacacacacacacacacacgaataatcgagtatctaatttgttttatacaacagaacaattactgtattaaacagagttccacaacacttaactatggtcaaataaagtttatgtacttgttttcttttaacttttgtagttgaatgttcaaatgactaaatgagtaaaacatgtacactatcaataactttaatacgttgacaaaaaacaatggtctagtacaaacaatataagatattgatttagatgcatggcacaattttggacatgaaaatcgaggcaagtattagaatacaatagtacatgattgataggtataaaaatacgtacgagtagtcactattgaaactcataatgtatttgtatcattgtcctctaatttaccagcagctaggataattgcatacatgcgtacaaaggaagagtcatcttcttttttattcgttttttaaaaccgtacatttctttaaattctcgattccacctttttctttttttactctatttaaacttttatttttgttgtttacttttacttttctttatatgaatagaccaaacggtcaaatatttggggccccttcttttgcatgatttttagtaaatttctttttgattaatggttgtgattttaatgtgggttaataaagtaaagcttaaagtctcataattacagcatgggtttaaagttataaaaattgtttaaatagcttattattctatattgttctcatttcaacattcagattattactgccataacttttactttttcttttacaactatttaaaaaaaaaatctcagcctttttcttcttttgtcctttagtggtcagtctaatattgttttccccaatttttactgacattatattattattactcaaaataacccgatcatacaattaaatcaaaatttaccaggacgagtagtgttaatagatttacttaagacacgtgttacataattattggattaaaatcagtttccaaaaaacgaataatccattttcggatatgcccgatattccacggtagtggaggacaaaaacgtaatttcggtattaccacaattactgacacgtctccagtaaaaaggattcaccaccacgctaagatgaaaacgacaaaaaaataaaaaaaccatctcctcccattaaaacggtaaaacaattaatatccgacgtggcatttacagtgcctagtcagcttttttacctttgaagtctcttcagcttcggacctctctctcttactcctttataagattaagccaacctctctttacccacacaatccacacacacacacataagaaaagaaattaacaaattatcacaaaaatacgttttcttgtataataatttttctctagatttgtcgcttaccttttgaaattctccggcgatgaatctcgccgggaaaaggaatattccggttattatttctgtttccgttactagtgactcttaccatcgccgtcatgtcttccgtgaacatcgtcggacctgaaaaatccttctcctagactttttttttttctttcttctctttgtattattattctttgcttcgtttttgtgaagaagatgatccgctgatttcagaagttttcttcttctggattttagctgagaggtttttggtagattctgtttcttcttcttcctctgtggttttcgaatccagttttggaatttttgaagattttgtttagtttctgttgaagagatctgagatatttgaacgaagcagagtgtatatgaaatcaaatctgtgaaaatttctttgaatttgaattgactttggacttgtgagagaagttagatcttcttcttcgtgagct

SEQ ID NO: 15197 - DNA, 3000 bp, Unknown
  misc_feature (1)..( 3000): cDNA_ID_3095263_gDNA_ID_2926081_Annot_ID_196368 3000 nt of promoter + ATG
tatagatgttgctcttttttatagtcttcattgtaaaaaaagaaaagtacatgttttgacttcaaactaatcataaccaaaagttttgacaaaattgattaatgaggaaataatcagtgaataggtccatgagtccatggccattaaaatagagagtaaaccaactatatactgtatgatgaaccggtctaaataatatagatttaaatggcaaaaaaatcccatttttcagtctctttgatcagattgggattaggttagacctcatattttaaccctaattcagatgacaagtactctaactaaatctaactattatttcacatcattatgtaaatgtgtactcaaaaacacactagtacgatttatagtgtaccttcttaatatatacggcattaaattgttttcaaccccttaaaagatgccattcaacatctacaataatctttgcgggacaaaaaaggtcaaatacaaaagacaaaactaaaagcaataacattaattgggtcatatacaactttacatttagcacttttgactttacaaaatcaaaacgcatccaaacactatacgtaagcttgtgtaatagttagtgtaatgataatggtaccataaagctagcattactaaattatatcaagaccatgtaaacaagaatacggttgattatttaaattgttgtgtacaaaagttattaaatcactaagttctatcaagaccatatcaatcaaaaaaagaacttgctcatttaaatgattgtatattcgtatcgttatcgtatgcatcatttcctccctttaatattttcgaatatctacattctagtcaagtcaacatgttgcgatggaggaaaagttcaatagtattgaatttaggtcttgggaatcaccagatccctgtacagttggaattttagtcataaattttgtatagaaataaaaccataatatatgaggttcaaattctaatagtttaggattcaatgcgatcatttaacacttcgaaatcctatccgagttgaagttaacttcttctttttttggacaaatttaaagataaacttaatttcctcttttgtataggtaataggttaaaggggttaagaaattgtttcaggtttacgtatttcatatgtagaaatattactgaatcatatcaaaatgtctttttttttttgtgtgtctgattttggtccagatagattctgaattgttttaatcactcttacgcattagattctgtcttttttccacaatggctaatttgattaagaacctaaatgattgtttgcgacacggccaattcagcttagtcaacaagtttaagcatgcatttagatgtcggtatcattatgcaaagtctacacaaaatggtgtgtgattcgttgaagctgagtcagcttttaatttaattagaaaagtctttatctacacaaagtcgcaaactattaatagtaatatgaaaatattcttagatgaactttgcaaattgcaacaccttcatacaatttcaaatgtaacttacataatcaattaatcaagtacattttaaaaaaaaatattttgtaaaaattataattgtgaaacttaggattttttttctttctgtcgaactatatttatagattataatgcaataactgaaaataagattacaagaaacagattaaccacaagatgtacatttttcttggcaacatatatatatatgtgtagaagattcaaaaagtacgatttgcttctaaataaatgatggttgttttatcaaattacacatttattcaaaataaatcaagaaaatgactaaattgaggaataaaagagatcgacacgttttcccgtaacgcaagtgctcggtctacctatttcaatgctctttgtctcctcgtcatctatcttacagctgttgaaacccacacccatttattttacatatacacatacttcatgtttttataattttttttttttttttttactataacaaattactacatactcttcgtctattccttgggtttcacaaaacaaatagtatcgtttttgaaactctactttcatttcacaaaaagtaattttgtatttttaaatcaaatttcaaattttttctctatttttaatttatttagagaagaaaaattagtttgaatattgtaacaaagaaaattgtaagtttttttcttattttaaaaatttacgtaaaaatagtaaaataacactatttaaacagagaagacaattcacaacccatctgcataatgtctttgcttggtattatatgtattttgtgcgacaaaaattgttttttttttttttttaccacactatagtaactttcaagaatattgacgtgattctgatcttcaaggctttcaagttagccgtgtataataagaaaacaaatatataatattacgagtacaaaaagaatttttaaagagtttcaatcaaattactagttagcctaaaaatatccctttcaaaaaaaaaaaaagctctaagttcgtataaaactttgttaaaggaaataatattttgaatcatgtgactggaattaaaattccaaataaataattgggaaatttactagggagacccatattttaggtttaattactagaatgatatatcaaaaatgtgagttatatgagtaatattttggtctaaaatatcctttatttgctttgttaggaaaaataatattacaggaatgccattattatttaatttcagcatggcaaaaagaataattttatttacgaaaatgccactccagtattttatttccaataatttgtgcaatataacttttaatgaaaagaagtggaaaaaggtgaatgagtccaaagcaagaaagtcgcaaagacttctacaaataagaaaacagaatgagagttgaagcacttcaaagcttttcagctctctctcttctcttctcttctcttctcttctcttctcttttctctctgaagaagactactaagcaagttttaattggatg

SEQ ID NO: 15198 - DNA, 3000 bp, Unknown
  misc_feature (1)..( 3000): cDNA_ID_3095325_gDNA_ID_2926082_Annot_ID_196394 3000 nt of promoter + ATG
agggagtacgcagatgaagttaatggagttatgtgaagccgacggagtaaacataagattagtttgatatgttgcatttgtttctgcttagtttttttagttttaatcagtggttttctttgttgtttccacatttgtttcagttccttaaatgataattggtttcccttttgagttttaatattcttagtttctcaaaatcatataatactaaactcctatcagctttcattatctaaacaaataaagattccaaattcttttcgtaattgatgaatctctctcagataaggaatcagttgtctctgttggtttattgtggagaacagcatgaccctagcatttgtgacgttattttctataatttaattgtcaaagtttatataaaatgcgaaatgaatctaaatttgcctaagttatatagttgttcttaatacctctagattctctacagcatcaaatcaagattttatgaagatgaagaactaacctttaaaatcgttccacattcgtcagattgacatcttgattatatgatagcctacaaattaacctgaaattaaaaaaaaaaaaaaaattattagatgcagagaatataatagatacttaacaatgatattctgatttagcaatctatataacaataatatatgattgcaatcatatcaattcgatatcttaacaaaagattatatagttactactcatccttaactcttaatttagactccattatttagaaaaattacagttctatcgtctaacaaacaatagcttgatgaagaaaagaagtgcattggttgataaaggtgaaaaccacatcactccatctgctaagaggaagtgttcatcgagcaaaaacagttaccatagtcaacacaaagctaaatcatctagaaatgggtttgtcgttccactgaaatctatatttgctcggttaattacagacataactaaatccaagcacgtggttttagaagagtctctttgtcctacagggaaaattgtagcacaatcttatacaggtatatcattatattctacaatatgctaattgatatgaacctgtagttaagacttcactactttgttatgtgtacaaaatggcttatatgttttttccaaattttcagttgatgagaacacctatctaacacctgtttgtcttagacaatcattgtcttcgcaagaacaatactctttatgcccgccgcccacatcaaacctatcaaaaacgacttcagtggttttggaagagtttctttctcctttagttaaaaatctatcagtgactgatacaagtaaatcattctctcgaataagagtataacaaatagttctatacagtattgacttttgatattttcatcaattttgtttgtgtctttttttttttttcaggctcaattgatgagaactcatatctaacacttgtttctgttagacaatcattgtcttatcaagaaccatattctttatgctctgtgcctgtgactccatctaatgtctctcaatggagtcaatatataaattcttctggtatgtttatctcatttatattttttgtttttattggttaacccatgaattatgttcaaacgatccttatcaatgtatgcagagcctcttgaatgtttaaccactgatggatcaatattatctgatataccaattaaacagtcaacttcagaacttggcagcaacgactttctaacttcaatcagatcagaaacaatcaaatgtgagcataatttgtctacactagcatttatgaagtcaattcaaagcaactgaaatatatgagtttttgtatatgagttttgtgtagatactattgtttttcattctaacataaataattcaatcatgttttcagcatacattgcaacagaaaatcatccaaatataaagactatcagaataagccaatcttattctcaacttgagtcagacaccttcttatccgacataagaagagacgctactaaacgtgagtttctgttttatatagtttctgactttaagcttttattcatcttaattctaatatgaaattacactttaaaactttgttctttttttttgttagattcgattaaccaggtttctaaacttgatacactgaaagtgaattcaaatacgaatagaactaagaaagggttttaggggacatatcaaaccaactcgatagaagaggacgagttgagccacttagagcatacaacatgctattcagcatgacttcccttggtggtaaagtttatattttattttcttacatattattcttccttgtgtattgaagtttattgtattttcactaatatgatttgttaacaattctgtgtttagcaagggaaagaatccgaagaaagcaacagccaaaaatcaagtgagaaaggatcttattgaaaagctcatcagaatgttggatgcttccaatccatacgttgaaaaattcaggctagcaaaagataagttggatagtaataatggggaaccattctatatgcagattgttagtgatagggtaggaaaggatggcaaaacctattgtaaccctacaacgtctgaagttacagctttgattcctggagactttcgtcctgaaatgcctacacgtgatattatcgttcaagataagaaaacaggacatctatcaagaataagcgaagttcatccttcttatgtcccaatgcaatatcctctcatatttaattatggtgaagatggttttagaccaggaatacagaagggatatacaggcagaacaggaaaacaagcaaacaagtgtataagtatgaggcaatggtatgcttttagaatacaagagagatcagatgaagctcagaccctactgcgttcgaagcgtttgttccaacaattcttggtagatggatacacaacaggttggcctatattaagtttaaccaatctaatctcagatgtgagaattatgatactgttaaggctgcgagagaaggtggaaacacaaacatg

SEQ ID NO: 15199 - DNA, 3000 bp, Unknown
  misc_feature (1)..( 3000): cDNA_ID_3095319_gDNA_ID_2926082_Annot_ID_196396 3000 nt of promoter + ATG
tgtgatgctaacaatcaagatgtgatcagaagtcactaagtcaagccaagcaataacaggttttggtgcgttctagcagtcctaagtgaacatgcagaaaacagaacatcaagcagaaacaaagaaacactcgactaacacagctcgttgcagagcactgggtgggtcgagtgacaggttgagtaacagacagataatgtaacaggtatactcgactgcacagtctgtcgccagacaactgggtggtcgagtatcaggtcgagtaacagtaaagaattgcagaaactaagcaacaaatgacaggatgcagtaaacagcaatagagtaaacaataaaatcaatcagataaagaattcccgaggatggggtaattgagtagtttcgtttcctcagtttacaggtgattaacatgctcaataaattaaccctagacaacaagttcattaaccaaatctaagtgccaccgcaatagagactctcaagttaacctagtcccagactcaatcaccattgacgagagctaacctaacaggcattacgaatcaacaagttaaagccaaaacgctccttgcaaccaataccttggtacagggtcacgaatctctggaattagtggttcagacatttcatcgaacaccttttgggcgcggaaatgtctgggctcaaattccagttgatcagaaagcaataggcatttagaacaactaatccataagggatttatcaatcaatactcaatcacctagcatactgagaattctacactactctaacccatcctcagaaacctattcactacttagacatcataacagaaagcataaacgttgaacaagttgaaaacatgataacaacagtgtaacagcaggatgatgacagaatgaacaacagtaaacgaaatcaagaacaaaagctgaatactgaatactgaatagataaagagaaatccagattacaaaaggtctagaacacaaggtctgcggaaataaaactagataaaaacttgtctgcgaaaatgtgaagtacatactacttatagccaaatatcccgaaaccctaatactcaaaacgacgcagtattgggacggattaagaactgtactcgacccatgtggtggagtgggaggtcgagtgaatagctggagtcttcttttcttccttgtgctcgagtgtctggttcagtgcggaatgaagaaggctctgaagcttgtcatcgagtatgcattcgagtggtggcgatggtgatactcgacttccaggtagaatgatgaggtcgagtactggtctggcaataggatgaagacactcgacctctgggtcgagtgatgtgatcgagtggtggtcaagagatggagatgaaaagtgatgatatgatgctaaagtgatgacaaatggatgctcaaaacatgcaaaatacacacttatcaatcaggttcacgttcttttgctaaagtgcaagatgccttggtaatgtttctatattttctttaaaattattgataacaattttttgttttttaaagattaacactatttcttacattgtctaatgttttccttataggtggcaaacaatgaagactcttccttcattgttgtgatgaaaaaaaaaacaccaaaaatctgatggtacgtatgttgatgaaagagcccggctagttgcggaaaaaattgatgaacttgtgcaagagcgattgtctgaaatggagtctcccaatggagaagttttgacagtagataatctcagccaagaggagaaaaacgaaatctatcttaaggcaaatttatagattatattttatgaggagttaaaatacatctcattatatatgtacttgtgtttttttttatagattgttggaatatcaaaacaaggtcgtgtatttgaatggttcatcggtttccccacaacctactgaagaagaagtaggaacgttagcccaccgagttgatgaacttgaaaatgaattgaagaagagtcgtgatgagaatttactcctcgatcgagaaacgtcttcaagcaattgaaattgctatgctttagactatggttttattttgtttcttcgtaacactttggctttggcttttatttctatttcacaacattctatttgatttggattttacttctttttctatttgtttactttaattatttattaataaaatatattttatatattttcctcattaaataaagtatcattgtaacaataacttaataaaacaataatatcaaatcctcttattattaaaagagaagtacaaattgaatttttgtctaatttgtccccaattttgatttcaattttggattttgttcttcatgctaaagggtaaaatcgtccaagacaaaaacttaagtaaacaggatccgcgttttattcagatgggtgggttacgtttaatgggctttcgatcacagcaaaatctacattttcggtggaccatgaagattgcaatcttaccaaaatcttaggcagaacacgtttagttctatatctcaacgaaatctacattgttacacgcatattcctttataatcttctgtatattcgattacgattgttagaatctttaatcatataatcattctcctcaataatcagtataaaatccacataaacggcatattcgtttcttctacctacacattgacgataatacattccatcaattacaaaaatcatgtaaacttatatgattaaatctagaaataaccataatcaactaaacaatattaaccacttatctatatatggccaatcattatgaactaaacaattttcgaatcattagtcattatcccatattttcgaatcattagtcattatcccatctttgatttgcaacttatactccaagatactgacgaatatctttgaaatattagatccagcaaccctagcatcctttctcactataaatatcaaagccattctcatcacaatccatcactcaaataccgcatttactagcaactaaataaaaacaatg

SEQ ID NO: 15200 - DNA, 3000 bp, Unknown
  misc_feature (1)..( 3000): cDNA_ID_3095394_gDNA_ID_2926083_Annot_ID_196404 3000 nt of promoter + ATG
attagaggtggtgttgctctttttttggggaaaaagctccatctttctaatttcaaatgactttttatttgctaattgcttcaatttcaattttaagataatatttaaacaatgagagtaaaatttaaaattcagaaaatcgggatctaattttacaataaaacataatttgtagggaacaaattttgagggccctagtcccaagtttcgatatgctacacatcgcgccggctttagggtattgtaataaaatagcgagttaatcattttccgattatttttatgtttttattagacttgcttattgaataattcctcttatgtagttgttttctttcaaaatattaaaacaaaaacgaagtcgtttttcaatatacaaatataatcaaagtcgttttgatttaatgaaaagaaaaaccctagttttctctctatatatatcaatgcatccgcctcatctttcttccactatattccaagttctgaaaaagtctccacataatctccttcgttggtaagtgtgattaatcatatatttttgtttcatatttttgtatagaaaacataaatctaaatatatagtgtttattagataattttaggaggctatatgagttgtgtttatctgaaaggatttctatcaaaatatatgagatatactagatctaaaatatttcgatatacaaagcactaaaattccaaaaaaataatttctacttcttatttgtgtataattatattatttaagaaattaaaattgtattgtaattgcaaactttgatgtcttatgtaatttgtatatcatttttctgttttgcagttatttcgagaaaaaataggcaaaacaaaatgaatgcaaacccatgcgaagtttgcaggttccaaaataaacaatgcgtcaacaactgcatgtttgctctgctatttccttcaagtgatctagagaaatttgatgtcgtcaatcgcatctttggactcgaaactttgacattctacctcaaagacctttcacctatggaacgcatagatactacccgcacactctattacgaggcaaaaccatgctttctgaacccacccaagaacccctcaaaattcctcgaagctcttctaaattatccttaccaaaaagctgaagaggtgtccaaaacaaagaagttgctcgcatcttactcgagaccatgtgtagtattggctcttcctgcaccaaaatatactcagtcgaaatctaaaccatctgttttgcgcaaaagaaaaagaaagactaaatcatcggatgaatcggccattcgtgtggttgaagattcctagatggtcattgttgaagatttttttttctttctaaaagtgaatctttggaaccaaatatgcttttaatttaatttcaaataaaataaaatatgcttttatttctatgtattttgatttctttttcttgatgacttatctttcttttgaattatttatggattttatcaaagtatatattatccattacatatacttaattagcgtaattgtagactttttttttagaaaatatttttaacacatccagatgtttgcacatatcctttcatgtttgattaccaaattttccttttttatggtcaacataagaaaaaaacttactattcatgtgttaaatatacttacattattgtaaatataaataaataaaatgtaaaaattcatgaaattctatcttaaactttattagcattggctagcgtgtcaaagactttttcatattagactaggtatttaattattagatttcataccttttctgtttaattattaattttccccttttaatggtcaacagaaaagaaaagaaaaaaacttactattcgtgtgttaaatctacatacattatggtaattgtaaatcaataaataaaatgtgagaattcatgaaattctatattaaaactttataatattgactcttttaacaaaaaaaactttattacattgaccagagttgttcaggactttgtttttatattaggctaggtatccaattattagattgcatacccttttctgtttaattactatttgttttccttttttatggtcaacagaaaaaaacttactattcatgtgttaaataaacaatacattattgtaattatatataaataaataaaatgtgaaaatatatgaaattctatcttaaaccttattacattgatttttttaagagtttaaatgggtgcttgaacttgctttgagatatagatattgtgttggaaatgaaaaggtacttggaaatgcttagaacatgaacttaagtggagatttggtgattgcctaaaaaaaatatgggagatttggtgatatgagtttagtctagggaagcatttgtcttgagttttttttataaggaaaaatatatagcggagtttatgtaggtttctaatttatgttgttttagtatacatgaatttaaaagaaatctaacttctttcaaatttaactgcttttagttcaattcttttgaatttgtttaacaacggttgcacaaattgtaaaaacattatttttttttccaatttaatttaacattacattattttatatatatatatatatatatatatatatatatatatttagaaacgttgtaagtattttcacgtttggtctcgtacccaatttaacattttaccgtcactttaagcatatgtgtttagcttcgacaaaacgttgacattgagctagttagccatttgatctacaaaatcataaaatttgactgcaaatagtcaagcaaagtgtcccacgtgattacatcaacaacttgctatacaaactttgatagatctatttattttataatctctacttgttgatcatataatttcctataccctcttaccttaatataatccattaggaaagcttaacatgccatatacatcgtgaaccaacgacttcaataaataccagactagtttcttattgtcaagctcatcgcatccacttacttgac

SEQ ID NO: 15201 - DNA, 3000 bp, Unknown
  misc_feature (1)..( 3000): cDNA_ID_3095390_gDNA_ID_2926083_Annot_ID_196405 3000 nt of promoter + ATG
ttgaatcatgagaaccggttcctacaagcaggcaccacgagcttggttcaacaccttcggtaattatctcctagattttgggtttacttgcagcaaatttgatccttctctcttcacatatcacaaaaatgggaaaaaacttgtgcttctactctatgtagatgactttgttggtgatgaaatcaaaactgattcacacggtctttttcttcaccaaacagcttatgcatctgacattctacaataggctgctatgtctgaatgtaatctgatgccgactcttttaccacataaaatcgacaacctcaactttgaattatcctcggatgcaacttattttcgaagcctagctggaaaattgcaataactcaccatcactcggccgtatatccagtatgtagtcaattttgtttgtcaacgaatgcatgctccaatagttgcagattttggtattctgaaacgaatcctgcggtatatgcttaaatcatgcatttgattaggtttactttgcttgtttcgcaagtattcttgtttcatcacgattcacgaacgaatgtattttacgctaagtagaaaatttttatttgttagacagttattgtacaattcaatgactgatgttgtggcaaatttgtcaaaatttatcaaacttttgtcagagatagtatttgacaaatttgtcaaaattatatacgttctgacctaaaattttcgaagaaaacaaaaacgtgttggtaatataaaacgcgtaggaatttagaaaaccaaataatttgtgaacagataagatttgatatgggattcgagcggcgaaagagttaaagaaaacagcaccgcccaacagtcgtcaatgattacaatttgttttcagttcataaattaatccaatgaattgcttatgaactgacgataaaaaagaattgcttataactttgtgaataggaaataataaagtatttgtggttacagagttgtctttatgcaatatacaaaaataaaaatccgaaggaagagacgttgttaggtcttagaattatgaacaaacgtgtgggttgtctctgtctcttgtaagaaaccaagtcatacataatttgcatatataatatgaccgaccaaccaaataatataatgttatgggctcttaacaaaaacatatataaatagtcatttcgttgtgacaagaaaaaaaaaataaataaaaataatagtcatttcgatattttgttggttggctagtgaaaaaattgccttaagcgcattatcgttttttcacaataaaattgactcatgaaatatgggaacgagagttctataaaaattacattttgggtaggccctacactgatgactataagggcccataaagccgtaatgggcttaaaggtggaccacatctggaccataaaaccaggctgtctaactggtatgcagctgtagtccacgtgtcatatcatttcgtcattaagaaaaattcttactaaattagtgattcaatcctttaaatccagtggtccaatttttctttccataaagagttaaagactatactaaaaaaaaaacactgcatcattatatcaatcaaaaggctaaatttttaactgttcacgtttttaatattacgtatatagattagagatcatgggatgatcattagagataattgatgattaagtatgacacgtggcggaatctcaacggtacttattatacagctgtgaatttgtagggtttgacgtagacttgtgaattgtgatctttccccagcatttaattagctggctaattaacctgcaaaactcaatttttttttgttctaatttaactcattaaatccctaaaaaattgcatttcaaggaaacaatatttcttttaggataaataagaaaaataattaattcttaacgggcaaaactcaaactttaactttaaaaaaacaaattcatgaaaaaattgcatgtgaaggaaacaatattttttaaaagttttaattaaaaaaaaggtaatcttgaaatggatgaaacattcatttcatagtgtttagtttccagaaagaatctcgtttttttctgctgtaatttttggggaattattttttatctgtcggttttacttttccttctttgaaaatttgtaattttctttggtttcacagcaaatttttaatcaaattttagatgataaaaaaaatggatgagacattcattattatttttcaaagagataaatttatttataaaattgaggaaaaaagataaattatttaaagagagagtgcaagtagggaagaagtcatcttctttttattgcttcaagagtcaatcatcttcaaacctaatgatcttcaaaaaaatttctggttatgcatctctttcttgaaaaaataatcatataatcacatcaaaaagagtcaattatcatcttcattatcttaatataatcaatcaataattcaatttaaaaggtaaattaaagtaagcaatgtagacccaaaaaaaaaagtctgcttttgtttcaaaacatataaggacagtgaaagggtttgtgcataaatgttgttgcttcatctttctcataacattagctatgagattatgaaagtgaagatataaaacaaacacctaaaagtgaaaagtacaagacaccaaatccttcattttcatctcttacacaaccacactaagttaccaaaaaacagaatctgttctttttttgccttcttgcagatttcttcagagtcaaagacacataaaggttcgatttttatctcttaaaatcttcaaagttttcgtttttcttttcaatttcgttgaatttgattctgggttttgttctctgttagtaactgaatctatgtcagctttagataattctagttagggacttatggttctcaatttcgagtcttttgatgttatcttgttgttttaacggatttgaatctaaaatcttggtctccattgattcagatttataattgagttgtgagttttggaggccatg

SEQ ID NO: 15202 - DNA, 3000 bp, Unknown
  misc_feature (1)..( 3000): cDNA_ID_3095377_gDNA_ID_2926083_Annot_ID_196408 3000 nt of promoter + ATG
agcctatctcgggtaataatattattttttggtattataatatattgaatcaaataaactaatttggaaattgtgtatatatgcatgcactcgtatgttgatacaatatatgtgtataaatgattactttttgatgatgagggtattgatgcttgtatgggtttaaagttataaggaagagtttcaaaacgtgaaaagattcactgtttaataatacattaatctctatatatatctacacacatatacatatatggattgtatatgactagcaccaaaatcgttaagacatttttattttacatgagatgcttattatattcaagattatatgttaataaatgatgtgtttatataggtatgatgttcattttgggatacaagacccttatgaagattgtgtagcgacgatgaggctttacacgagaatgagatatcagaaacacaagattgaagcttaccctttagccgccgatgcgcagaaccgtagcaaccaggtggcttggaggcagagtgaggccgagaggatgtctcctgatgaaatgctctcaatctctcgttccgactattactgctggtgcttagactcactagcttaatttctaaacttatggggttatttaagtggtctcttaaaattagtaattcttcaaacttttccagagatttttaatttagtagtgtaatgtcgaataacattggttatgattttgtagtagtatctaaattttcgagtgtgtgttgtgtgagatgcctagattgttattgaactttgtaataatgcattaatctcaattattgattaattgactgctttttttccaatcacacattacttaaaatatgattccattacttgatatttaaattttagaagaatatacatttctgttaaatatattaaacacttttattttttaaaaggtatgagttaaaaaaatcaactttaatactagataaaaaaaacgaaaattgaaagaaagcaaaatattagaaaaactagcacaaaacatactgatatcttattgtataaattttattttcaaagttagtccagtcattaataagatcaccacacatgactcataacttaaacaatatgtaacaaacttttcatcttgtgtggcttttccttcatatcatataaaagatttggacagtcaatcatatacataataaaaaataaccttattttttgtagtaattacataggtatgccattagaaataaaaatttaaagagtaaattaattcatctttttaaaggttaataatgtttaagacaataaattttgtgatatggcatataatattttgaataactttaacactaactaattgaatattttcaataaataatcatactcgcactcattagtcataacatcatcaatttaattctttttttatgggattattatatgtacttgatgactaaaactttgagaatattttcatgaataatatgaatttcttcaattgattacaatatttatcaaaaacagcagttaccaaaaataatagtttcatattaaattttacacgttggtcatatagggaatccttgcgtactgcattctgcatggcatgtcagcacagtgaatcagcatgtgatataattttactataagtagagcattcatcagtcgtgaattttcggaatatatattgatgataacgtcggttgttaaatgacacaaaaataatgacgtcgttttgagaaccgttgtaacatcgtcgtaacaacaatatagaaaagacacaagcataaaaaagaagcctacgcaacaattactacaacatcaatctccatattgaattgtcttctgatatacaataccattccatgccaagcagactgagactttataagtatgtgaagcatctcacgagagttctcagtcaaatgcaactcaacaaagaaatcataagaaagcattgagaagcaaattagttcatgaaccacatcacatcagcatcctggagaccaaaaaaggaagacagtgaatcactcaatagaagaactgataagttcttgctttcagtgccaagagtgtaagaaacataccgcaaaaacagactactaaacccttttcaagaacaatccgaaggaaattgattcttctccacatcatttagcatccaaagcaatgaccaccatctttagttacagctctacgcagcacatctaaagctttcttgttcttttaccaattctaaaaatctcaaagaagagatcgattccagatacaagagctgcataagattcattcaaagttgtcaaaattacagtaccatttttttacggaggaatgacaagttatgagagtgtatcttttcgggtaaacattgtaacgtagtgaaagttgagagtgaattgcgtaacaaccgatagaatgaaccaaaaagaaaaaaagaacatcttttctatcgcccaaaaataaatctaagggttttctatttattaggtgtatattgtcttttctagtactaaaacaataatggctaagtctcatcctcacaagagattaaggttgagaatatattgtattgttgttagcataaacaaaaatagatgaaaccaatttctaccaaattcatttttttttaagccatttagagtacattgggtaacaagtatttcaactaaattactctaagacaattctttctatcttttatgagctgaaatatggaccacttttcttttctgttctttgtggataataaaaccaaacttcactgaattatatcttcaattcacattgcactaaatttttagattgatctcaaaataaagtttttttcctaaatattgtcgtttatcgaatacaattaattaaaggataaattgattaagttgctttgctttgtatataagaccaccatcgctccctcctctttcatcagttaagataatataaattcagtaattaagagagaagaaataaatacaaaaatgttggttaaagttttctcttttttcatccttatgataata

SEQ ID NO: 15203 - DNA, 3000 bp, Unknown
  misc_feature (1)..( 3000): cDNA_ID_3095382_gDNA_ID_2926083_Annot_ID_196407 3000 nt of promoter + ATG
caccttgataatggtgcaactgtaatgtctggaagctcagatatcgtcttcgaggagttacacgaaggatcctgatgacaaataaaacataagtttcttttttattataaaaaaaacaaaagggaaaaacaaaaaatcaagaaatattgagttctttaagtaagtttttctttttgtgagtctaatacaaaagtatagaaacgaatacttacattctgtgggtttacacactagacgtaaaatgaaatttcattaattaactataataacaacgtcaataacataagtaaacaacttgtagttgaacttttatttttcttactaaactttctaattgaagggtatatttttgttaattttgttaacgtatctttaatcgaaggtattttaggtattaaatgtagataaatttttttgttttaatttagaaatccaaaacaaattcaatgtatattagagcttaatagtacaataggatttttatatgtaattggatttcttttgtgagtctatatatgaatagatgcagtcatgaaacatgacaaaagagcatccgaactttggggaatatgctaactttttcttactaaaaatatgaatatggatgtgcatggacacatcttaactgtagaatgtgctgtaattgagaagaaaaatattgtggtgattaattcatttcaaagcctacatttctattatgcatattagaaactatttatcaaaaattcattaaaaaagaggtttcgaatcaaattatagatgaacgtgttgaaggaatattttcaacaaggaaaaagctttgaaagtttaaatgaataaattggattttgttagtcaagaaaagagataggtgtatatgcatggtctgataccaaaggaccatctttgcttttgttctttaacacaattatatgcatgaataatacccttttttttattatcaaatttggaatcttttaggatcaaacactataaactagaatcttagacttggcccatatttcctcggtcaaaagatagtaagcttctaaaaaaacttcaaacctttcaagcaaaatatttttttaagtcaaaattaagaatctaaaacatatgtaccattttgcagtctgatttatactgcaaaatttggtcactcaaaattcgagacaatattttgtttgcgtttaaattgaatactgatatttattgttaagaagatatcatggttccttttcgaattaattcacacacattcatacacaaaatagagaacatgaagctctgaatccatgtgaagttaaattagcatatccaaagaagattgaaatgcgtgacgtcgtaagtttaagctacatttttgtaaactaagagtaaacttgcagaaaaatattacttatattttcttagaaagccctacatattatttatcaaccgctaatgtgaactatggacacaaacgcaacataccgacatgcatacgcaagagcatgatattgcaacagttaaaagaaaagcctttatgaaaaaagtaaaccttatcttcagcgcgtaaataagataagataaagatgatctttgagtcaattaataaatttattttttctttttgaatttctgtcacagaatttttttgttctttattattttgataaaacaaataattttttacagtagtgtgctataagacaatcgttaattgaagtagagagatactgactagtaagaatttgatggaacatgaattcttaaataatatatatatatatctttaagtttataagacaattttcgaaactactttatctttctaattttctttatatgtaatataaatatttgaataaatgatacaaaataattattttattttaacatcaaacgaactttgattaatttgaagagtgatccttgtggaagatttgtacaaaaaaactaggaagaaataaatggtgtataaaattcacattgtttggtattaagttctttgtcaatcaatcagccgcttcgttgttgttccttgaaacccatgtgaaggtagaatttgtgaacttttctgccaggttatagactttaaaattcttcatttctctattgataatatgtggtatttgcttgttatctccttcaaaagtgacattccaaatcctcgtatccaagtgtgttgcagttccgcctcaatgacgatattacaggctttgcctctactttgtgttgcttcaacaaataatcctctatcatctcgtataatctagccagctttttcatttttcccagtccgtaggagactacaatcataattacattttaaaaaactacttgatgtggtttacgccattgttggtattcttgtgtatataaaatgatttttttttcttagtacatgtacatacaaacttcattttttcaacaaaaaaacaaattttagtgtattgaaggctttttaaaaattcgaaaatgaagtgaatgatgtaagaacattttctaatattttagagattattcataaaccttttattggtatttttgaaagttatataaacaatcgtaattgcttgatggtttgtatttttgatcctttgtatttttatgtgagcctttgtatatttgtttttcttccctacacctacttagtgttggctagctagttatctgtgtgagattttcttgtttataaacttgatcgacatcacattttcacacacacacgtgcatacaataatagcatcttcgttatcgtccaaaacaaatgacaactaaaaattatgattccttttaccatgaaaagcgaccccatcgcattaaggcatctacttcaatttctgttcgtctctaacggtcatatatgagaatggtcagctttgcttttcttcatcctgcttttatgaatattcatctataaataccttctcacaccttctccattcttcacatactcacacactcagctatcaagaagagaacaaactctctcaactctttcgttctcaagtatttgcttgcaagtgtctgatacgtaca

SEQ ID NO: 15204 - DNA, 3000 bp, Unknown
  misc_feature (1)..( 3000): cDNA_ID_3095438_gDNA_ID_2926084_Annot_ID_196420 3000 nt of promoter + ATG
atcacctgttcatgtggatgtcgatgatggcagacgcaaggtatgaattaaatactctgataatggatattaagggagcatggagagttttcttatcaagtttccaaaactgttaggtgacaaatgaaggattggagcaaggctattgtgttgttccgagcaaacaaagacttatccttctaatttcctttttgaaaaagaacctaaataaaaagattatggtatttttctcgacttgcaagtcggtacaattccatacggaaatcatgaaaataagcgacgtggatgtctctgatattcatggaggcatggatcagaacagaagaactaaaacctttttcgacttcatgaaagcaaagaaaggtatcttgttatgtactgatgttgctgctcgtggtctcgatattccttccgtggtacgtctccacatctatgttcttgcattggttttgtacgcatttacttaccaatggttttatggaaatcatatttctggcgatttttattatctgtaggactggattatacagtatgatccaccagacaagccaacggtaagacaaacacttcctcatatttggttttgcatatccctttgcctctgtatgtgtatcttagattgttctttggtgctgttatttcaggaatatatccatagggttggtcgaacagcccgtggagaaggagcaaagggaaaggcattacttgtcttgattcctgaagaacttcagtttattcgctacctgaaggtaagaatggttattgaaattttattgtgggttaaccaacttgagttttaatttgtaatttaaccctcaggctgcgaaagtacctgttaaagagcttgagttcaatgagaagaggcttagtaatgttcaatctgcgctggtaagacttctgattcagtaatgttgtgggtttaataactttccatttgtaataacaacgtttcttgttctgtctcacaggagaaatgtgttgccaaggactacaatctgaacaagttagccaaagatgcgtacagggcttatctctcagcatacaattcacactctttgaaagacatctttaatgttcaccgacttgacctcctggtaaaagaaacttaaaaaacaaatattcttccaaagatttttgttttcataatagctaatatctcgtgttttgacgttgagtatcacaggctgttgctgaatcgttctgcttctcttcgccgcctaaagtgaatctgaacatagaaagtggagctgggaaggtgaggaaggcgagaaagcagcaaggtcgcaatggcttcagtccttacagtccctatggcaagtccacacctacaaaggaggcataaagtgtcatttgtttacaaaattactattttgctccgtagttttgactaattaccaccaccaagttttgtttaaagagtaaacagtgcatttgatttaaatgaaatgttccttggctactattaatatttcagttctatgggttataactttttaagaattgttgatatcgtttgcttataataaaaactgatacatggaaatggaataagaaaacataaagaaaccataaagagctttattaagtgattatcggaactacatgaaaagtgaaaacatattcattgaatctaaaccggtctaaccggaaaccaaattcagtaatcgaaacaaagaaaaagaaaacgctaaaccggcctaagatcttcagcagctaaaaccgctggaactaaaccaaaccaaaaactgaaacaatcagaacagcagagacaacaaaaccggaactactgaactggactgcggttttgaaggcattgctcttcttggccttgggagttgacgccggaagagatgatgatgacgaagaagaagaagaagaggatggaggaggagactctgtagaagactccgtctccataacttttacgatcatcttctgacccttttcgcagtggccagagacaccgctgatgaagtaaaacaaaccgggtcggtctagtttgaaaacagtgtcttcgttgtttgagtagagttgtggtttggtcgctttgcatttcttgtactcttcttctgacaccactaacactgagtctttcgtgtacttgaaaccttcaccaaaaaccgcacaaaagagttaatatatcttattatcttacaagatgaaacgtttaaacttcatacaaaagtgttcaatatacttaattacttacggagagtgtcaccaactttaaaccggttatctgacgcccattggttaaacgcatctccaagagtcttagattttggtacgatccaaccattttctcctccaacttcaaattcagtgcttgaaacacatgaaaacatgtaaaatgttacaagaaacataacgataatgatcttctttgatgaatccatttgttgtttttttggattgatatgaaggaagctctaaccaaagttacagagattgttttttttttagtgttcgtaatgacttgtgacttgtgaggttttgagtttaaaaagagtgagacttggagatttgttagagttgaccacttcttgagggatattaatggatatctctttgacttggtattttaatttcttgaatcaaaaagatattttgtcgaaaacaacatgacttgaagttgtaaaggaatatcagaattgtgggatatttttgcttgttattttgaattacaaaatttatgtagacgatgtgtattccaaaagaattgttaaatgcttattaacggatacataggactatgagttgtatttttggtgacgacaaaagcaaatttcttcttcttattgaccatttcagcatgtgggttgaaattgtcatttaagagagttttggtaaaaagtattagatttgaaataattgaggcactttattccaaaatattctaatcactttctccgctctttagccctttagggtttatgacgttaaacccagaatccaacatttgacgattcgattcgaaaatctcagtgaagatcgaaaatg

SEQ ID NO: 15205 - DNA, 3000 bp, Unknown
  misc_feature (1)..( 3000): cDNA_ID_3095426_gDNA_ID_2926084_Annot_ID_196423 3000 nt of promoter + ATG
gtactgtatgatgaatgtttctgaattgaccacaacaagctccaagtgtaggaggaaacagaaaaaaacatacttggctcacattcttctcttcttcttcttctcatgtcttatgtctcttcctcaagttccttatggttggcaagtgcctttcaattgaatgtggacacccgaaaaaagtcaaaagattccggcagcttttttcaccatcttcttctgttccttgagaactcaaatggctcaagtaagtcttgccttcatagatatagctaagctgttgccacagcaaaacacttagcccaatcgccacagaaacactcgccacaaagagatagactagaacaaggcttcgaacagagatgaagacagcgttggctatgtaagtaagacatatattcttcaccactctcagaatcgatatactattaccatgcgccacatgggccacatcggatgcatatgcagctcctttttcaataggtggcaagatatgaatcaaggtatacacacacataacagcagcatagcttgtgctaatgacggctgagataaggaatgctatgaagtatttgtgattacccgcaccaacacagttcccaatctgcaaatacaacacaaggagagtcattagcattaagtccttaaccggtaattaagaacactaatatttacggtattgacaaacaagtctagtatccgaggactctatgattggggaagatcagagggtcgtatgagataaaatgatgaacaaggtacaagtctagcattcctatcaccacacaacgtaaactcaaaaagccactctacattcagccctttaagtaaaaatgatatatgtaataactaaagagaaacctgaaaacgctatgagacttacaaaggggcaatggtgatccatgtccaatacacacatgccacacgtgcggcagtgatgggttctaggtgacttgggtttggagcagtagttacaaaaggtatagttgttaagtgcaccattccctactccagggtgggttccataaagaatatttgttggcttcccggcacatttaaaagcaacgagaataaatgttgagagcgttgatatcgccagagtcgctgttgtaacagaatggaaaattccgcaagccaagctgatcgaaaacaagacgggatatgcagcccaaatcccaccacctgaagttttttttatccaaaagagtatttagcagggaacgaaatataattttcaaaattatggtttacttattcagagggacttacatatcacaaagagcataaaaactgcaagaataacgacaaaacaccggtcacggaaacgtctcaacccaaagcttttggtttcaggtctgactggattctgattcgtgattgcaccacaccatccacacttaaaaacaggtgcatatgatggaagaacaaggtttagcccacagccccaacaaattgcttcataatcctcatttatggttgcaacaaaactcccctagagaaaaaaaaagcaaacagttataaagctatttcacagttatctctgttaaacctatgctgcaagaaaacagtcccactatgcaagggtcactctactattagatgaccacaatgtgtaaacactaacacaatccagcttcatgattgcctacactgtattatgttctcttgaacagttctctactagctaccaatgattgagaggttaaaacgttccctttctttaccattcactaagcaagtattatgaaaagagaaagctcaagtaaaaaggttttgcatcacatatataatgccagatttgatatcaacttgatctcctaagtcctaaatcactaaatcaagcaagcatgctgaaactggccaataatttcaagatacactaaggcataacaagatgaaatcgttaagactatgtagtgaagatgggtgagactagagagagaaggatctactaacctgggaagaatcttccatagctggttacaagaaaggtttcttcagaagatttgatgagagttaacaatcaccaactcaaagaaaaccaaaaagctctttttttttgtaatgaaatcaaaagaatcaaccaaaaacttgttttcctctagctttgaatatcctaaaacaatggactacgtgtcaatttcagaagaaaccccatccattcatctgctaatcgatgaaacaggtctcgctgaatcatccgtgagaatatactaaatctctaatcatgggcaacgaacagaactatcagctccctcaaagctactctctttacacaaagatctgacagattgttttcggatcaatctgaaattgcttgaccacgacgacacaaagcatcagattcttcacaagtgattttgcgttgaccgtctttaacattcacgaaataaaatgagagcctcctctatttctccctctaattttagaaatcaatctaccgataccccaccgttggcgagtggcgacggctattgcaacagtaaacaccggcaaattttgatcggaagtaatgaagaagagaagaagcttttgaacacattggcgagaaatgattaattcttaatattttgcatatcactcccattattttattctttttttaattccttctataatgtatcttttaatcttattttaaccagccgtgtaaatgtaaattttgacacatgtaaaatttacaaaacttgggagtcaagtgtctagagaatcacattaaatggtaagttatcttttgtccaaaaaaaaaacaaatggtaagttaacatatcgcttgaaacgtggacggttcagattaagtttcacatataaggaaaaaggaatatcaaaataaaaagaccgacacttcaatttcccaaaaattcagaagccaatctctctctacctataaataacaaatctcccgtggaaaaaagcaaaaaccctacacgcgaaaacttttaagcttctcgtaaacctagctggtagctgctacaccagtttcgcttgtgatcaggatctatg

SEQ ID NO: 15206 - DNA, 343 bp, Unknown
  misc_feature (1)..( 343): cDNA_ID_3095417_gDNA_ID_2926084_Annot_ID_196426 3000 nt of promoter + ATG
aagatcaatcttttcaattgctcttggattctgagtttaatggataacaagatttgctatgaatggtttcacactactgttggaagatctatagaatgagcaatattgctcgttgagcagagaatatataaaatatataacaaagaaacttgatagattaaaatcaaatccaatttgttgttattttcgttttcgtgtgcagatgtttccagttaggaggtttaagtctagttattattacagtttcttttttacttgtttgctaattttactctatttcataaacttgttatctacagatattcttttgatgtttggtgcttactagttggggatggaaatg

SEQ ID NO: 15207 - DNA, 3000 bp, Unknown
  misc_feature (1)..( 3000): cDNA_ID_3095432_gDNA_ID_2926084_Annot_ID_196422 3000 nt of promoter + ATG
atgacttgtgattagttttatattctatacactaaatatttcatattattttcctactttcaggaaagtgatgatgaaaaacctcctacgaagaaggctaaagtttcatcaaaaacttctaaacaagaaagctctagtgatgaatctagtgatgaatctgataaggaggagagtaaagatgagaaagtgacaccaaagaaaaaggtaccaataatgttacttctcagatttctctatagagtgtttataaataatatatgttctaaccttttaatgaaaccaggattctgatgttgaaatggtggatgcagagcagaaatctaatgcaaagcaggtaaaaactccatacagtaaaattttgtcaagaattttattcctttagttatgattattatttggttaacacgttttatgtaataacgtttttatgtggttataacgtttaaatgttatgtgtttatatattacagccgaagacacctactaatcagactcagggaggatcaaagacgctatttgctggaaatctttcctatcaaattgcgagatctgacatgtaagtataatgacattttttcataacatttttctggttcttcctataaaatgttggtggtatgatatttataacccaaaatacagagagaatttcttcaaagaagctggtgaagttgtcgatgttagactttcttcatttgatgatgggagttttaagggatatgggcatattgaatttgcttctccagaagaagctcagaaggtaagttcatattgggtttttttggtatcatggaagtggtattgaaattacgatgatgattggattcatttttggatgttttgaatgtaggcattggaaatgaacggtaaattgttactaggccgcgatgttcgtcttgatcttgctaacgagaggggtactccacgaaacaggtacgtttcttactttgccatatgagcatgatgggattatgtatgtttttgtttataggctaatatctggtttgttggactatatgcagcaatcctggtcgcaaaggagaaggaagccaaagtcgaacgatttacgttagaggattcagttcttctcttggcgaagatgaagtaaaattcttgtcctagacttttcttaaaccaatattaacatgttacaaaagctatttgtgtaaaactctgatgcaaaccacttttgtgatcatgatcagatcaagaaagagttgagaagtcattttagcaagtgtggagaggtgacaagggttcatgttccaacagatcgtgagactggtgcttccaggggctttgcttacatagatttgacgagtggattcgatgaggcgttgcaactgagcggaagtgaaattggaggagggaacatacatgtggaagagtctagaccaagagatagtgatgagggccgttcctcaaacagagcacctgctagaggagcacctcgtggccgtcactcagatagagcacctcgtggaggacgtttctcggatagagcaccacgtggacgtcactcagatagaggagcacctcgtggccgtttcagtacgcgtggaagaggacccagcaaaccaagtgtaatggaatcatccaaaggtttgtttcttcttcttctcctctcctcttccccttttttgttgttgtgcattgtagaattagtgttgttttaaaacttgtgtgtttgtatggtcttgcagggacgaagacggtctttaatgatgaagagtagaagaaagctgtttttggttctatcttatagtagtagagcgtttttggcctagtttcttttgttttctgttgagaaaagcattaagctttatactcttcttaagattctttttgttggtttttcttaaaacttattaagagcactttactttgctgctcaaaattttggaataaatccttttgacttcattagtggttcattggcattgctatcagcccttctcagaataaagcttagacaatttaaaatctctaattatcattctctgttgcccatgccaaaagtttttgagtaacattttctagacagatcacgtgttatgaatctggctaagacaattctcagtttctaaaaaaaaatattttttagagttttcacacgttaagaattttattaatgtttaattataaatatactattttgcattaaacaatttccataattctaacccaatagtaattcaataaatataaaattttcaatcaatatttcttgaaaataacaatatcttgttattatttattgaaaaaaatacattgaaaacctaaaaattatatctttataaaacaattttttttctttctagaaaatacactaagaaaaagctgaggcttcacaaccgaattgttaaccatcttgattttgggagtagtttgtgaattgtaagccaaaagaagaattgactaatgtatttttaaaataaaaataatagacggataaaactgaaattatgtgcattttagttaatcacatactcattttttttttaacacaagtacatacttatttatataaaaaaaattgccgatattatacgaattactgaaattaggtgtataatgaaataaatgttaaaaaataaaaaaataaataaaaggttacgaattacacaacttcaaaggctcgttaaaccctaaaccttgtctccgcgccgcgttatcactcttacgtttctctctctctctcaacttcttccacagcaaatttcttcgattctctgagctctctcccatccttttcaagtggcttcgtttctaaaagtaagtttttttaatctatgggttctcttcaagtggttgttccttttcgaatctctgtaccctagatgaaatcgagtacagctttaattactctgtttttctttgggattgctctgtttcccttctcttagaggtgtataattactctcaaatttgttgtttttttcattcataaattcattaatattgctgcagaattgattggttgaagaaagtggaaacatg

SEQ ID NO: 15208 - DNA, 3000 bp, Unknown
  misc_feature (1)..( 3000): cDNA_ID_3055551_gDNA_ID_2926084_Annot_ID_196421 3000 nt of promoter + ATG
taataaggaattttcattattagaaaaagaacacaaaaaggatgtaacatgctcttccatatcgtctgaaataagcaatgaagatagaaaaaaatggtagttatttactctcattgtttcttcgaattcaaacacaacggaagacatttgattataatataagtatctctccaaaaatgtatagaaaaaaaacttaaaaacaaaatgaaatattacatttcaagcgacggacacaaagcttacattacacataactagatagatattcttcttcatcttataaagtataaacggaaacaaaataagaaaatgtaatattaccatgaaccgtgttcctcctccataaatcgaaccgtgatcggttaatactaccctgaaccagactataccaaccggttcaggtcaagcaccaggggccgcatctttagccctgccatggaagtaaccaccgtattctctagcgtaatctttgacgtgagatgccgtgtcatagatcctactacgtgcataatccatctgattcgatccaaccgggtgcattccccggaaatagcggtacgtccacgacactaaagccaccgttccgacaagaaatccggagaccgttaagaacccgccaacgacgacaaaaacgggaatccatatcggactcgagatgatgatcaatggaagaaagacaatgaagccgagcacggcagcggtgacgcttacaccaaggaggaagaggaggatgccagtggagataaagagagcgaggaaaccaaagagctgcgaggatgttggtgaatgggatcggagctgatggaaaaacgacgagatggggctgttgctaacggtggtggtggcggtgctaccataattgggccaatattgggcctcgccgctagagaacctttccgccattgtagagagcgattgttgttttgtgtgtgtgtgtgacagagaacagaatgaggaagggtaaaacaaatggaggacagattcagctttgaggtggcattcatgcaatgtttgtaaacacgtggagattggtcttggttttcactttgtctaaaatcgagattttggtttagattcggtttagtctaaatcgtattgattgggtttggtttgggtttatttgccgaaaaccatggaaaagggccaatgccaattgaagaacactaaaccaaaccttcaagttacaagaagagacaacagaagcgaaactagaaatactacaatagcaaattgtgtacctttatgacaacaattttttgtatgttaaaaatcagtagtagccaacgcctctaagctcagcagaactcggttgctgcatatcaccggcttttcccaaaaacacaactcggcctgtaaggagagaaaacagagatcaatatttaattgtttcccaatgaaatatgtaagaaatggagttttaggggttgagccattagtaccgtttctacgaattgctacttctcttatacgtcgaaccaaaccagtgacaggatcagtgaatatcttcgtctccagattaccctctaagtagataacagtactgttgaatgaacacgaaacaagttgttatgacacatacacaaaagcaagctaccattttgaatctagcaagcaagattcacctaaagtttcatcctttttcaccgattcttgatcgatatcagacatgatacatacatttgttccttattctatcatcacataaccttacaagctaaatatgatctcagaagagaactaacccgggttcaacattcttcaacacaagatctgccaagcgttcagggtaaacagagacacggtgccactgcaccgcagaccggctcgcatactctctcggatcttcgttaataagcggtctccggttgttcctgatcccaccagttcctacagagaagagagtgacagttctaccactcttaagcttcttctgcagaggaagctgacccacttgccccaccaatattgcctgtattaaaccagaaattagtctagaacacactaattattaacctatccagaacgagaatctaatgatgttcacaaaatgactcaacaaagatcatacaaaaggcaaaattgcaacgatcgatttaagaaaaacaacaaaaacagagtatgtatcaattggaattagaatctaagtttgataccttgaaaatgccagagtcaaggccattttcgagtggacgctcttccataacgcgttcttctccggaaaatcgagaaactggatctgaggcctttggttcaatgggcgattctaactcgtcaaagtcggagtcttctggggaagtgatgttgttggtacagaaagacatggaagcttgagaaattctagggttcgatagaagagatcgatagagtcttctagaaagtgtagccattgaattcgccattttcgatcttcactgagattttcgaatcgaatcgtcaaatgttggattctgggtttaacgtcataaaccctaaagggctaaagagcggagaaagtgattagaatattttggaataaagtgcctcaattatttcaaatctaatactttttaccaaaactctcttaaatgacaatttcaacccacatgctgaaatggtcaataagaagaagaaatttgcttttgtcgtcaccaaaaatacaactcatagtcctatgtatccgttaataagcatttaacaattcttttggaatacacatcgtctacataaattttgtaattcaaaataacaagcaaaaatatcccacaattctgatattcctttacaacttcaagtcatgttgttttcgacaaaatatctttttgattcaagaaattaaaataccaagtcaaagagatatccattaatatccctcaagaagtggtcaactctaacaaatctccaagtctcactctttttaaactcaaaacctcacaagtcacaagtcattacgaacactaaaaaaaaaacaatctctgtaactttggttagagcttccttcatatcaatccaaaaaaacaacaa

SEQ ID NO: 15209 - DNA, 3000 bp, Unknown
  misc_feature (1)..( 3000): cDNA_ID_3095511_gDNA_ID_2926085_Annot_ID_196436 3000 nt of promoter + ATG
tttcgtttctatattttggtttttttatgttttaagatcagagtcagtccaaccttcagcttcctccttgccttgcgtttcgtctaggtcctcgccttgagtttcatctaggtcgacctcttcagtctggtcgggacctcctgctgaatctgaggagttgtttgccgcatctgtgatgtttacaggttgctgattctccatcaaaccagaaagtgctagctttggtgaccactcaaggacatcatcaatgatgttggacatccttctttggtacctgtatgaacaaaactcatcacaattcaacctctactgcactaaattcaaatgagtagagtacaattagtttaagcgatatttaaaggtggacgagaaggcagtgtatacctggcccgagcagcttcatcaggggcatgacgcctaagcagcatgacaacaacaatagccactactgtgtagaaaagtcgagatgtccacttgggcggttcttcctcgtctttctttggccagaaacggaacagttccttcaatgtggcttcctcagctagaatgttggggaagaaccagacacgctttcccaaaagaatccacatagcaccgaaagcaactgctctcactgcaagaggtaatcaagaaggactaatctcagtataagccaagttaaaactacatgagtatatgacccccttcagtttagtagctatcgctagtaaataatactcccaagaaaatgactctcgaaggtgcaattacaaaaatattaaacagagtatttgtgtaatagagcttaccgaaaagtaaggagagaatcatcagaagaatgcccgcacatgagtagagtacaattagtttgcaacggtgtggatacacaggaaacaaacaaattgcaagagtcaatacaggccagaagaaggacaaaagcgtttgccatagcggatgccgtttttcgaacgtccatgcaaaaaaggcatcattttcagagaaagattgatcgtcctgcatcaaaaaagaaaaatgaaatcaaaagcgctgatatacttgcactgatgaatgcatatcttactcaaaataaaaacaaaacaagaaccaaagagaatgatggtgaaagggttgaatagcaattttctctaagaaacaaacttcaacatacaagacaacaagttcaatagcatatgaagcaacaccaaaatcaacttacacggaaaatctccaaatgagcaggccaagtagagagctttttcttcccgggacgaagagttttagtaacacgatcacagcggaccaaaaggttctttcccaacaaaacattggcaatatcgtctgtgtcaaggtctttatcttcttccagaatatctttaaagtcagggttattcttcataaagctcacaaaatctttccctctaaagtattcaactcgtgcttgctccataacagcccatctggattctaatcccttgtggtctctaactttctcagcaaacaactgaaaactatccttcttcacagcttgcttctagtaaagtaaagacaacaataagcatttgagcatatcaatcactaaatgcaaaggatcatcatttaacagtaccaaggccaaaacaaaaaaattcaaattctcgccacacaagtgattcaattaacattccagagattataattcacaagtcacacaaccaaaacagtaaaatttacgagcattaacatacaatttagcaaaacttaactatgaaaaaggcctatataatcatgcaatcgcaggtcaaatgctccatcagagaccaaaacagatcaaacaaaaggaaacgtaacctaagaacaaatttttataaaagagattagagagaaatgagagaggagagcaaaccctaggttgagaatcagaaccagaatctctaacggaagtagatgcagatcccgatgatcgtttaaccctcttcttctcggctccgaccggcttcttcatctctctccctcttcttccgagtcggagagtttttttttttcgatttttcttttacagatccaatgttttttgttttgttataacagaacaaaaaaaaaaattctggttttttgggtaaacccgtagagttaagattgcaataccggtttatagtagaccggttaactaacctagatttattaccaagtgctattaaaataacgtagactaactttgaaaattttggaatctaaaaagtatttcatttttctcacatttcaagattgatgtttgactaacatttatacatttaccttataaaaagatttccacaacttcaaattatattggatctttcttcataactaaaaaaatcaacaaattagacgtttagacctttttatctaagtaaaattagacctaagattatcatttaaaaatattttcagtacaaatgataatgtgatttttatgattagaaactttaacttacacatctttttatgttgaacgattttatgattgacggtttatcgataccacactcacgattaaaaaattttactttttagtttttactgattgaactatagcgatcaactctgtatgtatgctagagattttcggtaagcttgtctttgttaatacgagaaatttgtattctatgaatcgaacctcatattcatttatgatatacaatcactttaattttaaacttaagtgttacaatagaaaaaagcataatttttagtagaatatgatctagtgatgatataatagacggtttgcaatagaaaatgtgtttactcatgattaaaagagagaaaacgaaactataaattgctcagctttcacttgattagaattttactttttaacgggccaattcatgtccaaattataggccttttaacggcctatactttttgatatgcttagcttttttacttatccactccaaattcccaaaaagcccctgagtttttcggattttacattttctaccagagtggagaaaaaaaacagagaagaggaaacaaagcaagcaaaaaagagttgcc

SEQ ID NO: 15210 - DNA, 3000 bp, Unknown
  misc_feature (1)..( 3000): cDNA_ID_3095493_gDNA_ID_2926085_Annot_ID_196440 3000 nt of promoter + ATG
attataaaagattactctgtttcatttgcctctgcactttcatcaacaatggcagcaatgatcacctttgactttcaaaacagcttcatcttcatcctcttttttctcttctctctcctttgttactctctcttcttcaggaaaccaaagggctcacgagctggccgtgatcttcctccgagccctccttcttttcctgtaattggtcatcttcaccttcttctctctgctcttgttcacaagtcttttcaaaacatctcctctaagtatggacctcttctccatctccgcgtcttccacattcccatagtcctcgcctcctcggcctcagtggcctacgagatcttcaaggcccaagatgtgaatgtctcctctcgcggtcacgctccagtcggggagtctctctggtttggatcgtctagcttcttcttcgctccctatggagattactttaaatttatgaggaagctcatagccacaaagcttcttggaccacaggcactcgagcgttcacgaaaaatccgtgcagatgagctagatcggttttacaaaaccttgcttgacaaggcgatgaagaaggagagtgttgagatcggtgaggaagcagcgaagctcaataacaatatcatctgcaagatgatcatggggaggagttgttcagaggagaatggtgaggcggagaaattcagacacttggtgatcgagtcgatggctttgacaaagcaaatcttctttggtatgatctttcacaaaccgcttaaaaagctcgggatctcactgttccaaaaggatatactaagtctttcccgcaagttcgacgagttgctggagaagattctttttgaacacgaagagaaaaaggcggagcacaatcaagctaatgacatgatggattttttgttggaagcttatggagacgaaaatgcagagtataaaatcacaagaaaccatatcaagtccttgttcgtggtaaatgttcttcccttctaggtagatgcgtaagcgaacaccattggtcgaaacatattgtggcatgcataaaactttaaacataaatctttgtattaagcttgtaagtaataaggaacaacaaagctaagacacttttatataggcccaaaaacacatgatacccttagatataggaaatatggaaatactctaataattgtttgttactacaggatcttgtcattgcagggactgacacctcggtgcaagcaacacagtggacaatgggggagctcattaacaaccctaagattcttcagagattgagagaagaaatcgaatcggttgtagggaacacaagattaattcaagaaaatgatttaccaaacctcccttacttgcaagcggtagtcaaagaagggctaagattgcatccgccggggtctatctcggtaaggatgtttcaagaaaggtgtgaactcaaagggttctacataccggagaagacattacttgttgttaatacttatgctataatgagagatcctaatttctgggaagatcctgaggagtttaaacctgagaggtttatagcatcttcaagatcagagcaagaggacgaggtaagagaggaagtcttgaaatacattcctttctccgcgggaaggagaggctgtcctggatcaaatctagcttatatctctctaggaatcgtgattggggtaatggtgcagtgctttgattggagaattgaaggagagaaagtaaacatgaatgaggctgctgaaacaactgcgttgtccatggctcagcctcttaagtgcactcctgtttctcgaaccaaaaaccctttgccatcaagtctacatattcccagttcttgatttggagattttagctttgccttttgttgtttttgtctcatgattgcgcgtgattcctgtttactggttacctttggtttaaattgcttcttcaataaactgtgttgttcttgtgtgtaattatgtgttggcaataactttgaaatattattatttttgtttaggccttgtgtgttacatacaacaagattatgtctttcacaacatattggcattttacactctacaaaaccagaaaacttacactttaacttccccatcatccttgtttcctcggcctcagtggccggcgagatcttcagggcccacgacatgaacgtatcctctcgcggtgctgctgcgatagatgagtccctcgtgtttggatcttctggtgtcgtctacgctccctatggagataacttgaagttcgtgaagaagaaataaaatataagatcaagtcaaattaaaaaaagaaatcagatatttatgtttaaattaaatagattaattttagaaaattaacaactcataaaatgtagctaaacaaagataagatttatttctaaaatgtatttaaaaaaagataagattaagagatacttaaggatataaatcatttaatttaatatattttgtcagatttattttataaataagaaatttttaaggttttgactaaaaagtttacaaaaatgtatatatagattaatttggtcaatgcctttacaaaggaacttacgaattatttgaaagaaaaattttattctatagacttggatacaacttttttctttaatccgaatggggcccaaattttgttggtcccgcccttgatgtatttaaactaatctacgcataatatggatttaaatcatttcaatcagagttttttttatgagatacccactaatgaaataatagtaaaaacatatagaaaaagtaggaaaaaaagagaaaaaaagagagagacgtttcttgcaagagagactgaacttgtattgacagttgtcattcaactaatggtatatttacttaaaactattaaaataaaaatatttttttcttttcttttgagatagtctccatcgtttttgccgatggagatgataaacaaagtatggattcattataaaagactactttgtttcatttacctctgcatttttgagcaacaatggcagca

SEQ ID NO: 15211 - DNA, 3000 bp, Unknown
  misc_feature (1)..( 3000): cDNA_ID_3095497_gDNA_ID_2926085_Annot_ID_196439 3000 nt of promoter + ATG
tcagaatcttctcccgtagagacgaagaagctgtttataactggtatactaacacttgagattgtatgcatgaattgggtcacatagccatataacatgttatagtgacaaaatctccatagcatttaaaggaacaaacacataccatataactggtacagtgacatgatggatgtgctgttggaagcttatagagatgaaaatacagagtataaaatcacaagaaaccatatcaagtccgtgatcgtggtaaatgctcctctcttaggtggattcgtgagtgaacactattgctttgacctgactaagaaacgtttcggttgtgaattcgggtgaaacctttgaataaatgtttggaatccctaaatgtttctgtttgctactacaggatcttattgttgtaggcactgacaccttaacgcaaacaatacagtggacaatggaggagctcactaacaaccctaacattctggagagattgcgaatcgattgtagggcttaacaacgttaataaaaaaaactgatctaccaaacctctcttactagcaagcggtagtcaaagaagggctaagattgcatccaaagccggccataaggccaagcaagcaaaacacatgcttgcggccgcctagaatatcatttagtttcgggcattttctagttaagttcttgtcgtctaatagtttaaactcaatgagttcgacccttgaaagtgaagtttaaacataaaaatattttacaaccaaatcatgaaattaaatatattatgtggcctattttttttccttagcttgtagcctcgcgaaactcggagacgtgaactcaatgggttttgcataccagagaagacaatatttgttgtcaatgcttatgccatgatgagagatcctgattttttgggaagattttgaggagtttaatcctgaggatttaaaaaacatgaagctaattatttataaatacaatataatcgattattaataaacatacaaaaaaagggtgaattattatgattttaaaacacttgaaaattgaaatattgtattcgattatgtacagccaaaataaagaagccacgagacttagtaagcattatattaatatcaagtgatcatgatgatcacaaatatagacagcgaaactgaaaatgtcagagatacgagagatgtgtgttaaatgaaatcgtatatcgttatttaagaaaattttaaaaagttttaaagaactaaaatcctaaattttactcctacaatcaaatagattttttttgacgtattatctgatcggttcaactaatccaccgaatcactggttaatagcaaattttctaagttttctgattttaaaattgccagctgacgttaaaactaaacccaaacaaacaaaaaaaatatactaaagtcaattatgtaaagccaaaacaaagaaaccacgagagttagaaaacattatattaataataaaatatcaagtgattagtgatcatgacaatcagaaacaaagacaaaaaaaagaccgaccggtttgttgcgctaaagttagacgagagatgtcacaaaatatgagagaggtgtgttaagtagtatatcactatttgagaaagattcaaaaattttaaaagtaattaaaatatattaaagtcataattttgaccggtttgttgcgctagacagaagtatattattttgggcgattatcacgagttattaaagtattgaaacacaagtaatgaacaccggttatttaagtattaatttgatcaatggttgtacaaagaaacttatgaattaataaaaggagaccgtgtatcaggtgaatcggactgtttttccagttatgcaaataccaaatcttttaggttaccttcaaggcttcaaatactatttttaaacttgataactggtatgcttaacatttgagattgcatgcatgcttttgcttttgaacttacatagtagaatctgttattacagtgacaaattctccatagagtttaaaggaaaactaagcgtttattgaataatgatgattacttttgcttcctctcaatttgttgcctacaccttaactcactcagaagataacatttacgaatacatcatgtttcttggttttgtgaactagtctacacatctgagaaaacattacgtgcagcatttgaagggttttgtgaactagttgaaggtactcatgatttgctatccaattcaaaagtaagaaaaataatatcattgggaaaagatagataatcacagccctataactctcctctgcagtcaaaattattatggacaagatatcagaaggctatgcctttcgagctagagtacacgaaaaaggaagccgcaagagctgcattaaaagagctaaatggaaaggtaaagctagattaccaaaccgatcaggcaaaactgaagtcaaccaagtttggggttctagtatcgagtattaggtgatgcaaccatggggatttgagatgcttcaggccaagaaagaaaaggcaagcaatgtcatttttcacactagatcaagctttatgaggctggagtgttccaacttccaactctgcaaatagcaaaagacatttggttacgtttaacgaggacattaccctaatatctaaatatttcacatgcacatatctaaatacccactatgcatgtgacatctctgcaaatatttcacatgcacatatctataaaattggattttacaagattccggccgaattaaagggcctactgatagtgaagtaatgtatagttaatcaccttgggcgatgaacacgcttaacgcaagttattaaactactactattcatttttatcagaaaagaacttctgatctacttatatataaaaacacttcagatgtacttatatcacgttcttttagagagaaacgtattactttatgtttaggtaataaacaaagtatggattcattataaaagattactctgtttcatttgcctctgcactttcatcaacaatggcagca

SEQ ID NO: 15212 - DNA, 3000 bp, Unknown
  misc_feature (1)..( 3000): cDNA_ID_4359676_gDNA_ID_2926086_Annot_ID_196451 3000 nt of promoter + ATG
catatttatgcatgcacacatttcatttacagatgataaaatcatgtgacataactaatacaataatttaagattgatcttacaaggaagtgacaataggcggcgtggagttatctagattattgcagtttaaaccctcccacaaaaactgtttaggaacgcatggatctccttgccagctgattttacttaatccataagtgctttggatactcttgatagcagcaactagaataaagttattgttgcatcaaaaaacaacccatgaaattatatttatagaggaaattgattgaaacatatagacttaccatcatctggatttgtttccatctgtggaaaatcgatcacggtgaaaacctcaagagcgttcatgagaggaggaagagtagacttaggtgttttcgtcaactccaagaggcatgtcccatcttcacattgttgtggtgtcgaatagaaaatggtttcggtggctaacgttttagggctgtagcgttcataagcaagttttccattcaacgtcactttgaattctcgggtatcgagggaccgtagagtttgaatctcggcaaaatgcatgtacacataaaattgggttgtggaagatggcaataaccatgagaagttccatgttccaaaagtacttataggcgttgaggctgacgccatcacaacttctggtggtgcataaccattagaactgtttatattcagattggttgttaactctgtccactcttttgcatcaaagaatggataccatttacgatcattgacatcatcagggtacctatcaaaaatatttttgtcatgtattaaagactaacattttacttaaaaacaaacttactgaaacaaatcaaaatccatattaataaaccaagatgctagaaaaatgtctataccaaatgaacccaatccgagttttgtgcaaccaaaaacctaataagtaattataatctttaaacttcaatatatacactaaatttattaaaggtttaaaacaaataatcttcgttaaaaagtttatcctaaacggatcaaacagaaccagaaaccaaattttgttcatgattaagtgaaagggcgtgattcataccgtatgttttggcctgaaccgctgaaataatatcggaagaaatacttcagagagccactctgagtattgtaagtattgtttttaagtggtcgtagctctaacgtattaatcataggtgagcttgttcctgtcttaacaagacagacctggagagacttagatatggtcttgtggataatctcctggatagtaccattggtccgtccattcatatcaaccgttacccatagattcggaccaaggtaaagatcgaaactcgggggattgttaagaccatcgtagttaccatacacaaatacagctttgatcagatagtttgtgtcttgcgtgacattcaaggtatagcagtttcggaatccgtccgggaagtatctaagcttcaaagacggtttactgaagatcgactcgaacgctttctggattcttccagttttgccactctgcacgaaaccatcgtccgtcgagtatgttaatccggttgaaggatcgttgtaaggaggctcatttggcaatgacccgcaatccaaactaatgaatcctagtaacacaagcgaacaaaatgtatcagaaaactaagtaagaacataatttcgacgaaacattatcaaaaacaacaaagaaatgtgtatatgtatatacctttttggtcttgtgcttcaacgaggtgtaaaagagcatagaaagagatgaagatcaacgcacataacctaattgcttgaggatggtactccattattcttctatgaaacaaaagagagagacatttacaaaaagaaaaagcagaggtttgagatatctaggcaataatggaaattattgaaaactaataagcacgacgttatttttgtaggtcaacttatgaaaaaaaatatgtatacaagagtcggttgtctcgaacctaaataaaactaaactaatatgtttgatttgattaacattctataaagatttaaaaattaacgatccaataatcttccaatgccgtttagttgatgtcaatgtcctgttttttaacgttgtattcgtacgtatgcataatgcactaatatatcttattttcgactaaataaatcaaattgaagtaaataatataacttggtttttgctttttgtattcaattcagttttggttaggcgcgtttgttaggtttttgatttttttttcttttcttttagtttatatacatagaatccatattgaacaatatcttggtttggtttggttcgacacactttagttttaatttgaattccaatttccagaaactgccatccatattccatggtaagaaacaaaaaaaaaaaaaatccaattcaatggcaaatgaatagccaaataggtaagctacaacgtggaagactaattttacattgtttaaaaagaagcaaagattgtgaggatcaaaatggttccaaaggcccaacaatcacaacaaactttgataaaaaaaagaagtaaacgtagcaattggcttcgctagctggaagctggtccagggaggatacgtgcatggaacacacaacaaaaccttcttatgatttaaatggtcgttgacttttgacccttgtggttttttggacaaaaccctgtgtttttatttcatttctataaaaaagatttatctgcctttgttatgttttcttcttattaattaagttatcatcggacaaagttcaattactagttattaaaaaaaaaggttctatagttattataagtttgtaacaaaaaaaaaaatgttgtcagaatcagttgataacacatttgtctaattccttcaattttgggccaatgaaattcgaaagcccaaattacataatgggccgaaccatattattctctctctcgctctctttctttctctgtgctcttctccttcacggcgaagtgactcacttcc

SEQ ID NO: 15213 - DNA, 3000 bp, Unknown
  misc_feature (1)..( 3000): cDNA_ID_3095561_gDNA_ID_2926086_Annot_ID_196459 3000 nt of promoter + ATG
ttttcttgcttttattacatttaaaagataaaataatatgtaagagtgtcataggatcagtgttttaggaaaatccagcaaaaagagattcgttaagttacactttattgacggtcggtatacgaaacgagacaatgcttacaaattaaaagtcaagtttcttgaaaattcagttttcctaaagtttgccttttttttttttttttttttctctctttcccaaaagcaaacggagaccaattatagttgaaattcacctaacgtgccaattagttagattaatcggagaaaaaaatccatattgttaaggtttattgacatctaactcgaatccatagtctctaatttctatcttactcttgatgtagcattgctaacacacaaattcaagataatggttcttattcttgacaaaattccaatcgaatcaatcgaacctattttttgttagattgatttcagttcgagttagtcggtaaaggccaatgtatgtttaacttctatcaccatattaacttttatgaattttcaactcaaatcactatcagttcattgccctttttatttgttacttgggattcatatcacccatagttgtatagatctcattgtttgtgtccacaagaccacaacaaatagtgttactgaaactgaattaatttttgagtcaaacttaattattggttcattatccgattatcctttattggaccaaattcaaattctagagcttctctagaaacatcataaaatatcatcacctctttaagtgttttaagaatcctattctttgattatcttgatatacatgtcgaaaaatctagatatatttgcagagaaaaatctagatattatggttgaatgttttctagattaggataaatattgttagatattttgtagttttggattctatacatagttcatctttcctccatttttaaccaagttgaacaagtagaaccaaatgaataatagagtttttttttttttaaactattcataagttctctaaagtgtctcctaaatttttcaaagagggttcattcttttgatttctttcaacggtcttagggtagtgttaatcactatcgatgtttccttacaattaccaacacacaactttggctgtattcaaagtgtccatttttcatgttcgattaaggccaatatatctaaaaattaacacatcaattgaaattatttttgtaatcaatgtatatattttgatgagaacagactgatcaagtatatacgtgtattgaaagagaagggttacaaaaagtatatgatgaagtagtggtgactgaatttcaacttgcaaaccaatgtcttaatttggaagtctttactcatacttgaaacttgtacgtctctctctctctctcaacctctcgaccacgaagattgaagatctaagtagacttgcaatccaatggggaacaaaagtacaaaataaattagaataatttatttatttatttgtaaaagaacaagaaaaagaaaaagagcacactaaatgtggagagggtgagcttgaggatattagaaattgtggggttgaaaagaagaaagtgggtacgttaaggtaggggccatgctttgtgtttatgagtttaagagagaaagtgatgtgccgaccaaatctagtgatcttctcgtcgcacttccttcccacattgtgccttcttctctttttctttcttttcactatttttcttgttacttttcttcatagtaattttcatacgtatttaacataaaagtcatgagttttattcataacattcgactcaccaaccacaaacttagattaaaaatgttttcgcatttcttcattttaaattaacaatctattgtgcatttaggtcaacacaggagattgtactagtctaaagacaatctagaagtgtagtgaaattttttttagaggaatcttttcagctttttgacgaattgtttagaggaatctttttaattacaacttgacgataaaggttacaatctgtgggaggagaaaaaaacaaaaataaaatagaaaataatagttattccgaagaaagaggaatgtgtttggtttggtatcatgattatgtctaatgaagaaaacacaaaagactattactactgactcgagcaaaaaaaaagtattttggaaatgctactttaattaaactaagcagaacctctcaatcttatttatcatttttacacttttcctcaccaccagaacctaactacttttttggcttgcgatcagtggaaatgaactacaagtagtaatatctcttcttcaacgatattcgcatcatctccttaaattggaagctaactcattcaagttttagttgtttcaatcatggccttagtgttgggcttcttccttttggtgtatcttattgactagtttcatttgggctttttggggcatcttattgtgggcaacacaaaataactatgttaaatgaaagattaaaataaaatttatttgaacgctaggaaatttgaccggagcttttatgggaatatatatatattacaaaatctaattcattttgctttaattggtatatatatattacaaaatctaattcattttgctttaattggtatatatatatatatatttaagttttcttaactagacaagttggaatgctggtccacgcaatcttttgctataactatataataatatagtttttaaaaagttttgatttaagaatatcttaacaaatcatatttatagttcaccaaatgctaatattagtttatatggaataaaatctcatagggaacaataggaaattgactggaacttttgagggaaaatatatatttcagattttttctttattttacttactttaattgctttatccatctattttagttttgtaaaattagataattaagttgacaaatgttgatccacgccacaccatctttatttccaaatatttgaatcagattctcttttaaaacaatctttataagatg

SEQ ID NO: 15214 - DNA, 3000 bp, Unknown
  misc_feature (1)..( 3000): cDNA_ID_3095555_gDNA_ID_2926086_Annot_ID_196461 3000 nt of promoter + ATG
cgcactagtgtcaccttcgcttcaccacaaaattctaattgtcaagtgaaaatgactgggaaggttgttagatttgattttgaccttacagattttatctgactaatatctatgttgtttccgacattgattgcactgaaacaaacataatttaatgatcatttatattcataatgttgtcttttttcttttttttggtctggaaacaccaacagattctcctcgatgttgacgcataacaaaatgttggttatttacattgctgcaccaattgcgatcatagcgattctaatcgctcttttctggatttccatattactgtgtggcaaaaactccctcaagagttcaaccggtaagtctaatcttgacattataaccacacttagtgtttttaatacatttgatgtaataaaaagacaaagaaaagttttttacaagtcttttaaatgtgtcttttctatatacaaatattaagttttattgggtttattatttaatttaaacatattagttaatgtgctgatcatgaaagtaattacatcttttgatgctcttgtaattcacgtctacaagtgacgccacaacgcctgatcgagtactcgatggaggaattaaggcaagcaacgaacaattttgacatggataatactattgggcatggaagtcacggaacagtttacactgggctgatcaaggacatgcccgttgtgatcaaaagggagtggtgtagtccccaacctagattcttggatgaggtacacacaaacaaaaaattggtgatttcattgaaaataatttatgtatttgtgacatattgttgtatgtgtctcaggtttcttacatccaacataaaaatttggttaatctgctcggttattgttgcgacgacgagaaccaatcgctcgtctttgagtatatggtcaacggtagcgtccgagattatctaggtggtaagtaatgcattatagtaaactcttgaaatttgatccatacatcatttttatgtgatcatctctctttttggttattgagtagagtctagcgacttaacgttcaagaaaagaatatctatagctcttgatgcagccaaaggtaaatcaaaatggatgatccaaaactcacattgattgttctaaaaactaatattaaagtctctctgtttttcaattcagggttactacacttgcacaacttagatcctccagtacaacacaagagatttacggcgagtaaagttttgctcgatgccaacctcaatgccaaggtatcagatggggcaatgttgggactgcttcaagcaagtgatattcatctcgctaatccaaggtattaattaattcacttatgatcatataagttacatcattccttcaaagtcctaacaaatatgttcttatgaatattttctatagaggtggttcagaggagacaattgatgtgtatagcttcgggttgttccttctagagcttatcacctgtcaaaaccctggactgttacaatcagactatgaagttttacaatgggtacgtaatagaaaaaaaaaccctctctttctccatttacaacttttttttgtttgttaattgtatgtacttaaaaatatattgtttggaaatttatttgtgatttgtagataagtccgagactttttacaaacacattttgggataagaatatacctgcagaaacattcacgagaccatcgttccaagcttatctgataattacgtcggaatgcttggaatatcccccgataaatcgcccaaagatggatgtggtcgtgaccgagcttgagacgatttaccttaatgtcatcagtgagaaccatgaggtttctctaggaagtgagctttttaacataaccattgagtaagcgaaagacatggtgttgttgcttcagtctatttcgaaaacccctataaaggactataataaaattcaacttgactattacaaaccagaattaaaccgcattggattcgaactgtgtggtttaaatttggtttaaccaatccaaatccaatttataaaggcgaaccgaaccgaattggatttaatttgtaggtttgttttaaaaaaatgattgaatcttcgcaaattatttatatagagagactctctgcaacaaaagttgtataacgaaaaattacattttatcggattcttctaatatttatttttctttttattttaaagttttcgcggttatatccccaaaaattgtttcaatctcttgtttttgctgcttcttcatcttcctcaatctctctttcgatcgctcaaaaaacccgaagaagctctgatctgttcatattccgatctcttaccggatttctctaatttctctctgtaatttcttcttcaagtcccggcgatggcttccgagtgattttggatttgtgtaggtaagctctttcaatcttctctttttttttttttttttaattctgatttgttctcatcgaattttcaaataatttgagcttttttaatcgttcgtcctgcaattttcgttttttattcggtaggaaagttttttggattaggtgcgaagtttgtgagtttaaaatttggttctggggaatctgcgcactgattattgagctttggattttgaaattcgaagctcaaaatcgatgggtgtcaggtcttgtgatttgaattcgcataaatttcactagctggagttgcttaaggagattgattttctaatttggacaagttgtttcttaaacttctctgggtttcatattctattgagcgaaagtagggttgatactgataatgagcacacttttttggtatgaggtgggttttgcatgtagactttagtttcattagtactggtagtcagtttctttggagatgattaactgataaatagatgtatctatcaaggattgagcttatgatttattgtgtttgttgtatcttggtaaaatctaaacttgggttcaattttgggaatgtttcaggtaacagaagagctttaacttatg

SEQ ID NO: 15215 - DNA, 3000 bp, Unknown
  misc_feature (1)..( 3000): cDNA_ID_3095542_gDNA_ID_2926086_Annot_ID_196464 3000 nt of promoter + ATG
gtcttggaactctatatatacacatatactcgcatgtaatctttatgaatagaggtatcttggtataatgatggagcaacgctaaagggagaatcttattttgtggggagatagattgtggataagagaagctgatgatatgatgctcgagagttgacaaattgtgagtaagaggatagagattgatatgcatatagtagtaacttgtgatcatgatgatgtatgaagagaaaaaattccaatatttggggatcaatattacgtgttaagggaatgtcaactttgttgattctcgtcgatcatcacttttcttgccgcaaggggatttacgttgccatttatgacaagtactgaactagacagaaactcaaattccaaagtagattaaatggattgcttctttttattaagttaaaccatagtagagttctcacactccatgcacgctctcagttttgtaattgcatttttttttctttgttttggttaaagttttgtaattgcatgttgggtttactatgtaaaacagttcatattcttagtatttaagatgatgggacatagaattcgtagtgactcttgagatatcaaagaagccataatccaaaaacaaagaaccgtacggcaatgcaagtggcgagatgaccattgtacttaaggcataattaaccacgtcatcagcaaaattcctcaactagctagctactattggtttagtgtgtcatcgtcattgtcggtaagatttggactcatcatcattagtgattttaatctcctgttgatattgttcgaaagaatgtttgatgtaatcaccaaatataatataactgcaacaattgatgattaattggctaaaatattatctatttggccatatgatgatcgacaaaaacgttaggaaccaattaagcaccttagctacgacggattcttctgaatacgaaagtggtttgcgctattagtttcggacccgtagttagaaatcttcctttcaagttgaagttcattcactttcttttttttcaaatctttggttttttaattacattcattataaaacagttttttttggtgaatacaattttatatttatacaaaaaaattggctaaaaaatggcttgaaggacagagatctctgtcacaacgagcaatctaagtatgctttgatgattaagtaaacacatgattagtttttattttatgtacttaattagttttaccttttgtactaccatagttatttttggaatttgaagtactacactgttctgactttgattctcgaaacgtgtaatctgaatttgataccaacctagatgcaacgatatgtctgttggtgattaattggctcaaaacactatatacttaattctctttaccatcctaactttgaatcgaaactaaagctgatgtaatcacaaaatcggatgtaaccgaaaccgttgatgattagcaatattctaataagatcagtcagataaatcacgctataatactagtggacgatctttggaattggacctcctgaagcatatatcgtcatatatatgagcattggcgcatctagctagatatatagatatattcttgatatactatgttcacctactagaaaattctatatccatttctcatattttttttgaaaacaaattataattttggagttgacattttgcaatttgaaattcacttgtttgggaccaatattttaaatataaaatctcctgaaatttattgtttctccaacaccatagatgtaagattcttcattataacataggaaacaatgttgttaacattgtcttaacatctttaacattcttacacaaatccatatcattgtcctgaatagcgccaaaatgatgtattaatatggaaaaaagttgatgcataatatgtattatgtatgtatcgagctttattcatttaactaaaaataaaaattataaaagatgtaatatatgcatggaataggatcaagggaatatgatgacagattgagagtaacgtgatcattcatgaatgggcctgttggataaagctatcgattctcccaaagataaacatatatcaccacttgttacaatctcattaccgacttgccgtccctaaaaccaaaccaattaatacgtgtcaatatcctacttacaccattctcattcaacaatttttctgtttttcatggtctgaaaaaaaaccttaatactaaatttgaagacaccttaacaaatgaggataagagcatattcatcatgaaaaattcaaaaattctaccgagcgtcgttagctcaattggtaaaattcctagacgaatcttagaggttgccggttcgagtgacgcttgggacgaaactaatattatatgcggtggttttgggcctggagggattacaagattcggcccaaaacctcctgatattcaaaaaaaaaaaaaaaaaaaaaattcaaaagttctttcaaacaaaaaaattattagatgtttttgaattttatataactaaattatagttattaaaataaaatcaaaccaatgtacaagagaaaaaaaaagtgtggtgtggtgtatatggtggagagaaaaaaaaagtgtggtgtatatgtccagcgagaactaacggggtcatttattgatgaataacaagtttctggggtgttttatgaaaatactattttttatggggcaaaatccgtaaaccctaaaaatacagagttcttgcgtcaaagagactgatttgttcttgtgacactgaaccattggagttgactgatcccgatatcatgcaatatctatcgcactctcgtagaatcgctcgggctttgaaaccactagctctcgtcgagaccgatgtgagatttgtatccaatgctccttctcatgttgttcatcgatctctttcccactctgtatttccaggtactatcttcttcatttttcacactttgtttgtttcgtcgttgaagctttgaaaaatgggaactttttggtttataggaaaa

SEQ ID NO: 15216 - DNA, 3000 bp, Unknown
  misc_feature (1)..( 3000): cDNA_ID_3095551_gDNA_ID_2926086_Annot_ID_196462 3000 nt of promoter + ATG
cgtacggttctttgtttttggattatggcttctttgatatctcaagagtcactacgaattctatgtcccatcatcttaaatactaagaatatgaactgttttacatagtaaacccaacatgcaattacaaaactttaaccaaaacaaagaaaaaaaaatgcaattacaaaactgagagcgtgcatggagtgtgagaactctactatggtttaacttaataaaaagaagcaatccatttaatctactttggaatttgagtttctgtctagttcagtacttgtcataaatggcaacgtaaatccccttgcggcaagaaaagtgatgatcgacgagaatcaacaaagttgacattcccttaacacgtaatattgatccccaaatattggaattttttctcttcatacatcatcatgatcacaagttactactatatgcatatcaatctctatcctcttactcacaatttgtcaactctcgagcatcatatcatcagcttctcttatccacaatctatctccccacaaaataagattctccctttagcgttgctccatcattataccaagatacctctattcataaagattacatgcgagtatatgtgtatatatagagttccaagactcacctctccaaaacaaactcatcaaaacaacattaaatctccaatcacttcaaagaaaataatatacataccaaaagagtattactatacaaatggatgtggtagcaagattagcgtcgcaaagagcggtggtgatattcagcaagagtacgtgttgcatgtctcatgcaattaaacggttgttttacgagcaaggtgtgagcccggcaattgtagagatcgaccaagacatgtatgggaaagatatcgagtgggccttggcccgattaggctgtagccctacggttcctgcggtttttgttggagggaaattcgtaggaacggccaatactgtcatgactcttcatctcaatggatcattgaaaatattgctcaaggaggctggtgctttgtggctttagcactcgtttgatctttactttgacctttgaaagtctcttcactttatgtacgtttaattaaagcatatgtgaagaggaactactttgtattgagagtaattaaatatgtctatgtggaggttgatttaatgattaactataacccattatgggcgaggtcgcataaacctctgttttatttcctactccttacaaattaattcacaagtcaaaaatacatgcaactttctctaagtgaccaaatacctctttgcaaacgattgaatcaaactcatgatcataacaagtttatgccattttaatccacaagcgaaggttcttggcgacaactttccagctaatcttccgtctcttataacttgtttgtctttcatttgtcgatttcttctcttggctttaactgatctacaattttaaggctatttgtagatttaaggtacttagacggtaataactgatggaagcccatactgttttcctctaacacatgttgcacacctaggttatgaatgaaaacgtgcaattcaactacggataaaattcgaagcggttctaagagcatcctcattggtgactttttagagatgtctttactatagtttattgtaaaagttaacattattttaattttaagtcatttattagtcaagtgtgatgtctttaaaagtaagaaaatgtctttgcagagacatggaagacacgggtcttcctcctaaaagcattaaataacattttattttagtttttcatttttaaaaaaaatttaaagacactatgttttttgtgcaataaagatggtctaatagtaccaaaatatattcatacacacacacatatatatatatttttttgttactgttggaaccacaccacactgtgaggttcgaaatccattcggagtcttagtttttgttaaggttcaatacaaatgtatatgatctagatagtttctttccatctctttcttagtgacatcctatgttataaattcttgggctgtttttcttttggtaagcccaattagttaaggctttgtaagcttgtattctccatattaatcattttagatggcaaaatagaagtttgtactttgtatatatatatgtctggatagataattgagatattacaaatagttaaatttagtatttgaaaaaattttgcaagctcttgaggtttgaataatggtagagcatatatggtagacaaattaatccataaagaggtgttcatgtaccaaccttcctttataacaatgtgtttgtaatgagctggattgaagcagtttaaacacactattaccagttctaatttgtagtgaagattatttccaataccaatttaatattggagattttttcgatatttggtatagtccagttggtcagatatttttcctaacaataacttttcaatgtcgtcaaacatttcttagttagtttgattttaccatttaaacaacttttccaaataagattacatgtatagaatataaattgaacgacaaacgattatcgaatctatgttctctatatattatcttatccgaagagatatactacaacgggatcaccaacgcttttgatttcaaatctattgaaaaaggtatgtgattttttttttctcacgagtagatgataatatatgactgtgattttctcactagtatagctgtcgtttcaccaacgaattttagtttcaaatgaatgcaaatgcgattttcagtttcgcactagtgtcaccttcgcttcaccacaaaattctaattgtcaagtgaaaatgactgggaaggttgttagatttgattttgaccttacagattttatctgactaatatctatgttgtttccgacattgattgcactgaaacaaacataatttaatgatcatttatattcataatgttgtcttttttcttttttttggtctggaaacaccaacagattctcctcgatgttgacgcataacaaaatg

SEQ ID NO: 15217 - DNA, 3000 bp, Unknown
  misc_feature (1)..( 3000): cDNA_ID_3436855_gDNA_ID_2926086_Annot_ID_196460 3000 nt of promoter + ATG
actaaggccatgattgaaacaactaaaacttgaatgagttagcttccaatttaaggagatgatgcgaatatcgttgaagaagagatattactacttgtagttcatttccactgatcgcaagccaaaaaagtagttaggttctggtggtgaggaaaagtgtaaaaatgataaataagattgagaggttctgcttagtttaattaaagtagcatttccaaaatactttttttttgctcgagtcagtagtaatagtcttttgtgttttcttcattagacataatcatgataccaaaccaaacacattcctctttcttcggaataactattattttctattttatttttgtttttttctcctcccacagattgtaacctttatcgtcaagttgtaattaaaaagattcctctaaacaattcgtcaaaaagctgaaaagattcctctaaaaaaaatttcactacacttctagattgtctttagactagtacaatctcctgtgttgacctaaatgcacaatagattgttaatttaaaatgaagaaatgcgaaaacatttttaatctaagtttgtggttggtgagtcgaatgttatgaataaaactcatgacttttatgttaaatacgtatgaaaattactatgaagaaaagtaacaagaaaaatagtgaaaagaaagaaaaagagaagaaggcacaatgtgggaaggaagtgcgacgagaagatcactagatttggtcggcacatcactttctctcttaaactcataaacacaaagcatggcccctaccttaacgtacccactttcttcttttcaaccccacaatttctaatatcctcaagctcaccctctccacatttagtgtgctctttttctttttcttgttcttttacaaataaataaataaattattctaatttattttgtacttttgttccccattggattgcaagtctacttagatcttcaatcttcgtggtcgagaggttgagagagagagagagacgtacaagtttcaagtatgagtaaagacttccaaattaagacattggtttgcaagttgaaattcagtcaccactacttcatcatatactttttgtaacccttctctttcaatacacgtatatacttgatcagtctgttctcatcaaaatatatacattgattacaaaaataatttcaattgatgtgttaatttttagatatattggccttaatcgaacatgaaaaatggacactttgaatacagccaaagttgtgtgttggtaattgtaaggaaacatcgatagtgattaacactaccctaagaccgttgaaagaaatcaaaagaatgaaccctctttgaaaaatttaggagacactttagagaacttatgaatagtttaaaaaaaaaaaaactctattattcatttggttctacttgttcaacttggttaaaaatggaggaaagatgaactatgtatagaatccaaaactacaaaatatctaacaatatttatcctaatctagaaaacattcaaccataatatctagatttttctctgcaaatatatctagatttttcgacatgtatatcaagataatcaaagaataggattcttaaaacacttaaagaggtgatgatattttatgatgtttctagagaagctctagaatttgaatttggtccaataaaggataatcggataatgaaccaataattaagtttgactcaaaaattaattcagtttcagtaacactatttgttgtggtcttgtggacacaaacaatgagatctatacaactatgggtgatatgaatcccaagtaacaaataaaaagggcaatgaactgatagtgatttgagttgaaaattcataaaagttaatatggtgatagaagttaaacatacattggcctttaccgactaactcgaactgaaatcaatctaacaaaaaataggttcgattgattcgattggaattttgtcaagaataagaaccattatcttgaatttgtgtgttagcaatgctacatcaagagtaagatagaaattagagactatggattcgagttagatgtcaataaaccttaacaatatggatttttttctccgattaatctaactaattggcacgttaggtgaatttcaactataattggtctccgtttgcttttgggaaagagagaaaaaaaaaaaaaaaaaaaaggcaaactttaggaaaactgaattttcaagaaacttgacttttaatttgtaagcattgtctcgtttcgtataccgaccgtcaataaagtgtaacttaacgaatctctttttgctggattttcctaaaacactgatcctatgacactcttacatattattttatcttttaaatgtaataaaagcaagaaaacatacataatattaatatatgttcatactatggttcatacaggaaaattcgtatcataacattttttcatcatttatttgttccatagagaggctaaagtagggataaaacgtcacctcttattcacttttcttttatttcgtttaccaataaaaataaataatatatgaaagtaacatggtagtataattggagtgaatatgtaagaacattaattggaatacaaatttactacaccaaaaactatttttaaccaaatatgtcaccaaattcaatagaatttacactaatttttattgggaacacatgttcccatcatggcctctttcctcctccactggttattactgataaaataataacattagacacttaacaacggttgattctctggtattaatgaaaaaagaatttcgaaagtgcacaaaatggaccccaaactccacaaaacctgcaacacactcaattatacgcacaacatgcaaacaataataaacatcactgaccatccaagtatttcttctatatatgtagactctcactcttttacgactcaaagagcaaagagctaaagtccaaaaccaaacacaaaaacaaaaatctaaatttctttcttggtctgctttcaat

SEQ ID NO: 15218 - DNA, 3000 bp, Unknown
  misc_feature (1)..( 3000): cDNA_ID_3095580_gDNA_ID_2926086_Annot_ID_196455 3000 nt of promoter + ATG
ttttggtcaatagtaactagatttaatctcttaaatattttattgctaagtcctcttcttgaccaaacgtcccggctatataatcatcctctcaccatggttccaagtttcaacagcaaattggtttagttcaataagattttcacattcacacatcttaaagctgcaatgaaaaccgggtcagcaaaatccaacatcctcctatatgtttttgttctctcacttgtcttgtctccaatacttccatgtcaagccgctagtgtgcttctaggaggtaagctagttatctatgaatatcctccactatactgtatgtatgactctctctctctttcagttttttagagggattaatgattttatttttcactgaaaaggtggagggcgtaagctgatggcgccgtcaccaccaattcgcatgtgtccacagtgtgtatgttgtgcaccggctccacctgattcttgctgcccatgtcgttgtccaggcggcgcctgaagactgacgtttgctctcaatcaaatgggttattttgatgtgttaaatatgtgtaatctttataatatgtatatataagtaaataaaaagtgtaatctttgtattgtgaataaaataaccttgggttatgttgaatagttttactataagctagttttgatagtaacacacttttatacattgttttcttagttggtgataatgggatcacaaaagatttgatattatttggaaagaatgtttgacaaaaaatattaagaataaatgattcttgtttttagaaaatcgtgtgaaaaaccctcttcattatcccataaccgatacgtatcatttcaatcttcatcttcgtcacttacttacgaaatctcaaatgaccttttcccattattttatgttttaattgatttgcatatttgttgtgttgtgcatgtatatatagacttgactataagcatttgaatgtaataaccaatactcacttgtacatgaatttttttttatagttcttcaagatgacgagtaaacatgtttatttttgtaaaagtccactttgtacagtaacacgcagccaaacagcgcatgagaaaaaagaagtaaaaatgtattttccatcgttcatagttcaaagtagagtgtagagatgtgcctcttccggtcctatcactggttttgaagctacaagtaagagataacaaactttcatgagtgttactacagcgccgtcattcatccgaaactgagatgtgagtgacaaataagattgatgaaaccaccaaagtggtgtcgtggaggaaggtcttagctctaccactaagccaagcaagatagtcgaaacttcacataaacgagttaatccggttgcgatgacacttttttctaagagaatttgctaaaactcaaagtattactgcaattaattgtcttctacactacaagactatatgaagtgtaaagtctcttgattgagtgaaaaagttaaaacttgaaaaattaaatttttcttcggaccaatcctgaaaacgtgtttgcgaaatgttaatacatacgtgagatcacacctagttttgtagaaaatatatcaactatattttttctgtgacaaaaagttttatattatattaatttggatttccaagtagatatgcaactttgactaaaaaaaaatataatttgattaagaatataatttgcaactcgaatatgcattattataaagagttcctattatcaacaattggaaaaattcgctatgagtcacatgacaagatcacaagatagcatacttcgagccttcaattactacagacaaaagtatttaatagtatcgtacctttgactttaaacatcctttgtatgttaacaatattactgacgtcttaagataattcaagagtggcaaaaaatccatgcacaaaagctttaactacattatctcaaattaaaaacaggattcaaacaacaacaaaagttgaacaaaaagagtaaaagaccatgggaaaatgtattattttcgtcaattcttatctccttattttatctactaacattctataaatacacacttagacatataagcttatagaaaccaaaaaccatactcaagactcattatgactagctctatgaagaaaatgattcttatcattttcatcacaaccatggttttatctccgacaagttttatctcttgtctcgcaggtaagtaaactgcttagttaactgatttaatttgagaatttacctatcaatttagagttttttttatgtatctctattcgcatatgaagatgttcatgctactgaaagtcccaccgaaccagcaggcaagaacattgacaaacctcatcactaaataatcagaacattaatgagagcattttcaatattaatttatcttatttgtaaacattttttaatgattattttgtagcctctcacgttactggaggtgataaagtagcatgtcctgcttgccgctgctgtgaaggcccaaaacctccaccgggaacttgttgccgttgttgttaaatgttaattaagctcaaaaatcaacttcctcgtaaactttagttaagcctcttaattactattagggttcaatatctacttatgttgttgtagtgttgtgtattcgtacttgtcttgaccaaataaaagtgtagctagccgcttaaatccatccgttgttaggatggtgctttggccaaagtgattcgaatataccttttatacacaaatacatgtttagaatgatgtgttattgtgttacacttttaattggtctttaattttcacacaaacatgcatgaataaatattctaacatatcatagagagtgttccacatcaaaaccaatttatagtggttcatggtaaaaaaaaatcatgagtctggtataaaaaaaacttaccataacatcatgagtatgttgtgtgatagtgacatcaaagagattgtgaaaatactaagattagaaaataatttgagaaaacatcagaaaaaaa

SEQ ID NO: 15219 - DNA, 3000 bp, Unknown
  misc_feature (1)..( 3000): cDNA_ID_3095585_gDNA_ID_2926086_Annot_ID_196454 3000 nt of promoter + ATG
atatgttttatttctcgcactggtcttgtctccaacacttccatgtcaagcagctagtgtccctctaggaggtaagctaattaatctctgaaatttctcccatctactatcactctctctgttttggtttttcatagggagaaattgatttattaatggaaaagtgaagggcgtaagatgatggcgccaccaccacctattctcatgtgtacacagtgtgcatgttgtgcaccggctccacccggttcttgctgccgttgtggctgttctggtggtccctgaagactctgacttatgctatccaatgtgctatccaaggtccttaattccttataatatgtatgaacacgtaaacaaaaagtgtattctgtgttttgaataataaaacctttgggttctgctcagtacttatatgtttataagttagttttgatgtcctccttggagagttgatgaactactgtaaaaaattaaaaatgtcgaaatcctagagttcacaacaatgtcgaagttaatctttcgggttatgaatgtaaaaccatgtttacaatacatgcatctttgtttgaagtttataaaagtcagctaaaaatggtacaaggttatttcttcatctatgcttgtacagaatttttaggtgctagcaaaggctcttctatcatcgtttaatatgaactcgttacacaaagtcatctcatgcaaactacctcaaggtcaactaatcgcaatagttgcaacatgtatttattgcaatatctatcaggtagatggtgatatcagaagatagtgtatatcaattaccgtgtgaaatcaaaatatagctgcatcatcaaaactaatggcttattttggtcaatagtaactagatttaatctcttaaatattttattgctaagtcctcttcttgaccaaacgtcccggctatataatcatcctctcaccatggttccaagtttcaacagcaaattggtttagttcaataagattttcacattcacacatcttaaagctgcaatgaaaaccgggtcagcaaaatccaacatcctcctatatgtttttgttctctcacttgtcttgtctccaatacttccatgtcaagccgctagtgtgcttctaggaggtaagctagttatctatgaatatcctccactatactgtatgtatgactctctctctctttcagttttttagagggattaatgattttatttttcactgaaaaggtggagggcgtaagctgatggcgccgtcaccaccaattcgcatgtgtccacagtgtgtatgttgtgcaccggctccacctgattcttgctgcccatgtcgttgtccaggcggcgcctgaagactgacgtttgctctcaatcaaatgggttattttgatgtgttaaatatgtgtaatctttataatatgtatatataagtaaataaaaagtgtaatctttgtattgtgaataaaataaccttgggttatgttgaatagttttactataagctagttttgatagtaacacacttttatacattgttttcttagttggtgataatgggatcacaaaagatttgatattatttggaaagaatgtttgacaaaaaatattaagaataaatgattcttgtttttagaaaatcgtgtgaaaaaccctcttcattatcccataaccgatacgtatcatttcaatcttcatcttcgtcacttacttacgaaatctcaaatgaccttttcccattattttatgttttaattgatttgcatatttgttgtgttgtgcatgtatatatagacttgactataagcatttgaatgtaataaccaatactcacttgtacatgaatttttttttatagttcttcaagatgacgagtaaacatgtttatttttgtaaaagtccactttgtacagtaacacgcagccaaacagcgcatgagaaaaaagaagtaaaaatgtattttccatcgttcatagttcaaagtagagtgtagagatgtgcctcttccggtcctatcactggttttgaagctacaagtaagagataacaaactttcatgagtgttactacagcgccgtcattcatccgaaactgagatgtgagtgacaaataagattgatgaaaccaccaaagtggtgtcgtggaggaaggtcttagctctaccactaagccaagcaagatagtcgaaacttcacataaacgagttaatccggttgcgatgacacttttttctaagagaatttgctaaaactcaaagtattactgcaattaattgtcttctacactacaagactatatgaagtgtaaagtctcttgattgagtgaaaaagttaaaacttgaaaaattaaatttttcttcggaccaatcctgaaaacgtgtttgcgaaatgttaatacatacgtgagatcacacctagttttgtagaaaatatatcaactatattttttctgtgacaaaaagttttatattatattaatttggatttccaagtagatatgcaactttgactaaaaaaaaatataatttgattaagaatataatttgcaactcgaatatgcattattataaagagttcctattatcaacaattggaaaaattcgctatgagtcacatgacaagatcacaagatagcatacttcgagccttcaattactacagacaaaagtatttaatagtatcgtacctttgactttaaacatcctttgtatgttaacaatattactgacgtcttaagataattcaagagtggcaaaaaatccatgcacaaaagctttaactacattatctcaaattaaaaacaggattcaaacaacaacaaaagttgaacaaaaagagtaaaagaccatgggaaaatgtattattttcgtcaattcttatctccttattttatctactaacattctataaatacacacttagacatataagcttatagaaaccaaaaaccatactcaagactcattatgactagctctatgaagaaaatgattcttatcattttcatcacaacc

SEQ ID NO: 15220 - DNA, 3000 bp, Unknown
  misc_feature (1)..( 3000): cDNA_ID_3095655_gDNA_ID_2926087_Annot_ID_196476 3000 nt of promoter + ATG
ctggcactcatcagagagacaaaagtcacatagtttttacgaccgacacaattgttaagccactgtagcaatgattagaactatgtcatcaactaaacccatgaaaatccagtcaaacatttgaaacatcagaaagcttaccttgcaatggtgatcaaaacaatcaacacatttatcacaacttcgacaatgcttgctgaacttgcgtacctgtgaaacatacataattgagtacacatctaaaatctgaaccaaattgctttccctaaagacttcttaaagcagattctagaagataaagaccaagaaattttagttattattaactgctcatacatcatttacttttcatattaaagaccatacacatgacaaatataaccatggagacttgatgtagaattctgaagcttagtacctcacaattgcacaatgtgcaaaacagagcctcttcgctgtttccttgttcttccgccggcccttcctttttccggcagtcttccacaacaaacacataacagaaaactgccagaggattatagcaagatcttctacttacagattccactctttgagcatcttctacagaacctttcacactagagtttccagccacggtagaactcctactgacaaccgaaggagaagcctgcaactgactaccagtttcatcataattccttgataagccacgaaccatgccatctccattcacgcctgtatcaaatatcgacatgattctcggatccgcaggattgattgcagtacaccgaacatacaaaacaaacacaagaatagcctgcaaaaacacacacgatacataaaggaacctatcagataagatcaatgccataaactacacagctgtggaatccaaaactcgttatgaatttgcaaaattgattctgatcataaacactactagcttgagaagcattaaacataccacgggagagtaaacaccgatcaaaacgtattcccaaatacgacctccaacaaaaggagcgaagaaagcatagaaagcgaccaccaacaagcaaaacaccgtaattgcaatcacctgagaagaaaaatacacagaacccaattgaaatcacagccattggtgactttagattgagcagattcatgaaaaattgaagctttggctatagagaaaggttacattcgattttacctgaagagtgtgagcgggaagttgccaaccgtgtttcctcaccataccttcttctccaacaacaataagcaaagataaacaaactctaattttccgacaacgtcaccgtcacgttgccgttcgccaccgccggagcgattaagtgaagagtgttgttgctcgttgaaaagggaaagggactgagaaaatatcgtctctctctgttactgtggcaggtttagtcttaattaagtccaaatggttgacccaacttttacattagtggataattaattataaataattttggtattataaataattttggcataattataattaaatttcaggatattggctggctttttgtcaaaaaatatatgctgtattaaattaaatcatgtcggaaatagtaaattaccaactggctattggctattgattatgatattttatgaaatttattttgaattcataaaatatttccaaaaatggtatttattttattgtagctaatatgtaaaaaaaagttaggaaataattttttttttaccaaactttttaacattagtgggactaattataactatggtttttaagactgagctaatctatatgtacaaaattaaaaagaacagtgactcatgctaatgagtggctattgatttatttatttttttggacggctattgatctttttattttggatcaaatataataaattaatccaattctgaaatagtcataccaattggctcttggctattgaaagttggtaaaagcatttactaatatatatatatatatatagtccaaattcaaaactgatagtttgtaaataacaaaaaaatattttgaatagtttactatgatttttttttgtaattcaccgtaatgtttcagttttcaccatagtaaatacttagaaatacaaaataaaataattcaaacaagtcttagtcttagagtggaccaaacaaattttaaaagcctaaacaagtctactcttatagatgtaagtaaatctcatcattcccattattcacgcttccctccaatttttgttttggcatgcgcgttgcacaaaatttcaaacaaaaacagtttttttttttctttctaattttattttattaataacataaataaatggatagagatattattattatcaaaaaacatggtgatgcgtttagacagagagaagaagaagaagaaaccctagacaccaaaagaacgaatcgtggatcttccgcccactcgcttcctcagatcgcgtgaacaccactcaccaatttttcttctctttctctcttcttcttctctatctccttttcgcagatcgataccccaactcgcacccgattggcgcgtgttgtcttcttcttcttcctcctctcgacgacgaagagattaaaaagagacggccttttctcagtttctgctccgattcgtatatcttctgtttcgtacgaggtaaagttttcatttttattttttgtttttgttttatagtgataaccaacacaaatgattgggttatacagtagttttgatcagcttcgttttaggaattggatttgaggatttcgtttatgtgatgaaatacccactaagaatttagctgcaagttgcttttttctgcaattgtaagggcaaaatgtgtatactttctcgatttatcatcatagaaagattgaattttgatgggtttctctggtttgttacatcttttgtgtgtgactttagtatacattttgacctagatatatgtactgagacctagattttgtcttgcagtgttgtaagacgtttgttttgcctgagactataggtttgtcatg

SEQ ID NO: 15221 - DNA, 3000 bp, Unknown
  misc_feature (1)..( 3000): cDNA_ID_3434408_gDNA_ID_2926087_Annot_ID_196481 3000 nt of promoter + ATG
aaagctgatgaattcttcttctaagtttgatctcgtaaatgtttaattgaaggatctagggttttgtaggatggattcagatttggaacctgtagctctaacaccacagaaacaagacagtgcgtggaaacactgtgaagtttacaaatatggagatcgagttcagatgagatgtctttactgtcgaaagatgtttaaaggaggtggtattacaagggttaaggaacatcttgctggcaagaaaggacaaggcactatctgtgatcaagttcctgatgaggttcgtcttttcttgcagcagtgtattgatggtacggtgagacgtcagaggaagagacgtaaatcaagtcctgaaccattgcctatagcttatttccctccttgtgaagttgagactcaggttgctgcttcttctgatgtgaataacgggtttaaatcgccgagttcggatgtcgtagtgggtcaaagtactgggaggacgaagcagaggacttataggagtagaaagaataatgcttttgagaggaatgatttggctaatgttgaggttgatcgagatatggacaatttgattcctgtggctattagtagcgtgaagaacattgtgcatcctacttcgaaagagcgggagaaaacagttcatatggctatgggacggtttctgtttgatattggagctgatttcgatgcggcgaattctgtcaatgttcaaccgtttatcgatgcgattgtttctggaggatttggtgtttctattcctacacatgaagacctcagaggttggattttgaagagttgtgtagaggaagtgaagaaagagattgatgagtgcaaaactctatggaagagaacaggatgttctgttttagttcaggaactgaactccaacgaaggacctttgatccttaagtttttggtttactgtcctgagaaagtagtgtttctgaaatcagttgatgcatcagagatattagattctgaggataagttgtatgagttacttaaggaggtagttgaagagataggtgatactaatgttgttcaagttattaccaaatgtgaagatcattacgcagctgctgggaaaaagttgatggatgtgtatccttctctatactgggttccttgtgctgcacattgcatagacaagatgcttgaagagtttgggaagatggattggataagagagattatcgaacaagctcgaactgttacaagaattatttacaatcacagtggtgttttgaatctgatgaggaaattcacttttggcaatgatattgtgcaaccagtctgtaccagttccgctacaaattttacaacaatgggaagaattgctgatctaaaaccttatttgcaagcaatggttacatcatccgagtggaatgattgttcgtattcgaaggaagcaggtggattagcaatgactgagactatcaatgatgaggacttctggaaggcattaacattggcgaaccatataactgctccgattttgcgtgttttgaggatagtttgttctgaaaggaagcctgcaatggggtatgtctatgcagcaatgtatcgagcaaaagaagcaattaagacaaatctggctcacagggaggagtacatagtgtactggaaaattatagataggtggtggttgcagcaacctttgtatgctgctggtttctatttgaacccaaagttcttctatagcatcgacgaagaaatgcgtagtgagatccatttagcggttgttgattgcatagagaaattagtccctgatgtcaacattcaagatattgtcattaaggacataaactcatacaagaatgctgttgggattttcggaaggaacttagctatcagagctcgtgacacaatgcttccaggtacgccatttattaattgaatctcaaaaagatttcatatgttcaagtgttttgtaagtagttaaaacatgtttgattcctgtagctgaatggtggtctacatatggagaaagctgcttgaacctgtcacgttttgcgatacgtattctgagtcagacatgcagctcatctattggctcagtgagaaacctgacatcaatctcgcaaatatatgaatcaaagaactctattgagcgacaacggctcaacgatcttgtatttgttcagtacaacatgcgcctcagacgaatgtaagttggaatcttttgatcttcttgattactatactgtcttttgttcaaaacagaacttaaaaggattctctgtctgtttcctctagtggcagcgaaagcagcggagatgacacggtagacccgttatcacacagcaacatggaagttcttgaagactgggtttcgagaaaccaagtttgtatagaaggaaatggaagctcagactggaagtcactcgagttcattaagaggtcagaagaagtagctgttgttatcgacgaaacagaagacttggggtcaggtaaaagctttgcagaacctagtttttgtgaatatcttgacaaacatgagagaagttgtttaaaaggtgttttgaatgaaatgcgtaacaggtttcgatgatgctgagatattcaaaggggaaaaggaagcgagttacgaaggcggttattcggagaatctgttcacttgaacttgcaccttttcctgtaatcatcatagggtttgattttgtgattctttcttagggtttgatttgtattattaatagaagtctttaccagctttaagttgtatcccagaaactaatagttactcttcttcttcttcttcctcttcttcttctttactcagtaatgagaacaaaaaccattttagagatgttgattgatatttactaaagctttctctcttgtccatataatattgtttggacataagctaatcttgattctttaaaaggataagtgaaaaaaaagagttgaattcagatgctatctatataaagagatattattatcctcaagagccttatcctgaaagtttggttctgagaagaagagaagaaaatg

SEQ ID NO: 15222 - DNA, 3000 bp, Unknown
  misc_feature (1)..( 3000): cDNA_ID_3095628_gDNA_ID_2926087_Annot_ID_196483 3000 nt of promoter + ATG
tgtataaaatgatttggtgtataagtgttagtgtataaaactatgttttattgctggtgtacgagaatgataattaaaaacatataaatcatcttgtctttggaagaagaaattatttaaaaaaaaatatttttttttaataaaattcaaaaagatgaatatgaaaaaaaaataactataatataataaaaatagttctaaatagttaaataatataaaaatttagactcatattttctcatatgaagtaaagggtaaagtggtatttgacatatttttgtcttttagcttattacacataacctctatttcataaaaagtaaaaaaaatgtctatttcaccaatttctaaaaaaactacctacttctcaaattattttttaaaaagtgtctattattctaataagccctttttttttttgaaaaggtattcaaattttataaataaggtctattgggatatttccgaatttagattcatacaatttttacttagtatctaactaaacaaaaccaatttaaacaaaatcgaaccggtcctatgagaaccttaatctcaaatcgtaaaacacgattgaaccgccgtttatgaactgcagaagggattcacatatcctctagatagtacttgttcaatttgtctctttcaacttggatgccatgagatggtccttggaacattttagtataagcagaagggattcacatatcctctagacgtaaaacaaacatggttttgaacccaaatacattacccacagtcgaggtatacatggtagtaaccaaacattcatcaaaaagatctaaggggtaagttattatattcgcaataaattgaggttttttctcccaaaacgggtttgatgtggtagcatcatctttgaaacgatccaggctggtatgccccatcgctttagtttcccatgttccagtagaagattcagcagctaccgcatatatcgtttcttcatcgacactagctttgtatccaacatttgctttagtctttgttttggtgagataagtccctcccaacaagccatatatttaaaattcttgcaacaaaacgaaacaacaaggtctactagacataaattaagatatatcatttagttaaccttttcacatgaattttcacaaaattaacaactattcaaaatgattcaatcagaatgattcaatcggaatgattctgtattagaccatgatgcttgattcgccaaatacatcatttagtatatatttttcatatgtatagcgcaatctaatacttccttttcacgttacgttatctttgactttttatatatccaaatatttaatattaaaatcttaataaaatcactcttgacactaaatatgtttaagaaacctattgcctattctcgatgagaactaaagcaaaagtttttgtaaattgttttttatacatatacatttcagttttaaattatttttcagctagttgagttccaaatgactattccatcattggataagaaaaaaataactccacatttgccagggtgataccaacaaaattaaattctaaatcccattttgttttgaagtttgggttttgtgaaaaaaacttcaaaatcgtctttttgcaattttgacctctctcttaaaaattacataataatcctattaaatataatatgcaatatagccgttatacatatattgtaaacgttttcacgatcacgtatatttgttttttaaaattctaaaaagaaaattaaactcctcgtctccaaggtttcgttttgatatattatttatcaagatgttaacaacttgacaataccaaaaagggttttaacatcaactttgaatccaataattgccttagtctctgtttttggtgactataagtccctccttacaagttatgaatttagaattctttcaattaaaagaaaaaacaatgtctactcgatataaattaagaacatatcatttaataaattatcctttgcacaagaacttttcacaaaattaacaactaatcagaatgattctttattagaccatgacagcatatggtgataaaaaaaaaatcaaaaaggctagtgagatcgaaataatatatcataactatagttctgtttcgaattaattagataaaacaaagtatttcctattgcatattctactataaatatgatcatagattcatagtaaaagactttttgcaattttattttattcaaatatattttattttattactatgtctcagttaattgagcttgaaaatgaatagtactttactgaataagtaaaatatttttgaattaaccgatgaaatcaaagttttttctatatctgaaaatattcgcaacaaaagttaacatttttctgtttggaattgtaatatttttttttaatatgagaataaaaattccattggacccaaaaatgatacattggctaaaatctctttttcttttactcctactttgatgagtcctactactttggatccagaggtttcaatacgcttttaaaaaacacttgtggaatatttatgattcttcatcatcaaaacttgtgtttaactccataattaattcatggttcgagctagagatatgttgaaatcagctaattttcataaatgtcagatttgcaatttgaattttgttttgattctgattaagaaagacaggacatcggagtttttttgaaaaaaggcttttaacaaataatagaggttgaaaaaggccgttttcgtcgctttcctcttcccttttgcatttcacaaaatagcatttactttttcaccgcaattctttgttactcgacaatcacttgtgacttagttacattaaaaaaaaagtggtggtatacgacttggctaagatgagtctgttctgtatatgtttgtaagaaaaattaaaaaatggtggtacgtcttccttaaattaagtccacaacactcgctccacttcatatttctcccttccatcattcctcagctcctcaaatcagaatg

SEQ ID NO: 15223 - DNA, 3000 bp, Unknown
  misc_feature (1)..( 3000): cDNA_ID_3594430_gDNA_ID_2926087_Annot_ID_196482 3000 nt of promoter + ATG
aactctcttttaatgatctgtctgcctacactattggcagttgtatccagggttgcggcgaatgtgtcatgtgctgcgcgtcaggattttcaggatgatgagactcaagactttgcccaaaccagaaaaacaacatatacgtaatagaggattcatcagtatgttatttgcttcactggttgaaagagatccatgattcccatttgcttcgtctattttgtttctatataaatcaaagtaaaaaacaaaaatagctagtcataattcgtagcaacaaaatatgacgtaatgattttttattcctaagtttaatacaatatataataatataaacaacacctaagtttataaagttgttttcctttgcagtttaacagatcacaccaacataaggaacaaagccaaaactattaatcatggttcaaaggcagttggttaatcactttttcattttcatgaaatgttaaattaattaatcatcaaaagaggttatttaatttacatagagtttagagcaatacccaaaaaaaaaaaaaagaggttctaaaagacagttccaggaacaaaataattcaaatttgttaaattcctcatgttttacgacgtcatgtacgtgtacgtcatgtacgtgacgaaagccatttctgcaacaaaccatttctcactttcatctcaaccataggtatcgctttcctctgcccttgtgcatttcaaacaatatcatttgctttatctctgcaattatatatgtgttggatataaccaaaaaacctagacctaccacttcgctaaggtaggtctgtccgtgagttgtctgtgattagatgtttttattgttcaatattgactcttctttcttttatataatgaataatgtaaaaaatttcctaatatttgtctaccttataaattagaagcacaacactctctcctcttcacaaatctcacatcctcactcctcagctcctcaaatcagaatgaatcaatccgcgcaaaattacttttccggtaattatcttcaattgttttctaaaatcatgatcaatgtctaacgtataatcatgatgaacaataattctttactcaccaactagataactttttttttttttggcacagtgcaaaaaccttcagagacttcatcagggccgtacacaagtccgccaccaattggttatccgactagagatgcggtggtgggtgatcctccggcagcagcagtggagacaaactccaagggcgtcaaccccgaagccataatgagttgttttaggtacgtgtatatatatatatatatatatgtttataacttggctctaattatccaagatgttatttttttatatatccggcgttctactttttttttttactgatatgtctgttgacactattggcagtacttgtatggagtgtatcttctgctgcggcgtatgctccagcctctgtacatcagagtaaatcagcatgatgagacagaagtcgttgcccaaacctgaaaaacaacacgtgatagaaaatctatatatatatatatatatatatatgttatagtagtcgtttctatggatttccacgcattttaaagtttatttgtttcactgtttaaaatgaatcatttgcttcgtgtattttgtttctatataaataaaagaaattaaaaaccaaatagctagtcataactctttactactcaaaggaaactgtgttttagtgttcttaattacatcttgtttctgaccaacagtgaatgatccttgcatgggactcattaacttcaaaattaacgatttcatacaaattattgttgtaagaaatagataaaaaaaatgtttgacgatagtgaggaattaaggatggttgtgtttcgctttaaagttttaagtgaaccaaacggatgtgcgcacagttcgatttacagttttaagtggttgtgactttatccaaatataattattacgtgaaaaatgttttttttttcaatcaccaatcaatagaaaacacatgaaaatattatccagcgggataataatagacgagctagatttggtatttttatgaatgcgatcttttatgcattaatcaaccagaatttgcaaaatatctgagtctgatgctaattggattagaaaatatctgaatcccggcaaaacaattgaccttcctatacacgtgaacaatgcggactatccagtcctttgcgagaaagccatagccagtgacggatctagacccaaattctatatggggcactttatttataaaatactagttaaaatttaattagctaaattatattatgattttaaaaaacattatacctaaattacagttttgggaatcgaaattgggtttatatgaaacacactttactgtaaaaccatcaatgctatctaaattttcttgtacatacatagctaatacactatttataagatttaaaatggggcacatgcccacccagcttcaacatgggtccgcccctggccatagcacaattgtacaaggaaagactttgggtgagaatcattaatccttgtcttgagaaacccaactacaaatatcgaatcaatctccagctccactcttatgatttgcttctcccaagcgatataaagcccatagtagactctccgtaattctggtagaggtgcagaacaacgtccaatgttaaccgtaaaaccgtcacagcaattacgttctccatcccgcagagctcccccagcttacgaatctcgactttagttttgtaaaacaaaacatataaaacgatgtccaaacaaaacatataaaatggtgttcaaaaaaatattttcgaatttggtggtttcagggcctaaaacgatataagaaacttacatgggccttttaggatcatctcattttaatgggccgaattcgatattgaaataaaacaaattagggttttactcagcacactatataaagacaatcatctcttcaattagggtttcttctttgcggtggtgagaaacaatg

SEQ ID NO: 15224 - DNA, 3000 bp, Unknown
  misc_feature (1)..( 3000): cDNA_ID_3095643_gDNA_ID_2926087_Annot_ID_196479 3000 nt of promoter + ATG
aaaacatcacattgctcaaattctctttgatatctcataaagtatactgctctgagtcttaacaggacacagagagtagcaggaaattgtaggaaaacattataaaaatgacaccaaaagggaaagtctggagtaccagagaaggtttagtagtacggttccaaaaggagtgataaaacggcaaggtgttcaactgttcaacagcggcagaaacaagccttggctcatttcctcctgcaaggttttgggttaacaatgagggtcagaatcaaggaataccaaactgcagaaaaagaaacatcaattcatgtttagtagtattagaaggaagaatacctaaggcagtacaccataaaccagcgagagagtcaagatattttttcccagtatcatcatacacataacttccctgtaagaaaaacgtcacacttacacaactgtttgactcaacatttacactatgaaaatgagattttgacatgtacctcagactttgcaatgaccaagggatctaaatcagcactctgccatccagcagtaaaaggtgcaagcatatcatgccctttagacctgctcagaataaaaacatcaccactattcatgtctcgttgacgacgctataaagccttcagaatacaacgcttagaagcattaaaaaataactcacccaacagtgtttttcttctcaggtgctgcctcagtagtgaaaatcctcctggaagtggagttcccagacatgcaagtggcatacttactgtgcaaatgaacctgccattagagtaaaaatattagcactataaatcacatcactgtttttgggttaggatataatgatctccacagaattttcttcaaatttatctctttgttataagaagattatcattcacaacaagagatttgttccactttatgagaaaaagtttgttccttgattactggagaatctcagaaaagtatatactctcgaaaagacatgacctttttcatcctgatccacgtcaatttggcgttttgaaaaaagattagatttttatttacaattgttggcatattcaatgttattctgactcctgatctattaagcaaaacattcggggaaaattatgatgatgcaatcgaggatcatgtatgtgagaataatgagatcatcaagcgagtaagaagaagtggaagaacctgagtggtacgcgccaagcgtcggagactgttgataacgaccattttctcctacaacggatcgaagaaaacagagagagagagattgttaaagagaggatcaaaggagaggaatctgaagaatcctggattgtttgagagggagagctgagattggttacaaaacagaggatgatgaattgatgatgatgatgccttatatctttttatttatttaatcttttcgagttccatttgattttttccagtgacgtgtcattgagtcattttcttaatattatttttgatttattttattttaaagggaaacaaatcattttgctgctctctcacagagataataataataggttgtaactggtgcagtagtagcaagggaaagaaaaaacaaataagaggctagttgtatatagcagccataccataaaaatatcaattaaaattttattatattttctgctgaaataaataaaatggagaaatatagtaaaaaaaatcactccaatttgaagaaaaaaaaattatgtctcgatgtggaacacattttaatacacttcttccctcgcgtttagaaatggacatctgaaacgttaaggttatgggactggacatctatatatggttcacaatcgagacacattaaaactttaggtttatagcatattagtatgagcctaactcatacttaaaaattacttcaagtggaaattttaccatatatttatatattattctatacataaataaaattttatgtaggacatattctaataacttttctttgtgtgtttgtttttatctttttatttttcatttactaaataaaaacaccaactaggccaacccaactaacagaaaaagtagccaaatttgatggcatatttcaatttctaaggagggatagtaggaaaaactggagtaaaaattattttaatatacgagtttccataagattattacataaccatgtgatagttgttacgtctaacaaaagtaaacgaaaaaataataattatctttaatttagattaaaaaagatactaataatgatccaacattacaaaaactagtgacatcatataattaggtgacacgtcaacttattttgtcttctccattcaaaatatcagactgcaaacaagacttacacacataaatgcatgcattaattaaaaaagagaatcaaacatatttcaaactaaaactgcgtgccgtttcgaggtcaaaaaacgccgccaaattgaagaatagagcacgcgtacggcgtgcaatctaatctatcattcaatcaatcgtatctgagagaggagagggaaaacgaaacgatcaatcaagtcaattcctatctatctgtatatgttcgttcacacacatatcccctagagagagaataaagtatggacctttttctttttgtagagtagagagagagaggaaaaagtaaagtagccgagaaagacgctcactgactgaagaagaaaagatcacgaagtcgccactcactctctttaaagatctcatcggcgatctttccttcgccgccggtgtaaagtttttgaattttgcttctcctcgatgtgtctcaattttgcaaagtttggattttttgttagtgttcattactaaatttcttggttttaatattaaggatccaacattgtcaggagaatttagtgaactcaattaaagtttccatttttgtctattttgttatcaaaaaggagaaagctttactgttttgaataatttagttgctaaattggcaattttgcaggttttgtgttgttttatgttgctgatcgttggaattgagatagaatg

SEQ ID NO: 15225 - DNA, 3000 bp, Unknown
  misc_feature (1)..( 3000): cDNA_ID_3095648_gDNA_ID_2926087_Annot_ID_196478 3000 nt of promoter + ATG
cttcatctttccctgatttatagatgcacttctcaaacttaggcataaaattatcatgttgcttaacaacttgaccaagattctcagaaaccttcatcaatacatgccaaagaaaaaggcaatgccgtgtattggggaagatttcgggaacaatggagttcattacaacgtctagctcagtgatcaaaacctttggagcttgtccaccgattgctctcagccaggtctccattaaccaagaatatgttgctgcactctcatcggatattaaggcgcacccaaggaccatatactggtagtgctggttcactccaacaaaaatagcaagtggcatcttgtacttgtttcttacgtaggtggtgtctagagaaacaacatcacaaaaactgccatagttatgcctgctctttgcatctacccaaaatacattcttcactcgctgatcatcgcccagatctactgcataaaagaagttggaattcaaggattgcatccgtgacaagaagtcaagcaggattttgaaatcccctgtttccactgataaagtccgacctttttcaaaagaacttttcgaatcgctttttagacttataacagttttgtactcagcaaactgcttagccattgcagcatatatctttctggtctgttcactcacagcttgtgcaggtaaaagctcatgattatgctccctcacaaagctgtgaattacccatttcccatccggccttctcttaacatgcatactagctttgcaatcggttttcgcacatgttctcctaccagccatattctctggatcttgcttactttgtctagctcgtggccgattaaaagatttgtcatattctcttttagtaccatacctagagcaagcaaacttcgcatcaataaactctcttgtagttttcgatctacgactgttctgtatcgcagtgttaaaccccatagctcgagaatactcctggtaaaacgaatacgcttcaccgtgtgactcaaactccataccattaagaggttcaagattcataccctcagtgtactcaaccaactccccagttggaacacccatgcctacactgtcatcagtattaacctcaacagaaacatcctcaattttgccaatatccatatcttcttcattgtgtaacacattatcaagtcctctatcctcatcatctcctttgcaaaggtcacctgaatgtagtcgaagatctatatccatgacaaacctatagtctcaggcaaaacaaacgtcttacaacactgcaagacaaaatctaggtctcagtacatatatctaggtcaaaatgtatactaaagtcacacacaaaagatgtaacaaaccagagaaacccatcaaaattcaatctttctatgatgataaatcgagaaagtatacacattttgcccttacaattgcagaaaaaagcaacttgcagctaaattcttagtgggtatttcatcacataaacgaaatcctcaaatccaattcctaaaacgaagctgatcaaaactactgtataacccaatcatttgtgttggttatcactataaaacaaaaacaaaaaataaaaatgaaaactttacctcgtacgaaacagaagatatacgaatcggagcagaaactgagaaaaggccgtctctttttaatctcttcgtcgtcgagaggaggaagaagaagaagacaacacgcgccaatcgggtgcgagttggggtatcgatctgcgaaaaggagatagagaagaagaagagagaaagagaagaaaaattggtgagtggtgttcacgcgatctgaggaagcgagtgggcggaagatccacgattcgttcttttggtgtctagggtttcttcttcttcttctctctgtctaaacgcatcaccatgttttttgataataataatatctctatccatttatttatgttattaataaaataaaattagaaagaaaaaaaaaaactgtttttgtttgaaattttgtgcaacgcgcatgccaaaacaaaaattggagggaagcgtgaataatgggaatgatgagatttacttacatctataagagtagacttgtttaggcttttaaaatttgtttggtccactctaagactaagacttgtttgaattattttattttgtatttctaagtatttactatggtgaaaactgaaacattacggtgaattacaaaaaaaaatcatagtaaactattcaaaatatttttttgttatttacaaactatcagttttgaatttggactatatatatatatatatattagtaaatgcttttaccaactttcaatagccaagagccaattggtatgactatttcagaattggattaatttattatatttgatccaaaataaaaagatcaatagccgtccaaaaaaataaataaatcaatagccactcattagcatgagtcactgttctttttaattttgtacatatagattagctcagtcttaaaaaccatagttataattagtcccactaatgttaaaaagtttggtaaaaaaaaaattatttcctaacttttttttacatattagctacaataaaataaataccatttttggaaatattttatgaattcaaaataaatttcataaaatatcataatcaatagccaatagccagttggtaatttactatttccgacatgatttaatttaatacagcatatattttttgacaaaaagccagccaatatcctgaaatttaattataattatgccaaaattatttataataccaaaattatttataattaattatccactaatgtaaaagttgggtcaaccatttggacttaattaagactaaacctgccacagtaacagagagagacgatattttctcagtccctttcccttttcaacgagcaacaacactcttcacttaatcgctccggcggtggcgaacggcaacgtgacggtgacgttgtcggaaaattagagtttgtttatctttgcttattgttgttggagaagaaggt

SEQ ID NO: 15226 - DNA, 3000 bp, Unknown
  misc_feature (1)..( 3000): cDNA_ID_3095770_gDNA_ID_2926088_Annot_ID_196498 3000 nt of promoter + ATG
ttgtgtaagaaaaaaaacatattgatctcccaattcaccacttgcatccttccacgttgataagagtcaaccaaactccattaaacaaagaaagcttacgactaattgacgagagttgatggcctagtgatctttaaaacttcgataactgagactacgatggagtagattgtaatctatagtgtgctacacttcaaccacaatactaatgagtaacgtagatataacctagcgtacgtagtttcatttgcatacctttaaaatttctaatcttgaaatgaaatgaaaccgctatcaagaaagaaagaaaaactaacttgatcgaactatagaaattctcaatatatagcatcctataaaatccttggaataatactttcgaaaaagtactggtatccactatcaaactatgcagagtacgaactaataatatacatcgattggtctttatcacacgtttataaaaaaaaagaatccaacaaatcccaatattgtgtgttttaactgatcacaactcacaatatccaatggatcaatcatattttatggagaaatctcaaaagaaaacgtgccttatttcatctctatttatacacacacaaaacactcgtttatttatagcacaaaccttcatctagagacacaaaaaccacaacatgactaacctcatccttatcttcgccgcacaaatcctccttttctatgccgttgcttccgtcggagatgaattgggaagaaccatgaacgggaaacaccttggcccttacaaaaaggagaaactcactcatctccgagtctattggcacaactctgtaaacggtagaaaccctagctccgtgatgatccaacagccggtcttgaactcttccttatccggatcgatcaccatgatggacgatccactaacattcgatgtgccaaggaatgcgactgtggtgggccaagcccaagggatgtacgtagcagcggcccaaggagagataggcttcttgatggtgatgaactttgctttcactacggggaagtacaatgggagtacgataacgattcttgggcggaacgtggtgatgtcgaaggttagggaaatgccggtggtcggaggtagtggaatctttcgatttgctagaggttatgtcgaggctcgcaccaagtcgtttgatctcaaggccggtgttgccaatctacatatacatttttgcagccattttaacaaataaatcttagagttgaacttatttacaacccaatgccattagcattaaatttttttttcaaaataattaattttacattaaattcttaatttaaattgtcaatcacattatcaatcaaatttaatccaaacaaactgcacatcaatcctttaaaattagcataaaagtattttgttaacaatattttaaaacaaagttttttgtttaaataaatattgttcttactaaacgttttttgtttaaataaacaaatcatgtatttgaacttatttacaatgtcatgctactgacattaattattcaggcatgaaaatatttaattaaagatttaaatcttctaaattcttgcttttagaattattatatcattacctaaaaggcaaaaaatattaattttttaattattattatttatatatttaaaattcataaaacactattaatatttaaatttataaaaagtttaatatatcaaaaaaattaacatcattatataatatatagagtttaaaaaatctcaaaaaaaaaatcgtcatattttgtgattcaaaattttaagaatgaacatatattaactaattggcgaaaaatgtatggattcaacgtcccgcaacgaataaaatattttgacaatgattcataaatatattataaataagatcaacattaataaaataaataaattttttttgtggacgggtttggcgggacgagtttgacaggatgttacttagtaacaattgtaaactataaaataatttacaaatttttacatatattaattttaaaaaatgaattgtctccgcggtgaatctagtgttgaatataattgttatattctgcattactgaaataattaagtttggaatattgttcatttgatttcattacttatttgtttttatgtctcgttttgttatgagagtgttattgtcttttcccaagttaaataatgtattttatcttgtaatggtttgattttattcatctaaaaaataaataaataagtagttgtttatatatacattaaacatacattttttggtcaaattaagtggcacaaaggctctactccgcgttaatttggaaaatcatcaactgattagcgaataaattatttgaaattttgatagaaaataaatgttcaaataaatataatgattagttagcccaatcacgagctaatcaaaccttaaaaaaaaaacaccaaatcaaacctatttattgtctaaaaccaattttgatattacacggagaaattaaataatacatttagctacttttttgtttgaaatagaaaagacattcaaaatagtaaacatataaaaccattgtaagaaaagaaatcaaattttttatttcttaacaaaaacgtgaaacgtttgtttccaaattagtcgcaagtcacggaccgtgtgacgcaaaaaaagtccattcacatcattattacataatttttgtcataaggaaaattaatttgatttttccaaatttttttggttcttcctcttcagaatatctgacgtggcataaatatcgcctttttcacatcgcctgtcttcttttctctctccattttgggaactttcatccataaacttctatttttctcatcgcaaacttgaaccgtcgtaaccctaaatcgccatcttcatcatcggcaaatcgaatctccgattatatatcaaatagcttaccaaatccgacatgacccaggccctcgttttcggaggactataatgatcggactcttcgtgtcccgtctcgattgcatggggtttgagct

SEQ ID NO: 15227 - DNA, 3000 bp, Unknown
  misc_feature (1)..( 3000): cDNA_ID_1388484_gDNA_ID_2926088_Annot_ID_196500 3000 nt of promoter + ATG
tgggctctaaagataaaaatggaagcttcgggattaagtagagtgtctctcaagtctcaaggaactttaggttttttgttaatagagcttcttcatccacataatagaacagccttttttaagaacgtccacacctaaattgctgaagcttgaaagaatgacgaccatgggcgatcttccaggcgatttggtagaggagatactctctagggttccgctgacatctctgagggctatacgatctacttgccaaaagtggaactctttatcgaaaagtcagatttgtggtagaaaagcaacagcagcagagaataagtttctggggtttatgatgaaggattcaagggtttgttcaatgaaatttgatctccaaggaatcagaaacgacgacggggagttggttgagccatctataaagcaagtaagtaaactcgatcaaatcgaggtctctcaagtttttcactgtgacggtttagtcctatgcatcattaaggacaacacagggctcttggtatggaacccttatttggggcaaactaggtggatccatccgagaaacaattaccagatagaagataggtatgctcttggatatgataacaaccgtaaccacaaaatattgaggattttcgatttgtatccaagcagcaaccgcgtttttgggtacgaagtctacgattttagctctaattcatggaaggttcttgatgtcattcctgagtgggatatacagtctcattttcgtggcgcgtctttgaaagggaatgcttattttcctgcgcaaaagaaagaaacagtgggaggaataaagacaataaatattgaagatgttctactttgtttcgattttacaagggagagatttggaccgcctctgccactgccgtttcactcttacaatgcagacttttttgtgtctctagcttgtgttagggaagagcagctcgctgtgttatatcaacgctggggggcatttgagacaatcgagatttgtgttacaaataagattgatcccaatacggtttcgtggagcaagtttttgataacgtccactggttttccggttgacactttttctgggagctttttcattgatgaggagaagaaagttgctgtggtttttgatttagatagatataaaccgactgagacctgtcgctaccaaatagtttatattattggacaagatgaatacttcaaatctgtcaacatgggagttgccccaaatatcgcgaagaactcgtaccaagcttactgtgttccacttgtgtgctcttcttcctatgttccaagcttagttcaactacaaatcaacaaaccgggcaaaaggaaagaaagtaactagttccatttacactactttttatatttttcttgcatcatcttcttttgtttcattccattgactttgatgttcttttgaacgatcattaacttgtgttttgctatttatctgcttataaagaagtggggggttttgtgatacaatcagctcggcctttaactaaaatcatactagttgtttagatgtaggagtccatatggaaatagatagataagttaagagaatcatttactgcctctgtttataaaaaaacactcgaggtattggaaatgtttcatttgtttgatggtttggtggtctgatgcatcgtgttctgtgttttggtttcttaaactcttgaatgaaattaggcataaattttgagtcttccctcagctttatccttgaacaacctttttaacatcttgaatttacccatttggagtacacaaatgcaaccattcacaaaccttctcccacattcgcgccaaggacaattccacccatgccacgcttatagcttagcttggattgctcccatctctcgcacttcaaaacatagcttctttgaatgcaagaccaatatacaactccattcctaacgattaatgggcgtctcacttcttctctgaatgtgccatttacttccaatttgagcgacttgtgggttttcatcatccgagtgtcactatcgggaaatatgttacggcctaaaggaaactcatcccacaaactgtggtatattattctcaacttcaaactcaaaccgtttcattgcatcctcatccaattgatcaatacaaagggaaaactaaaacatacaattaaaaccaataaacaccaacttcttaagaaactagcttgttgccatgtcattaatcaacaagcaatctcgagtaaaaagttatattacattagttccttatacatcaaaatctggattttacaaggagagctgtgtgaatagcaattccaactccttctcttgagacaatgttctctgtccaacaaagaaacataagttagttagtttcaaaggtgtttcatatagagtagtaatgtgaagaagaagaggattgacttacttggacagataaaaggtcgttgattttgttgagaaccttgagacgatgaactgcataaacactgtttgatggaagtttacaaacccttttgatctcttcctgaatcacactcgatttctcatcacaatccatctcattccatctttctcccacacgattacctctgcttcccatttcgtaactgattcctcagctgaaacttcaataaacagacatatacaatgaaaacggaatcagttattacaaagataaagggctcgaaaaataacaactttgtgttcgatcgaaaatagaacaaaacagaacagtgggaagaaagattgagtttttacatcaagggttacgaattcagagctcgcagtttccgattttgtcacactcaagagaatttgcgaaaagaagtgatcgagaattgtcttccagccctaaattcgacaccggtcttcttatcaaataattttggctttttcagttatttacttacccgacccgtaaactaacctgtaacccgacccgggacctagctcactaagaaccctttaagccctaaaatctccgatcacatctgaattttgcttcttcctggcaatg

SEQ ID NO: 15228 - DNA, 3000 bp, Unknown
  misc_feature (1)..( 3000): cDNA_ID_3095757_gDNA_ID_2926088_Annot_ID_196502 3000 nt of promoter + ATG
atggaagttaattacaattagaataatgtgtaagacacaaaataaagaggaaatggtccaaaatgtgtaagtatagaacagagcacaatcacaggtgagtagttcaggttcggtgtcatctagtaaacctccgtggggtccgattccatcccctaatcattatctctctaatttcactctcttttcttttctttttttactttctctcattattactacaaaaattttaaaaactaaaatccttagatcatgtggtcctcctctatgcaaatttccacgacgcatgatcccacgatctctcttaaatcaagtttcattatttgtctattttagaatttggaacaagttatatattcttttatctgtgaatatagttcaatacttcaatatgttggtttgtgtttgaatctgattagtgttaaaagagttgagataattaatctaagttagggcttaattattgtaggtcccgaacgtcctttgacgttagctctgtcaccgtcacgggacacatcttcaacggcggccaatgctgtcacagctgctatcagtctcctcctgtcacacacattaactatacactttttttttttttccttctcaacaatagacgttattgtaacactatttgggtataaatatacaattaagttgatcattcatgaattaataattcttcaaaactaattaaaaaccaaaagtctataataacgacaacgttgaatggcgttttttgctggggtaggtgccggcatgagctagcatgtataatgttttatagtagtaaccacaccgacgtaaaaaaaaacaatacatatatttctaatcagtttgtggtgaatatttaatttaaggaatagtctatatacattatacatattttatagttttcgtttgaatcaaagcttcatgcacttcatatatattcaaaaaacgatttgaattttatcacggaacaaaaatatgtgaattagttcattaagtttcaaagctgtccattgtcttctgttgtcgagacagctaaaactgccacgatgaatggttacaacaaaaactcaacgtttgttgagataaatttgatacaaaaattcccaatttcacaatgaattcgcaaataggataccgtaacgctgccaaaattattctaattggttgtatgtagaaataacgaagttttatagaattcttcatacgtcggtttctctaacgacatacattgcaataatttgaaacatgaattaatataaaatacaattgcatcgtgcgggccatttttcattaagaaaatcacatgcacgtttttaaggactctgtttcctcatattcgttattagattatgtgcatactttagctaatcggtcatacatcaattgtttagaaacaatgaccctaaatttaatcacttatctcgtaacctacgttttagtaggctagcgagtagcgacccactagtcgtatactttgcatttggacactgaactagtaaccataatttttcaaagttatagtggagtaaaccacaactatacgcatttatttttgcaagcgccactaaaaacactcgagcagtctgaattctactccaatggttatttgtgtcttcataatgataatgatacagtgaactgtcccttgcctcttaaatactttttttttttttttcgacgttgcgtattaatttagttataatgcggttatcaatttcgaggtagaaattgcattaaatcagtccagaacggtaacatacatttattatcattttgagtaaaactaaacaaataaatgtaagtgtaattaattattgtaccaggtacttccacaattaattttccggtcgctataaaatggagtaatgcaaaacaatagtaacaatcttgtaaataaaatattaatcaaaaaaattcgaacacaacaattgtttgcataaaacaagaaaatttgaacacacgtaacgtggccatatgtatagacaataatcatgcaaaaccactgccgaaacaatgaataatatggtccactacatgccattttcgagcttctccttattgcaatatcgtttttattattacccatgcaggtccaaagtgtaccactattagcatgaaaaaagatacttgtatttttattcaaccatcattacaaatatactttcaacttccgcacatcaataattgcacctttatacaggtacctgcacatattgtctaatcatcatgtatgatctatgtgtgtatgctcatgaaacacacatgcacacacacacgttactagaaatattgtgttaatcaaaccaagctaatttaccttttgtatggtatataaccataagatattaagatggataaggtttaattaagatcttttatgttttgagtgatcccagaatttggatcacaaaaagaagtacatgacatgtgaatcaatggaagagatgtggaaaggccatgtgtgagatattatatgcattgggggcgaaatgtcaatttttattcatcataatgtgatgaagagaagagacaatgaccctacactattaaattgcatgttctctttatctttaacattaccatacatcatttcatgtatgggccgctttggttatgtcaacaatgacatgtaactatcttctccactcttatcatccacaattgtgtaatagactaaattaatatcaccttacaggcccaatgggctttaatatattttattcatttaggcccataaacctttattttttctgcaaaccacgcagacgcagattcgaaaatcgtaaccgtagatcgggaaaagtaacctcacgaatccggaagatttctccgatcaatttggcgacgacgattttttggttattaatcttcgaaggtgttgaagtaacttgaggtagattggacacgattgtgaaactcaggtgtgaaacgaaacgacgaagagattagggtcgattagtttctaagtaaaacgaagcggaggtgatttggtgacttaattgaccagaaatg

SEQ ID NO: 15229 - DNA, 3000 bp, Unknown
  misc_feature (1)..( 3000): cDNA_ID_3095744_gDNA_ID_2926088_Annot_ID_196506 3000 nt of promoter + ATG
ccatgggactgcctcacggtgtctccgatgcgttcacaagaatcaagaccaatcttgcttacttccgtatgaactacgcaatcgttgtcttgatcgttatcttcttcagcttgatctggcatccgacatcgctcatcgtcttcaccgtcttggtcgttgtttggatctttctgtattttctccgtgatgagcctatcaagctgttccggtttcagatcgatgatcggacggtcttgattgttttatcggtgttaaccgtcgttttactcctgttgaccaacgcgacgtttaatattgttggagcgcttgtgaccggagctgtgttggttttgatccattcggtggttaggaagacggaggatcttttcttggatgaagaagcggcgacgactgagacttctgggctgacgtcatacccgtcgacttaaatcgtttcatctcgaaatttgtgtatcttttctatttttgtatattatcttgtttttttaattatgcgtaatcaatttttattggtgtgagtttggtttgagactttctctctctcttttgttttctgagttttgagctctgtctgaagtttgaacaattctaatttgttataatttttattactccctctgtccataaaagataaattttttaggaaaaatatttgtcttacaaagatagaaattttatatttgcaatgcaaattttaaaattgttttcccgttttacccttactaaataattagataaatatttattattatttttaaaatatattaagaggttaaaattatgtttatacaatatttcttaaaaaatgtgcaatttctaaaaaattcatcttagtgggacggagggagtattttatattcgcaaaactcaggaataatttcttggaatgatttattaatctgaaatatttaaaatgatttaatctgaaatacataataaataatcaaattaataagtcaaacattataaattcaaaatgggttgtaatgaatattccctttttgcattccgtaacaaaaaaataatcaatttttgttgtaaagtttattcaggttggttcaccttcaaagtaggaaaaaaagtttggtcttgatttaagttcttttttcatttgggtcacacaaatgagcaatttgaagcaaaaatccttgatatatatgcaggccttattcaaatttccaatgtaaagatttgaagcaaaaatccttatatataattaggtctttcaaaaggcacaaatattctagcccatgtaattctaaacggacgccattagatatgtaagagcatcttcatcagtagtctttcaatgagatacccaataaaaaaaatataataaaaaaggaaaaagtaagagagaaggaagaaaaagtaggagagaaggagaattaagtttcttggaggagaaactttgagaaactattctcattcaatttggacagctgttatcctattattagtttaactattaaataacaattaatatatctgtcttaattaaaatattaatattttaattttttgaaaaactttccttactgatggagatggtctaacagtattgagcatacacatctttgtacgcgtcagctcccttcgccggcgcttaataccaccgccacacttgccgccaattagaagcaaaccggtttaaagtggcgtatcaccaacattacgatcttaactacgtctatcgacatcatcctcatccccataatcttatccactcaagactcaagtacactggacgtggcagaccaagtttttctatttaattcttccaacttcatattccaggaactcgatcgactttcagacattgaccaaattgaatcagatcataacgctacatccttttatatatatataacatcacgctacattattgtaataatatcacaaaatttctacggaaaaaaactcggtctaatgttttaacacaccatctaatttatttggttttattccatatgcaaattcaagagaccttcttcatatattatacacagagagataaaacaataaatcagaacagttttacattatttcaatcaagtcatcttattcactaatggcgaacaacgacgagattaccacgtcgtctcatgcatctccggcagtgaatcacgagtctatctcacgcgctaagcaacgtatcaaagacggactagccacgcgccgctcctggagggtgatgttcgatttacactccacgggactacctcacggcgtctccgatgttttctcaagaatcaagacaaatcttgcttacttccgtagtaattacgcaatcgtaatcttgaacgtcatattcttcagcttgatttggcatccgacctcgctcatcgtctttaccggtttggttttcctatggatcttcctttattttctccgtgatgtgcctctcaaggtgttcaggtttcaaatcgacgatcgtgcggtcttgattggtctatcggtgattaccatcgttctacttctattgaccaacgcgacgtttaatattgttgcggcgttgatggccggagctgtgttggttctgatccatgcggtgattaggaagacggatgatctttttttggatgaagaagcggcgacgactgagacttcaggactgacgtcacacccttcgtcttaaaacgattgatctccatttttatgtatattctattgtttttgatcatcttatgtgtaattatagtttatggtgtaaccgtgtaagtttggtttgattctctctctgtttttaagttttgaagtatgaacaaacttaataatgtcaaagtcttcgcttcttgtttttggcgggctgcttacttttatcactttttggcgccttattgggccattcattaaggcccaatagtatcagcccataaaattcaaaaaggaacatatttttacatttaaacagtgtgtctcacacttccatttacacgtcagctctcttcgccggcgcttaatacaaccgtcaacctcgccgccggctagaggaaaatg

SEQ ID NO: 15230 - DNA, 3000 bp, Unknown
  misc_feature (1)..( 3000): cDNA_ID_2990585_gDNA_ID_2926088_Annot_ID_196511 3000 nt of promoter + ATG
cgtaccatatatagtttttcacattttcttgggtaattttttttttgtaacggcttaggtaaaaaaattacatcatcttgctgttgtagcggtaattaaggataaatatatatttttattggactggatataggtaataggtccatgaattttctctaatgaggctagatatcatgattaattttaaaaccagcatttagctttctaatttttttgttcggatcctatcagtcgatgaaaatataacgtgatgtgttgaaattaggatgagctagcattgtgaaatataatccctaactacgaatatttgtattagtatagctctctttaactatgaatattagagcagttttgtggttgactgcagtaataaagatttattgacagagaagctcggatctaaatctacatgaccttcgtcgttatcttctctttctttgtggagctatattattttcttgttgttcttcatagttaatctgaacataagggaatacattaattaggatatatgataataaaattaaaacaaccacccgtacaagattttccttgacggccgtaagatccggaactagaaagtcaaactctgttgcagttcaaattccgtgtactttactcgccgcgcgcgcgtgacaaaaaaataactatgtgagtgggaaaggaataaactaatgaagaagaagagaaagcaaaagaaactcgaacgcggagaaattgttgttgtcgtcgcagttaacgggttttattttctctattgtcttaaattttcttgctcgttccattttcactttaattgctccacgcatctcaaatcaatgacaaaaaaaaaaaatgtaccagtgtgaatgtgtcataagatctctttaccaaacaaaaaaaatgtgtcataagatctaaaacattatacggatctaaataacatacaaaattcagatcgatgcatgcgcagatgccttgtaagcgtgttggttatattttgaggagtataactttggatatgaaaaatgttaactaaacttaaaaccgaaaaaaaatatgttaaactctcttcttcttttttttttttgacaaaatgttaaactctcttattcacaagttttctacaccagttcaatttgttttttttattcaataaaaaactacttcatcggggtatgtgttatcaagtatttcattgtagttgttaattggtctatgtgaaaatatataaatttgaaatctaattaacataatcacgacaaaataaatatgcttttaaaataaagaaaaataaatatgattgttagttatttacattttttaataccggccagtagtatatgctgcggctagctctttgccatatatgatacgtgccggtgcatctttgttttgcttgactactaattttatagttctgtgtttattcataactcgaatatttgtctctatataacagatgatagaaagcatggttttattcaaatgtaatcgattgcgttttactttaatgatgctttacatacacgatatctccctttttcgacacattatctcttcgattagaacaattattgtgtatgtttgcgtgttttgatgagtatcttatagtactacttatttgaaattaataacttatacaaacctttaaccaaacacattttttgttttatcaatattaataaagatttatagttccccaattccataaatatgaatacgacacatcaacgaaaattatgaaaaacagccatatatagtttgcaatgtcgaatctcgatatctccgatggtggtcacagctattgataaacaataattgaacaaatcatgatcatacttaataatataaatggccatttaataagctgttagaagttctatcaattaaatagctagatatttaaattaagcaatttagtaaattttccacaataaaacaagacgaagtttatgtaaagtcttaaacatgtatagttttaggtagagaatcgaagacaattttttttttttttcaaaagtttgcatgtgttcagtggttgagaacttgagataacgattggtttatctaacgaacacgctctttcatatcttacaattaacgtttcaatcagacaaaggaaaagttaaatagatgtgtagtaaaaaaaaaacatattttgtttgtagtctttgtcttgtaaaagtcttagaatttgtggtggctaaacttaacccgtgacactttgcaagtattgttgggccatttactacaacgtgcagcaaaacgcgtgaaaaatcacgtagcattaaaacaaagagccagacaatctggagattattatgaagattttttttttatctcgtaccgatttcagccaaaccaaaaaatcggattccataaaaccaatcagaaaaaggagatgtggcatttgaatttgttgcaaatgttttcactcaatatttattgaaaaagcaaaactccatattaaatcatactctaacatttttttttcctactatgaatgctactacaaatatggtggaaaactagttatttgttttctctagaaacttacactttattcgtctaaatttgcttgcaatagaactatactaatgaacattcaaatcacaaatgaccttttttactacaatcctaaaaaaatcttaaggtattcaattatttaaatgaacaataagaaaaagacacaaacacggtgggacccaaaaaggtctctcaaggtaggtcccacgagaataccctccattgctgagtgctttaaaaacagctgcaaagcatctacgttttagcatccgaacaaaaaaaaaaacaagttttcttctttttacactcaagaatataaattccctgttctccagatcttttctcaagaaaatttaaagctttaacttaagaaagcttgaacctttctcttccaaccacatcttccttctttttatcctctagctcaacttagaaagaatagaataaagtggcaaaaccgaaagtgaaccaacttgtagtaaattaatagtt

SEQ ID NO: 15231 - DNA, 3000 bp, Unknown
  misc_feature (1)..( 3000): cDNA_ID_3095696_gDNA_ID_2926088_Annot_ID_196517 3000 nt of promoter + ATG
ccctagaaatatccaaaacttgacttataattttgaggactttttggtgatgtggatttgggacagatcttcgctgaaggaagataatgacaaaacgacatacggagcttttgtggatattaatcctcaccaaccactatccctcagagccttggtaattaagtctcccattttgtattttacgtatatagttttatatattaatttatgttcatatgtaaaaacgcttgcaaatatagggaagaaaaacctcctttttaaaacccatgagagtaattatttaacagcttagcctcttgatcaagactatataatcttcaactatcttgttcaagtattaaggcgaatatttaattgtggatttgttaataaaagtttctgttatttgttgttgttggtgtagattgatcattcagtagtggagagtttcggtggaaagggaagagcatgcattacctcaagagtgtatccaaaattggcaataggaaaaagttcacatctctttgcttttaattatggatatcaaagtgttgatgtcttaaacttaaatgcttggagcatgaactctgcccaaatcagttgatcacgtaaagatacacacatgtaaacacattacatctccattgatttagcatttatatgagttgattttggagagatcttatatggtccactttgtttggttgtcaataaaattgtccaatttgtttgtttgaaataattctaaaaggctaatatatatgacattttatttgacttccttatagtatgacttactattataaaaaggacaattctagagtcggtagtcaaaatcttccaagttccaacgaacgtgataatagtggactttcaatgaatataaacgtaaatatgtatacatgtacatactatatgaaacaaattgagtacgatcttaaagtttggccccccaaaaaataactagtatgtgtatgtataggatcattctatgtaaatcagcacacgtaacttttttctaaaatgcccgacggctatattaccacaagtatgaaattgcccaatatgacgtaacgaacctataacactagcgcctatctatccatagcgatgccaacatgatttattatttattacaacggcgttgggtttacattgttttcatctaaacggcccaccgtttcagcatttaagaccaacaacttcacgtcaacgggtctggtcaactaattaaagcgatcaaaccatctccaccgtccgatactaatccaacttcgtctgtcccgcccaagggcaagcccgtaaatatgttcaccagcaatgatgggagtagcatgtgggacataacattgcatggtagtgttttttccaacagcgcgctaaggctaaatcgttgtcgtttagtaaactgctggctctagatttagaatacgtgcgtgagatgtagccagagcccagagggaagttatggttgaatccggtttgtgtccactttaatttggtgtgtagtgattctcgcctgcacatctctctctttcgaaatattcaagtctcaagcaatagtgatgatatggacatgtaagtagcgaccaaatcaggtgcagtttcatttcattttttgcatttaattttatcagaactcagaagttgaaagtacatattttattaagcaaaaaaaccttctcaaattcagattaatcagaattcagatcgcagagtttagttaaaagcacatatttaagaaatttaattttctttttaagactattatttcttatttaacttttaaaagatcaaccaattgtaaaagagactgcagaatatatcaaaacatttaaaatttctattgaaacttctaaaacatcttatacagtgaaccaaaataaaatttcttaaacatcctatataataaaagagagagagtatactttcaactttagatgtgggattttagtttacacgtcttctcgagactatggttttataggttcatcgttattactaaacttgtcctcaaaaattagttaagttcttagtttcacagtcatgcaatttacaatactacacacccgtgagtctcgattagttgttataatatggattttggaaagcacatgcactgatgcacagcatctaaaagtgtgattacccattacggaaaaaatcccatcaaaatgattaggagaatgtgataatcaaaggagaaaacttagtggagccaacgcactttttgaggacattttgattgtctttctaaattgagttccaagagagagttcaagaagaatcacgtgtcattgtactagtaggtataatcctattcaatttcaaattgacttctcaatcaatattttttacctgttacagattgagcatttcaatagtggagagctatatatggtgggggaggcaaggcatgcataaacatcaaaacagtatccaaacctggcgatagaagaaaatgaacattttcgttgctttttaacggacgaaatcaatagtgttgtttattttacaccgcagcaatgatgagacactgacattccataaagtactcaatactattactgagtggaaaatatttgcaattatgagaagacaaaagtctatgagatcttgaacattcctgactgtcgggaatacgttatttagcattatgtttgtttatttaaaatttgtattttcatacatatccaatgtcaaccgaaattggtgaaacaatcgtttagaaatgtaaccatcccaatttcatcatgatgctagttataatttatgagaatatcttataccttgacaaaatatatatatctttccaaaaaaaaaaaaaaaatttggatctcaagattctcaagtctcaactaacatgaaaaggcatttggatcgagattatagcatctaattttcacaaaatatggaccaccaccacctcaagaacgcaccaaagacccccactgtctataaatttgaccaatttttcataagtaaaactcaaacataaacacgaaaaaaaggattgcaatg

SEQ ID NO: 15232 - DNA, 49 bp, Unknown
  misc_feature (1)..( 49): cDNA_ID_3095690_gDNA_ID_2926088_Annot_ID_196518 3000 nt of promoter + ATG
gttcattcaaacaaaaaccaagccacaaagaaattaaatacacacaatg

SEQ ID NO: 15233 - DNA, 3000 bp, Unknown
  misc_feature (1)..( 3000): cDNA_ID_3095710_gDNA_ID_2926088_Annot_ID_196514 3000 nt of promoter + ATG
tacatctcaggaattttaaccccatacaacattaagtaaaagataaaatattaaacttgtcaccttagcaaaaagcggcttgtagagattatcatatgttgcctccaatgcagatttctcagcaagaaacttctcttcgagttcatcgtgtgtaacctaaaaatttactctacaagtatacataaaccgaacatcgagcctctctactttagttgtaaaagagcgaaaatttgaaagtacctgaatgtctttgaggaacagaacacgtttggtaactttaggtgagagttttttcacatcaaatggtcgctttaaggttaggttctgtaagttaatcaacacccaaaaggatcataaaaacagaggaaacacaagaaaactactgtgtgaatttttatcaacaatttgaagtgacttgccttaagctctgcaagaagatcacattcctctgccccaatatctacaaagcataatggttagctagcttcaattaaccctattccttgttgattccaagatcgaaaatatataaaacagggcatttacttgaggcagaagtaaatgtgagagggtagatttttggttggattatccagagatttattgttttatcgagaataagatgtaaaattttgtgagttgtttatgaaaattacctaaggcgggaatggtagggagatcagaggaatcgccgctcttattatcagatttgatgttttcttcgttgctcatgtttttattgtgtttttgattgtggtgatgggaagtcttcgttgtttcgtgagaaaatgagaattttcctgggaagaagaaaaatgaggacgacggagaaaggaaggaggagaagacttcgcggctttttcatttgtaaaaattcattcacacgtgcgagagaggttaacaacgtggatccttagtggggtaccatgaactgccatataacaacagcaaaaggaaacggcaacgttttttagcaatcaaacccccaaattagaagctgtaatgttgtagagaatttcacaagtactgtactcgtacaaatgaacaaataatatatcatatgatcagaaatctcagttcagacagacacagtacactattgaacaaaagattgtcgttgtaaaaggaagaagattagatttgcttacatttcaggtttattaggagacttcagctattattcttcttcttcttcgtcttcatcttcttcatcatctacatctgattcgtcttcttcttcttcttcttcttctaacttagcttcttcatcactaacaatgaaacctcccaatgtttcatcatcatcatcttcttcctcgacatctgctcttccacgctgtttagtttgagcaccattactactactactactagcgtttgaatctttcttcgtcttcttggatctagtcgagtaagtaggagtcacaactctttttgatttcaccatcaactctttatcttcatcactttccacactccaatcatcatcctcattccctttcttccttcttctctttttccctaatcccttccttcccttcttatctccatcttcatcaccatcgctatttccattagtggaatcctctaaaaaccattcccattgctttatgtcacgcaccctactctttggatactgatcaaattctttcccaatcacaagaaatccaaactctgcaaccacaccacacagtacacaaactacacattcagcctcattcttactaaaaagaaaaaatcctctcaagagcataattctagacattataaaagaaaagcaatgcagaacaaccaaaatgttgtttattgggacacaaatccagaaacacatcaagttgcaaaattgattacctttaacaggatcaatattcaattcgatttcaccatgatccaatgctcgctcctccataacttcatcgcgtctcttcaaagtgaaccaaatggggtgattacccgatacacaaaattgatcgccggtggcgatttctccagtctcgggtttcctcaaagtttgaatctttttgcccttttcaacggcccttatccagactggattcctcccgagaacctcgaaggaaaccatatcggacggttcggttccggcggcggcgggtttgaatacgagtgaaacatggcggcgtgacactgttaggtcttcggtgttgaatcccgctcctcttccgaatacatccttaactccggtcttcaggaagagcttcgtgccgtcttcgccttcgatttccatggtggtttcttcactttcacagagactttttgtgttcatgtctttttttttatttttttttcagttgccggcggcaacaaaacgcatcgtatcgttttttatttattttattttgaataaactctttcaattcgacatactaatctcttcattagtttgccagaaaaaaaaaaatgttttttcataatgtccttatcatcataatcaattaatcatcatctaactttacttaaggaatggttcatgacaaaatctacagcttaagttatttcttgacaaagttatgtattttacacaaacttaggcatgccaacagatatctctttgtttagacatgaagcttcttctgattcatcagattcattaaccaataaaatcacatttagtttgagtttacatgcacaaaatcttgtctgaaaatgggttgtctgcatgtaagaattgcattcttaaattcccaatatattttctatattcccacaacataacaaatgtcatcaaggaaaggaaattatgtcaaatctattcctcttaattgacaaaaacacacacatcctaattcttagtactaaatattttattattttttccctttcatatttgtaagcaatccctcaaaacgacttcgtatttgtactcacctttcgtcatctttgttaaataaaataaaaacgcatccttttctaattgctccggcaactttcatctgaagaagaagaagaacctctgaggagattagacagaagaaaaagatg

SEQ ID NO: 15234 - DNA, 3000 bp, Unknown
  misc_feature (1)..( 3000): cDNA_ID_3095728_gDNA_ID_2926088_Annot_ID_196509 3000 nt of promoter + ATG
atcacttgtcgacacctatgagaggaccctgctggttttacctcttcttttgcataagattaaagttagaaactttatctccattttaaagtgacaatgtttttttatcagagaaccaccttcatgacattccctggtaatctaactatctaactatcaaagagtgctatgtttttgttgttctgtagtagctgcaaagctggtttggggctgatgagccactattattatagaagcaacaatgagagatctttgtgagaatgttggaggcgaaatctaacgccaaacaaagaagcaaatcattggtagagaaaccaattatgcagattatatttaccaaaattatgcattaactcacttgtgaatatattttatagcttttgatagatttgagtttgattttgaagcataccctcttgttgatgttggcttcagtcaatggtcatgtgggcattaatgaaatactgagtacttataaagatttgattgctataaagtttgttcaattttaacatttcctaactaacagcatatatatgtgtcgttgttccttatactttacacattgtccataaatttcaccccctcccctaacccccccaaataaaaatcgaaagcataaatttcaacgaagggacaaattgttaagtggttttgcatcaatttcgtaaagaggacaaaggatcatgttctcagctatccaaaaccctagagattgtgaaatcaattgggacaaaaatattctcctggtcaagtggttcttcacatggagatatggtccaaatgaaaacaacaccacaattcccaaaattatatatgcatattatttggctcttgttgatttcaaattgttcattttattattctatttctgtcaattctcaatcttggtgacttttttgagcaaacaaatactatacagattttacaagtttcaattttttacaaaaagctacaaataaaataatagataaataaaagctttcaattacttaagtcaaaaaacctctcggatttccaaagattcacgaccttaaattaaagacactcatgcaataattagatatgatcaaagcactaatttgtattgtatctatcccttttttctttatcaaattgattatacaattaaaagtgacgatcatcataaggtaataagatagctcccgtgttaggtattgcttgtatgaaaagcttaaaaatggcgttaatagatatgataaaagaatcataggtttcccaaaagaattaatatttttgacaacactattataaagtgaataaaaagagaatgggaaattatcttgtttggcattagtcaaaaggtttgatctataattacaaaatgaaaagattagctttttaggctcaatacaatcaacgatcgccaaagtattcaagcggctaaagaatctcacttccttggattctaatatattataccgctcatagtcatacacacactatttaatatgacatacgtttatatgaaagtgagaagatgcgcttgtggtctaatcatgaggagattgaattagcattagataagtgtatcatacttttcttgtagagcttcgtttcattacgtaatgtactccaaggttaacattaatgtatagagccggtcctataattgactctgtttatttaggttgctggcccgggtcagcctcaattctatagacttagttttggtttatttccaaataaaatagaacaaaatacattttggctaactaatttctgttctcataccaaccaaatcaaaagcaaaccatattttttcaaagtcccaagaaaccgttctgatccgcgtacgtatatatagtatcgtagccattaattactacactatatattgttgtagatatctaattataccgaatttcaaaaggtcatttgattcgacgacatctaaaatagaataatcaactgattttcacaagtcacaactatagctacgtattggcatgtgtacacacatttgtatacaagtacatgtcttctcatgcatatctttacatgatatatatgggcatgcatgtatcctgtataatcatgacaaaaatgtgtaaatatatgtgaaataagaaaggtggcctaatggaatttcgcacgaaggcgcacccaaaataccccacaagccaaaagacacttagcacacttttcttcgatatattatttgtctattttctataccaaaatttccttatacaaccttacctcttcaattagttagactttttgaacaaaataattgatatatgtttggctcaaataatcgatatactagtgccagtttgatcaaataatggataatgataaatagtttctaattttctatattgttattttcccttttttttgttatgttagaaatcatataataataaatacctatttattaagttacattattagtttaattaatatttattaaggttaatataacaatactaaattatagtatttttagttaatgcattaatactgagaaaaatgaaatttgaaaaattagaaattatattttgaaattttgttaaatttatcataaaatttaagattgaatgaaaaatatacttttaacaggaaaaaaaacatacaaatttttaaaaattaaaacatagaaatgtcaaaagatattgatgagataccttgtatctcaccaatggaggcaaaattttagacaaatttctcaaactaaattgaactaaaataaggatatcatatttggtgagataccttatggtcttatggagaagctctaacaaagtaacaataaaaacttttttagatataagatttatatcaaaaaatctaagataaaataaaataagtaccagccacatgatttgttgccacaccgcaccatgattaaagttatataaagagataccaagacagattcaaagtgaaagaaagtcccaaaaacaaaaaaccaattttaaaaaacacaaacccattcgtgcgtctctggctaattaagttaaaacactaatg

SEQ ID NO: 15235 - DNA, 3000 bp, Unknown
  misc_feature (1)..( 3000): cDNA_ID_3095749_gDNA_ID_2926088_Annot_ID_196504 3000 nt of promoter + ATG
aaaaagtgtatagttaatgtgtgtgacaggaggagactgatagcagctgtgacagcattggccgccgttgaagatgtgtcccgtgacggtgacagagctaacgtcaaaggacgttcgggacctacaataattaagccctaacttagattaattatctcaactcttttaacactaatcagattcaaacacaaaccaacatattgaagtattgaactatattcacagataaaagaatatataacttgttccaaattctaaaatagacaaataatgaaacttgatttaagagagatcgtgggatcatgcgtcgtggaaatttgcatagaggaggaccacatgatctaaggattttagtttttaaaatttttgtagtaataatgagagaaagtaaaaaaagaaaagaaaagagagtgaaattagagagataatgattaggggatggaatcggaccccacggaggtttactagatgacaccgaacctgaactactcacctgtgattgtgctctgttctatacttacacattttggaccatttcctctttattttgtgtcttacacattattctaattgtaattaacttccatatcttatactaataatccgatctcatttattctactttgtttgatttcatgcaaagccaatcacgggttcttgttaaagaatttgttttttttatataattaacaataagtaatggtgcgtcgtttagtcttgaatgattcttaatcaatagattattgtaaattacaagaacaaaactatgcatttcaagtattttaatgcaactttcaaaatttgatcagatgtgtcggctgtgactatacgtacttgtttttttttaattgtcaactttgaaaattttatttaaaatctaagtacttgtttagaaaatcacgtttatgagatggagactgcgtttgattcaaatttgtcatatattacaacgttgcttatcgtttcccgaggtaacaacggacggtatgtcagcttggaggattttggtgatcgagagggtatttatgtgaaactaaaatatggtgtcataaagctacaaaattttaaatttcaaactaaagagttttactacattattaaactacttctgctaaaggagaaaagtagaaagaacaaaacaggctatctttcagttcaagcaatttttgagctaagcaagcaatttcaaatgtcttgttattaccaatagattgtaaacaaaaaataattacaccaccccaagtaataacatgacattttcttatggtatttaagtaagcattttaacgaatttaatttcatttacatcacataattagttttattttagaaaaagtagtagacaaaactatacaaaattctaaggagattgagttatgaccctaagcctattcaagctgtacataaattgttagtcacaaaatttgagtctttcacttttcagattgtagtccctcccatattcaaaactgggacctataaaggtaaagtttggcttccccaaagcctaaactaaatctctccaaagtcaaaaactaataatattttaaatctgagattagtatttgtttattctccaaatgcatgttttgctaaagaattagcagctgatcaaagcttaaaaaaaatatgtaaaggaaacactttggtgggtatcataaccaaatgtgttggactatggattaaaagttcaaactagatattattataagattaattatttgaaaaggcccaaaacatattctactatattttttttttatgaaatcatgaagagtagcattggaaaagacacaacagataatagtaataaccagaagatggtaattttgttgttactacaaagcaacacagaagcaaagagagactagtagactagagaagaaaaaccaaaaaccctaaaaaaagaaaaagagagagattgttttcacattttcgcggttttcttcttctccttgtatttatctctgaagtcgtgcttttgatgtgaaaggagaagaagcttgaagacagacaactttaaagttgacgaaaccaatgcttctggtaatatcattttcttcacaattgtttgtgttcttcttcttcgtctggtctcactcctatagttttgtttaatcgttttcgtggcggtgaaattcatgagagcttaactggtgaatcttttttttggttctgtaataattttataatcttctttctctggcagtttgcgacgaaactaatttaatatataaatgtaaatctagcagccattcttattggtttattgttgaaatctctacgaaaattcctttttattcgatttcgtggttttaatcttcaccattacgatttttcttcagctccttctctctttcaattcaatttttactctttttgtatattgcaggtgaagttttgagcttttgagcgatcttttgggtcttgctcttgctcttgaggcagagaacccatagacagttgttttgtctgtttgttggtgtcagatccaaaatcaagaggctgttatagctttgacttggaagtgatttgacacaatgaaggaagaagattcaaaaaaaataagagggtaggaatctatttggtcgcttttgcttcctcctattctggggagaatttgggatcttggagttgaatccgttgtgagaagaaggatctttttgagcttgtgtactgtgtcctctcagttgattcatcgcagagagaagaggtcctgtcatgtctatgagttttgtattcatctgaaaggtcttactggaatgacttatcaaaggggagagtctttggttcctgtcttgatttccaacttggtgggggcataggccaaataatgcaaacctaaaatccttgtttcttccagaatcttgtgagctttttaatctctccaacaaagtacaatttctctgaggattgtgttattacacagagaaaacaaaaagagggtccaagaaaatctcttgcattctcttctcctctctctggtattggtatcttcaa

SEQ ID NO: 15236 - DNA, 3000 bp, Unknown
  misc_feature (1)..( 3000): cDNA_ID_3095766_gDNA_ID_2926088_Annot_ID_196499 3000 nt of promoter + ATG
catatggaaatagatagataagttaagagaatcatttactgcctctgtttataaaaaaacactcgaggtattggaaatgtttcatttgtttgatggtttggtggtctgatgcatcgtgttctgtgttttggtttcttaaactcttgaatgaaattaggcataaattttgagtcttccctcagctttatccttgaacaacctttttaacatcttgaatttacccatttggagtacacaaatgcaaccattcacaaaccttctcccacattcgcgccaaggacaattccacccatgccacgcttatagcttagcttggattgctcccatctctcgcacttcaaaacatagcttctttgaatgcaagaccaatatacaactccattcctaacgattaatgggcgtctcacttcttctctgaatgtgccatttacttccaatttgagcgacttgtgggttttcatcatccgagtgtcactatcgggaaatatgttacggcctaaaggaaactcatcccacaaactgtggtatattattctcaacttcaaactcaaaccgtttcattgcatcctcatccaattgatcaatacaaagggaaaactaaaacatacaattaaaaccaataaacaccaacttcttaagaaactagcttgttgccatgtcattaatcaacaagcaatctcgagtaaaaagttatattacattagttccttatacatcaaaatctggattttacaaggagagctgtgtgaatagcaattccaactccttctcttgagacaatgttctctgtccaacaaagaaacataagttagttagtttcaaaggtgtttcatatagagtagtaatgtgaagaagaagaggattgacttacttggacagataaaaggtcgttgattttgttgagaaccttgagacgatgaactgcataaacactgtttgatggaagtttacaaacccttttgatctcttcctgaatcacactcgatttctcatcacaatccatctcattccatctttctcccacacgattacctctgcttcccatttcgtaactgattcctcagctgaaacttcaataaacagacatatacaatgaaaacggaatcagttattacaaagataaagggctcgaaaaataacaactttgtgttcgatcgaaaatagaacaaaacagaacagtgggaagaaagattgagtttttacatcaagggttacgaattcagagctcgcagtttccgattttgtcacactcaagagaatttgcgaaaagaagtgatcgagaattgtcttccagccctaaattcgacaccggtcttcttatcaaataattttggctttttcagttatttacttacccgacccgtaaactaacctgtaacccgacccgggacctagctcactaagaaccctttaagccctaaaatctccgatcacatctgaattttgcttcttcctggcaatggcatcttcaagagtgttaggcagattctcgtctcgattaaagtctctatgtcaaaatctcagcaacaagaatgccaatgtttcatcactcccctctcccatcaaatctgcatcaccttcctcagcaactagttgtcgtctcaatcgatcttcaaggtttgtcttttgtatcatttcacactatcaaatggagaagacaaaaaccttcttttttcctcactatcaatgggtctgcaacaatgtagattacttgctgataattttgaaatctgaatcaacaaagtcaaaatctttctaagcaaaattacaaatttgatgaacttgttggatggttgttttcagattaccagtggagttgagctcgatgatacctctgcacagtgctatagcatcgtccaggctcgtctcaagtttgtccgttgaatccaaaatctggggattagttcctcaaggtcagtttttgttttgttcttgagcactggaattaccatttgggtttactttacataggtgtatcagcacacaacacattctgttgtttctctgtgttgcaatttgtatcctttgtactgtgtatatggcgataaatgtgatgatgcatcaatttgaatccgatagttagctctacggataaggatgtacataagttcctttgataaacttgacagcaacagaagtatgtgatcatatagcatcatcatttgtaaatctgatgaagttgaacccttttatgtttgtgtatggatctgaactgataaaatcacacattacttctaagtttggttttgatagagtttcgttgcttagttagttcaatagattgacatgaatcttttctttggaattgcaggtctttcattgcctttatgacagttttcttttctcatcttacaacaagtttccaggaggatagagacataaacgaagctcggattgtatcgttctttttagcttttattcacatccgaaagtcctgtagtttagattctgttatcttgcggttttgagttaatcagaaacagagtaatcaatgtaatgttgcaggctagatctttcatctttggaaatttatttttttctcatgcaatttctttagcttgaccatgagtgactaaaagatcaatcagtagcaatgatttgatttggctaagagacatttgtccacttggcatcttgatttggatggttacaacttgcaagacccaattggatacttgctatgacaactccaactcaagagtgtcgtgtaactaagaaccttgactaatttgtaatttcaatcccaagtcatgttactatatgtttttttgtttgtattattttctctcctacaattaagctctttgacgtacgtaatctccggaaccaactcctatatccaccatttactccacgttgtctccaattattggacgttgaaacttgacacaacgtaaacgtatctatgtggttgattgtatgtacatatgtacaaacgtacacctttctcctctttcacttcatcacttggcttgtgaattcattaattcctgcgaaatg

SEQ ID NO: 15237 - DNA, 128 bp, Unknown
  misc_feature (1)..( 128): cDNA_ID_3095815_gDNA_ID_2926089_Annot_ID_196525 3000 nt of promoter + ATG
cttgagcatgttggtctagagatggacttacctgttatcagtaacgttctttttactccctcaaatctcatctaagtttgaatctttttttatagattattgatcttgtattcgtttaactagtgatg

SEQ ID NO: 15238 - DNA, 3000 bp, Unknown
  misc_feature (1)..( 3000): cDNA_ID_3095811_gDNA_ID_2926089_Annot_ID_196526 3000 nt of promoter + ATG
ttatcttacagaattttgccattatttttttgtttttttattaataatccagtcatcattcataagtttttaaaaaattcatttgttgcattgattgtaaataaaaccgacgtaaaactttattagtttattataaattttgacattagaaataaaataaaaccaaaaactgaaaaaaaaaaaaacgtgaaaacagattattgtcaggacagcgaccaataacaaaccctagccgcaaaatttgaaagcggctagttttaaaaaacaaaaaatcaaaacattgtttcagattttagttataagtttttgggcgggtggcacaaaattaataaaagctcccgctcgagggtattttagtcaattcaaataacccgaaatactagggtttccgcccccgccttcctcctcaattataaaattcctctccgtttgtttaattctgttgctactaaccgccgtctctctctctctccctcttccttatcatcaaaacttgctctgctccgatctcttaaaaaaaaaaagatgtctgagggatcagaagatacgaaaacaaaactcgactctgccggagagttatcagatgttgataacgagaactgcagtagcagcggaagtggcggtggtagtagttctggtgataccaaaaggacttgcgttgattgcggaactatccgaactcctctttggcgtggtggtcctgccggaccaaaggtgagatttttaactaaccctttcatttcaatcttcttatagtctattgggttgttgttagattccgatctagtagatctaatcaatggatcgcgaaatagcatctatattatgcatgatcctattttaggttttatcgtttttcaaatttatttaggtgatgaatcaatttagtgaccggaaagatctgatctcatattgctctgaagttcaaatttttcttatttctttggtttgtcttttgctatgtagtcattgtgcaatgcttgtgggatcaagagtaggaagaagagacaagcagcacttggtatgagatcagaggagaagaagaagaacagaaaaagcaattgcaataatgatctaaacctcgaccatcgaaacgccaagaaatacaaaatcaacatagttgatgatggcaagatcgacatcgatgatgatccgaaaatttgcaataacaagcgtagtagtagtagtagcagtaacaaaggagtgagtaagtttttggatttagggtttaaagtaccggtgatgaagagatcagcggttgagaagaagaggttatggagaaaactcggtgaggaagaaagagctgctgtgcttctcatggctctctcttgtagctctgtttacgcctaagtgtttctctgtattaggtcataatcaagtgagagcgattttgattaacttaattagatagagataatatgtaatgaatgtgtaagttcctagttttttggttccactaatgttttgtgttcattttcttgatgaattcaaatatcaacacttttttttggttcttagtcattcaatgccataataatgagaattggtcttaatttttagtgcctcaaatgtcattctctgtgtatgggcccatatggcccaagatattgggctttatcgggggaatcgtgaggcgcgtgattctagttgtcttgtctccgtcaactccaccatttttttgttttttggtccattgatgtcgtttttcatttgatttgaatttttatatgcttttgaattcacaactggtttcaaattcagattttgtatggtttagagttttttttatatatatatcatgctgaggttgtatacttcgatttgttttttcattttattgaaggatggcaatttttcgatttgcacttggcagagtatctgtttgtgtgattaaaagttgttatggtaactttgtaacagggacagtgtaaattttcgatttgcaattggttttgtttttcatgtaagcgtatgattcaaccttaataagccatcattaataattaataatggtggaccaacaaaattttaagtaatgttaaatatggcaaagtcatgaatcatacttataatttttttttaaaaatctaaagtggtgacgaaaatataattcatttaaatggatcactggtggacgaatggtgtgagtgtgacatggctaggtagagccgtgaacctcgagaatgattcaaattaacggggcaacttcgttcaacgggggactttcttttgaccaaagcttctatttatgtgtttcacccttatattatgcagtttcttcgatttaggaccattacttccattgattcctttattttcctaagcaaagagtacaatttaggaataacttgtcgatattttccataaacaccatttcttaattttggagatacgttttccttattatttttcacaaattcaaacaaaatcttcataatatattttagctatcaaatcacactctcaatacattcaaaacttccataaacactcttagaaatcactaaaatttagtagacagaaatatcagtaaatatttgaatataagtcatttaagcgaacattctataaactgtgtttggtatcaatgttttatagctaacgattaggtgtaaattacacattcacataattactaagatataggttggggttgcatttttttattaacagaaatatatggttcatcttgtaatttgaaaacttaaacccactattttataattttgtcagaagaacaaaaccttgtctttggcttttgttcgtaacctttgtttacttgatcaagaaaaaacattaaaatccgaccaaacaaggaaatatacacattttcaacgcggacataaattttcattacagcgtcttactaagctgttctgttctttaacgcggtctcttcctctcttcaaaattaaacttccgatttttcaccttttcatttccagaatttgttttttaaaaaagagatttttgtgagtgaagagatttagagtaatcatg

SEQ ID NO: 15239 - DNA, 2615 bp, Unknown
  misc_feature (1)..( 2615): cDNA_ID_3095920_gDNA_ID_2926090_Annot_ID_196531 3000 nt of promoter + ATG
gatctttgatttagtatcattttgtctctgttagggtaggattgatccaatgataagaagtagtaagagatcattgagcagagatttggtgaggtttgtgcaatatgttgatgattgtgttgttaaaaggtatggttttgttgttaagtctggtagtggcatcaaacttaatggcaaaaagcctcagggttttggtacttctagtgaggatgaagataacaatgcagacatgagtgatgatagtgaagaagttccagtgagttctattgataagagaaaggttgctagttctaagtctagaaccggggttgtgatagaaggtgatgtagtgaagcctccggttatgaaatttgttgtattggacaagaacaggaatgtgtgtcaggtatatggaaataggcatgatctaacttcgagtgcagaggatgattcagttgatggtgacgaggaaacccttgtgatgtccagggataatggaaggaagcagagtttgaaagctaggaacggggtttcggtgaaaggaggtggagggaagacaactcgggtggtgaaaactgtgagttttgatgagaatgggaatgtatgtaaggtttatggagatacacatgacctaacttctagtgcagaggatgatgattcagttgacgttggagaggaaaccctcgtgatgtgtagggatgagggaaagaggcgtagttcgaaaactgggagcagggttttggtgaaaggaagtggaggaaaaacaaaccgtgtggtgaaaactgtgagctttgacgagaatgggaacgtctataaggcttatggagatacgccagagtcaagtattataagtgaggaagatgactcgacaagcggatcaaatgaaggaaatggagaagagaaagggaatgtgaatgaggttgaggaaatcaaatacgttcccaaggaaaacgagagctttgaagaagaagaagaaaaagaaactgattctgaaaatgaagtttcttcttcagagggcagtgaaggggacaaaagagttactaaaaaggaggtccagcatcaaaaaggaagcttaatgttctctcctccattgccactaaaaatggagccttgaccagtgagtcatgaaagaatccaagtcttctaaagttctttgcttatgactagactagtttaattccaaaacctgcattttggcatgttctgtgaacccaataagataacctttttttagttgtagaacttgtaacataactgcattgtgagtgttttcttggtttgatcattctgtttctgtttatctctactctctaggccattttcgagtcaagtcttcgtcatagataaatgctattctttgagtgatggttgctctgtttctgtagaaaccagtttgactaggtagatcaattggagtgtaatcttgtttttgttcttgtacctttccttaaaactcaataaaaaggttatgtttttttttgcattactctttagtgtaatcacgaagttacatcaatcgaatctttttacttatgttaggagtagcaatgtcaatgggatctgtacagatcattatatggtcacattgttaaatgttaagtaacataaaggattgttcttggattttgacggcaatgtgtttatgttattatgcaaatgttttttttaactaatatagtaataaaacccgatccgaacccgaatggatcttaaagttcaaaatccgaaaatctgaccccgaatccgatccaaacttaaactcgaacatatcaagtaatttattagaaataattatatttacgacaagttaagtgtcaaaaatatttggattttaaattattttgtatatttttgggtactttacctacttttagatagatttggatagaaaatattcaagttttcaaaaaaaaaatttgtgtattttcaactaatttgaatatattttgatacaaaatcttgagttttgaatattccgggtaaatccgaatccgaacccgaaaaacccgatcgaacccaaaccgaactcaaagtcttaaaatatccgaacggatcttagatttccaaatccgaaatatccgaactcgaaaaacccaatacgaatctgacccgaatacccgaatgcccaggcctgtgatacacagtcaaaatagtatatcttcatctcaccgcattgaaccgaaacaagtactattctaaattttcaccagtgagcactaaactcttgagtattattataacgagtcactaaattaacgatgaagaaaccttacacgtgtacggtgctcataacttctattgtcactttctctcagaaatatcttcttcctcttaaacccagtgagaaatgtcacggatagtacactcccaacatccaataacaccatgacacgtggatatcaacgtcacgtggcataatcaatcacagatcacttacaactgatcactcactgataagatttgcttcgtgaaactgaaaaaaagcttgaacactccattgttctctactctaccactatctcacagagattcatggatacgatgcgaatctccggtgtatcaaccggagctgaggttttaatacaatgcaattccttatcaagcctcgtttctcgtcgttgcgacgacggaaaatg

SEQ ID NO: 15240 - DNA, 588 bp, Unknown
  misc_feature (1)..( 588): cDNA_ID_3095839_gDNA_ID_2926090_Annot_ID_196552 3000 nt of promoter + ATG
ctagttgaaacaaaatttgtttggttgaattctagaaattcatcaaagagaaaccagaataattttgtaataacaaaatataaaattaatattcaaaaagttttatttggttcagtcacacaagtttagaacaaatttttggtcatattttttattcattttaatccaaaacttcaaaagttagaaaccatattaagaaaaataaaataaaataaaatgtgctaagctataaattgattttactttatataacaaattataattgaaacttatttctttatatcgccaaaaaacaacaattaaattctgaaataaaaaaatcgtaaactcaaatttaaaaagtataaattacaaactaagttgttttatttcattttttaatataatagtttatttggtttaatagtactaggtgttattttaccatttttaaaaagatgagggtttaaactaaaattcatctagattcaaaagatctccttgataccattaaagatggtaatcaaactccatctccatgaggatcttaagaatgagtacctcagtgtgaaagatccatagatcatttggaacgatctataggatatg

SEQ ID NO: 15241 - DNA, 3000 bp, Unknown
  misc_feature (1)..( 3000): cDNA_ID_2990170_gDNA_ID_2926090_Annot_ID_196549 3000 nt of promoter + ATG
cccacggtacaccgcgaatcaatatctaattagcaacatcatttgttttaagacattaaatactttgaaaataaagtatagcatttaaagcttctaactttttgttgaattactcatgttttattttatcaaattgaagtactctctttggtaaagaattcctctacttttattggagtcattctgtatttcagaaacattatttgttgttaaactggtttttaaattactcagctttagtatctattatatttatgtatttcaaaagcttattttctgcattatgtttttactttttagttaaaaaccaaaaataataaataatactaattaaataaaatatagctaatcccctgttaatctcgaaaatatgtaggatgataatgtaagataaatcataaacgaatcttttttttcaataagagaagaatcttacctgccattaaagatttaaattatataaataagattatgggacaagaaaaatgacatacgaataaaatcactaactttctttatacataataacagccaatggcggaggcacaatattagtaaggggtcagatgaccgacccccataaatctttgaatttttgcttacaagcttatgctctatttgattattgtggtaaattgattgctttctaataaattgacctcatgtccagtggtcatatcttttctttgcacctatggaaacgatattatatttattcaactatatcttttgcaattatgttttaagaaataattactgaaactatcacaaaatatgtaaaatggaattatatatatactgtatttgatgaataaagaacaataatgattatcttttattttatttatttttaaatacaatgaattttaaatttttaaagttagatttttttagaaatgaaatattatatttaaatatttaattaaaactaaaaataaaatatgacccctaaacaattttttctagctctaccactgataacagctagacattgcatgtctatcaacaatctccccctgtattatattcttaatcagaacctcttggggatcacaaggaaacgaaatgaagattaccaaaaagaaaaagaaaaaaaaagtagaagaaaagaaatggatgatatcaaaggtccaaaaccaccgtagaggagtactctttttgttccttattaattgtgtttttagagaatttttttttttcaaaaagattgatttttatatttctatgccttatttattagttattattgatgaattttaaactgaaaaacaaataattgaataacattgatgtagaattacacaaaaatgtaaatcacaaaacaatacatttgtaaatcaattttaatataatttcttaataaatttgttttttctaaaaaaataattaaaataaataaaggaaatatgaattaaagacatgcataattcgaacatgggggttggttgcctatctactctccgtttccgaggcattaaaataaatttaatttagtgtacttaatgtaaattgaatataattaattagtctatacttatccatcggttaatttattttattctgtaatgacccttctatttttttagtaatcctacaagtacaataatatatatatatatatatatatatagtacaagtacagtaatatatatatatatatatatatatatatagtacaagtacagtaatatatatatatatatatatatatagtacaagtacagtaaataaatgtgaaaatttgtgataattattggattagttttgtcattatactaacatttgggtattatattcctaagaccatattcaatggtatgagtgcttgagagaatcttacctattttttaattttaaattttgacaatttgaaagtttagcaattctattggcctcttaacaattatcttgttcaatggtaaggtccttaagaaataaaatttggtgtttggtgttttgaagttttgaatagaaagatagaaaagagacaagtgaagtttggcattagagtcttgataaacacattttgaataacaaggattcatgaaaaaaaaaaaaaatacaagaggttttgtattaacaaagattcatgacaatacataacaataatatgacaaagtatacaaactgtgtgatgaatcgccatgttgtaatcaccgccttgtcctaattccataaacttgatctcagtgttccctagattccacagtccacttgaaccatttcatcaaaaatgacacgcgatgttaagctgtgtgagacaatcacaaagtttagctcatgagacgggttgatgtggagtctgttcatgtcgtcgatgtctctgtagagacttgagaaaacctgtacaacaacactcaaaaaagaccaacttctagggtttgatctgaataatgcggcatctgtggtggctgttgctagttacattgctggaagacacaattgagctcttgctagttacattgctaggttggtttaataagaatctaggataaaagttttatccaaagttccccactttcaactgttttggctgcattgctcttaggacatcagaattgtgaagatgagcatgacgtttgacttgttagttcaaaactcacttgatcctgacaaaaacaggtgcttcgttggtttaataagatggatgctcaaggaaaaaagttttacctaaagctccccactttcagctgcttttgatctaaggactgagcatgacatatgacttgttcaatatttacataatcctgacaatatcaggtgaaccattttatacaccagcttatgttatatgatttttctatggatccgcttgttagaatatgtacataaaatgtgacttattcgaccaaacccataattgaaaattcatataattttgttggcagattacagttttaagacaacagtaaggacgttgaccttcattgcttccaagcattcgaaacctattaagagctccacttaatataatattatatcggagaaggtggatcggcc

SEQ ID NO: 15242 - DNA, 3000 bp, Unknown
  misc_feature (1)..( 3000): cDNA_ID_3095890_gDNA_ID_2926090_Annot_ID_196538 3000 nt of promoter + ATG
atcattagggtttagttatattgaatcaataggtatttgtataagacttgattttttgggataaatatattaatttcctgggaaaaattagaacgagaagaataggaagaagatgaaagaagaaggaaacaatgagatattccaggggtaaaatcgtcaaacatttgctgagaaatacctattcttataaactcatcatgaatgtaccctttttctagtttttgtcttaaatatgcctatttgaacaaaagcccccaaaaaatttggataaaagttgtgtcttttataaattgtatttattgttctctttaggtttaaggaaaatatcaattcagcatggataatccgatggttatttcaaaaaaaaaagaaaaacagagcaactcaggagaacgaataaaagagtatgcaaaaaataactttcttaaggaaaagaagacaactcatcttgtagcaaaacttcaaaaacactagattcctaaggaaagtcaactatcctattcccaaaccatcaatatttggaaacaaagaaagtcaactaccctattctcaattctcaagccatcgaaatagggaagctaggtccaaccttttttcttaataaatattgtactaaactaaaattagaaaatgtacaaattagaagatttataaattaaaattgaaagaagccacataagaaaacaaagtaaaatataaaacagaaatacatccctgtaaacacaaaaataaaagtacatgagcaaacattgtttttagtaaattgtttttatctatattaatcactaacatggaagtcaatgtcctttagctatctcttgagtgatagaatcacgtacaacttccatcactctatcatcagtcatggtacatgatcaatgtttggaacagttttttctacttcaccattctctactacttcatcaccatgatgttcatattcttccattgcattctaatgtgcaaaatctgcatcctcttgacatataatctttgataaaattatggcgaggcatagttgatgttaaaagtttcatccactttctcaactcatatttagagtgtttgcaatccttgttgagcacatcatccctcagcccgacttacatgaatagcaccatagacttttttccaataaatccatgtttgccactggttatctttaactttttgtagcttttggtcattcctcaaatcaaagaataagaacacatataaatataagagcatagaaggctaatataatgaaaaggccactcaaagagctgatataagaagatatataccttacaacatccattccacgagtcttaactcatgtcgatggatctatttaaactttacgagttctattacgagtcaatttcttgcaagttttatttcatagaacttgtctataattctttgtcttgtagcctcattgcaccgactgttttctaacatttcctttgaatgtctcttccatccagagttgaatctattgcacaattttttttttgggatctagggttaagaaatgtgagaaaagtgtcgattaattattattaagtatagctatgtaatatattagtttaagtaggatgttttagtcatttgtaaattttggctcactctgaagcatatgactgcgcctccgaaacgcatataaaagcatctttaaaaacgcaaagacttcagatgagttttaaatatacatccagatgcattattcaactaatgtatcaaatgtacgttcaacgaacatcaatcctcagattatctgattgatacatctggatgtacaaacgaacaacacctcacttaaatatgaaattttgttagattatacatttgcatatttaagagactaagtttatatatttctgaatcaagggtttcaatttagtttataaaatttataggtaactttctgattatagatgattagctaaatttcaataaattcaagttatatatctagctatataaaatgtgtaactttctgattgtataactttttccgagtatagatgattagaaaaagtttgtgactctttttcaaatctttcaattaaaaatgtgagctaccatgaacttgtttatattgatataataagatattacaatatattaatacgaagccagaacaaattcattcgattaagttattaaatatttaattttatctataaatcaaactaaaatcagtttagttcgtaaatatacagatatgttaatgtaatagttttacaacgataaatatttgcactaaactacatcaatattatatatttcgtataatttaattttattcttggagaaaaaattatctcgctcattcacaggtactaacataatagtatattttttattattactgaacttttaaaaaaattgtaagatattagagtaaaaaaaactatagataaacggccaaatttatatgattcccaaaattaggatttgtcaaagatttggttgactattgtatgattctctaagccgtgctttaaagttttatcactttatgggaacggctttttgcacaaaggccatagaagaagaaaattaacttagaaggacacattttttctatcaacgaggcttatgtattttggtttgatgaatgtgtttggacactacacatattgaccaaaaagagattccaataatattttgtaaatttaatttatagtttccaaaatatttcatggaattccaaattcacatcgatttcaatatctacactgagaatttttataagaaacgtatcattctctcggtgcttactaaggaagtaaataaatacagcgagtatgtagttaatgcccggacaatgaaattccgcaatcaatctcgagggttaataaggcaaaataaaatttctgctgattctcataattaccttaaatataaaaattctatcaaaaaaccataacaccaacgttccatattcttctataaataaatcattcttcttttcactaaaattgctaattaactcggagagaaaacaaaagc

SEQ ID NO: 15243 - DNA, 3000 bp, Unknown
  misc_feature (1)..( 3000): cDNA_ID_3095868_gDNA_ID_2926090_Annot_ID_196543 3000 nt of promoter + ATG
gtttgttttgttatatattttaaattatataactgtattttaattgttagttataggatttcacccattgtataccgtctcgtattactataaacccaaatccgtcttacctcagtgaaattaaatatatttaatggattttaccagtggtatactgtctcatattactatcgatccaaacccgtcctaccatctaaccccgttcagtaaaattaaacattattttattatttttgttttaataatactttaattttaaaaatatataattcatatcaatttaaattttttatttaaatgcttatttaattgttataaagttcatatattataatattctaaacccgtcctgccatctaatcccgttcggtgaaattaaatattattttttatttttcgtttaaataatatttttattaaaagatttataattcaaatcaatttaaaaggtgtctttcaaatggttatttaatttttatagatttctcattttataaatattctaaacattttttcctataaatattataaacgtttaattaaataactacaatatttaccttttaataaagtataatattaataatattgtgaatgattatgtgtagctaattttaagaaatttgatttgaagttttttgtttggattaaatttgaatgataacgtgattgatattttaaatcaagaattaaaaatcaaatcaaataattaagaatttaatgccaatggcatgccattgtaaataagttccaactatacgatttattttacaaaatggctgcaaaaatgtatatgtagatttaattacagtttttgaattgtctagtcatgatgtaaactcttaaatttaattaaagacaaaattgtgttgtctttaaaagagagtatgtttcagaaaataaaaataatatatgttacgttcttataaatgataaacataaattagatatgatatagaaatatttaaggttaatttaaaagatattatcatgattatagaaaatattggtaggaataaataacgagcctaatttcaaccaactatattacattgagacttgaagctacgattttttgaaaccagtatgaatctccataatttcgttttctacaattcttatataattcatatttgattttgattacactgttttaaattttattccaaaataatgttttctacaatcttggtaagattcatgttcactttcgatgttcattgtatgtaacgttatttatgatatttattattatttagactatgatatgtgatgcataaataaaattccgtggaatttagattcgattttggtattttatagttataatgattggattcatattcgatttgattatgtattatgatattgtaatttgaatatgatataattgtatattgtgtgtactgaattttgattgcggtgttcactgtgtttgatttttctttatccattctatatcaatattcaatacattttgtcctttgttttttttggtcgaaaatatattacgtctttatgatttacttctacgatttcttaaacgagtatacatcttcaaaacatttgttcttcataactttgtagtaagaacctaaccttattgttgaaaaaaaaatttcatatgcgcttactgatacccaaatcataagagatcaagcaaacatatcagatttctgttcttggtggttcagtgatatatgtcaaattaaatctaagaccactctctcaaatctctcttaatataacacttaaggatcgatttctacaaagttttttattcaaacataaaattatttatctcataattaagcaaaaccaaatgagtaaattaaaaacaaaaaaaatagattaaattgattgtaaattcagatgattaaaacgtcatatttaggaaagttctcaagaaatagataaacagtagatttaccaattagataggattattagcaactgttttagaactcaaatcacaaaagtataactttgttcgtaacttatgtttcaatgaaatcatttagttctttgatttttcaactttatcttagatttcgaatttttgttctattttaagtccaaaaacaagaaaagcctttttaaaattaaaaaaaataaatattgacggcaggaccaaaacgaagttgtagttgaaggagttcaaggaggagttgctgaaaacaaaaatgaggttgcagctgaatgagctcatttccatgagattcacattgctgatatatgggcaaatgacaactggttgttttactatgatggagttgatatgctacaatggtgctactagtgtcagtatacttcagcctcgtgtgttggaaggaaacactattaaagctgcacaaatagttatatatgtgtttgcatgcttatagttttaaacttgtattatttcatattaactaaaatcttaaattaattgacgagtgcacaaaatgttcaacttgttagaagtgttatgagttagttttagtaatttactactgaaccactagaaagttttaatagttttttacggacaaaatttataatatgatcgatatcacggaaactactatcgaccattctaccggataagtgattaagaaagtattatctgaaattattttaataattaaaaataaatccaattaccaaaaacattaaaaatatttttaagctaattatctcctaaaataataatccatatgctcaacatttttttacatgcacctctcatttttcactttctcaataaaactccaaaattatttttatttataaataaatcccaactctttcctatctatcaaattaacccaattttagtttagagagcccaaaatttctaatgagacccaaagtttctcaattttcgtaagggcaaaaaagaaaagtttttagaccgtccgattttgaatcctttaatctcttccaagaattctgaattcttctcttcgtagtctttgaatcctaaagtaacaatctttcgtttcagagcacgtctgtaag

SEQ ID NO: 15244 - DNA, 3000 bp, Unknown
  misc_feature (1)..( 3000): cDNA_ID_3095855_gDNA_ID_2926090_Annot_ID_196546 3000 nt of promoter + ATG
gtaactagcaacagccaccagaggtgccgcattattcggatcaaaccctagaagttgtttgtctacttctttgttcaatttctctgcaaattccttccatctttccaaaccaatcaacctcaatatttactaaaaccttaagtattgtatatgtatgtaatacaactgaaatgaaatgtaggttttatcgtttacatctcattatatattacgaaaaatgtaaaatttgaaagttgagacatttgtatataagacataaatttgaaatactaattctatatatacattttaacatatcaattaattacggcaaaaaaaacatcttaattagttaaaaacaatataaaaagaattgacaaatttttcaaaaattttcacttatgtgcgtattgttacgactcgatttcttactaataaataataataaaatgaaatgcgaaaaaatctttattatgttctatgattgttatgtgatctgttgtagcaagtggcaatagctctttccaacgggcatcatcaatggaggattctaaatgttttctctttaataccaaaatattattattttattataatttactgaaataattaaattttaaatctttttttaaaaaatgaatcaatttaacgaagacatgtgactcatttggctcttatataaaatttcaagtctcttatatacgagttttttcttattttctcttcattttctaatatttttatcttttctatacataaaaactatctaaaaaccctctattgagggtgctattaatgatacttaaaaaaagttctaaagccaaaatccttaaatattaagccaaaaaaaaaattaaaactcaataaatatttttttttttttttttttgagaagcaaggtagcactgattttttttttcatcaatctctattgaaatttgaagtgtcagaataatgcaggcttagcaagaatctagctagtcagtttcatcgttgttgttttatcttctctttgttgtgcttttcttccatcaatctctgtgtgaatgaacaagaaggtattaagactcatgctttggtcttttttgagtgttgttgtacagattttatcaagtctctacgaagacatcgacgacatgaacagactccacatcaacccgtctcatgagctaaactttgttattgtctcacacagcttaacatcgcgtgtcatttttgatgaaatggttcaagtggactgtggaatccagggaacactgagatcaagtttatggaattaggacaaggcggtgattacaacatggagattcgtcacacagtttgtatactttgtcatattattgttatgtattgccatgaatctgtgttaatacaaaacctcttgtatattttttttttttcatgaatccctgttattcaaaatgtgtttatcaagactctaataccaaacttcacttgtctcttttttatctttctattcaaaacttcaaaacaccaaacaccaaattttatttcttaaggaccttaccattgaacaagataattgttaagaggccaatagaattgctaaactttcaaattgtcaaaatttaaaaattaaaaaattggtaagattccctcaaccactcataccattgaatatggtcttaggaatataacacccaaatgttagtataatgacaaaactaatccaataattatcacaaattttcacatttatttactgtacttgtactatatatatatattattgtacttgtactatgtgtatatatatatatatattactgtacttgtactatatatatatatatatatatattattgtacttgtacgattcctagaaaaatagacgggacattacagaataaaataaattaaccgatggatcaagtatagtctaattaattatattcaatttacattgaagtacactaaattaaatttattttaatgcctcagaaacggaaagtagataggcaaccaacccccatgttcgagttatgcatgtctttaattaatacttcttttatttatttctaattgattttttagaaaaaataaatttattttggatgcttgacaaatttatttaaaatatagaatcaaaataaactagataacacttttaattttggatgcttgataaataaaactttcggctcattcatatttaaaatcagttttattctttaataataagactctgaactattgctcaatttcttaagcaatgtgggacatttgacactttttttcattgattgagtaatatatgactgtttttaaaattttgagttacattatatatagaaaaaatctaatgttttattaattatatgtattttatatacaatcaaataaattaaatataagaacaaataaaagtgaaagaaaatttatatgtttatatttaatgtagatagggagattttaagaaattaggaattaattgaatgtagttcaataaagataagatttgttaatataaaagtgatataaatttaaacaattatctttttagatagattttgtagcgactatatatgtaatagaggaaatagttaagtcaaatatttaatgcaaactaacgaattataagttcttagaaataaaatatttggttaagataaaatttgtaaggcttgtatgttatttagtaaatagtatagtgatttttggccaaaaagcctacaaaatatatatatatatatatatatatatataaataattaaaaaaatcgaattattcaacactaataagtgccataacaataagtgtcctttctaataaaaataaataacaataattgtcgtcaccagctatcaaaaataataataataataataataattgtcgtcaccaaagtagtcaagaagttacagtttctccaccatatccatgatctatttaaaacagagtaggatggggcagtgaagtaacacatacatcctaagacaagggccaagtaaagactttgatctcgtgtctctcttgtaacgagagtgtctgaaaaatg

SEQ ID NO: 15245 - DNA, 3000 bp, Unknown
  misc_feature (1)..( 3000): cDNA_ID_3095863_gDNA_ID_2926090_Annot_ID_196544 3000 nt of promoter + ATG
aaaggtatcaactttcattgtttaaccaagccaattatcagcttcaatctgatacattttttcgtgaaattgacattgagttttaaccattcgattcgtgcccttctttggattgttacttcaactacttcgattttggttttggaatctcttttgtgaataaagcttttggcttttttgatttttgtctctgaatcctcatgtttaggctatggtatggtaatctctagtctcttaatcaattttgaactgatagagaatcttatgaattgtgaataaagattgtggcttgtttgcttttggctctgaaacctcatgttaaggctctatgctcatctttctagtctcttaatcaattttgcttctttagtttttaactgagaaaattctatgaattatgaataaagattgtggctttgtttggttttggctctgtcccttatgtttaggctatgttcatctctaattcctaacctgtttgcatctgtagttgttaactgatagagaattttataatttgggtggcaggagaaagagaaagtgggataagccagcggagcaacttgttgcggctggagttgcgtttcctcagttacttcctttaggcaacactatgaatgttccttctatgtcaccattgctccaaacgctttcggtgcctctagcagttccaaaagttaatcaagtaaatgactcttacgctcttgcggtgtttgttatacttattttcgggtctaacctttttctcacttagctattgcattatgtactatggtatagatgatatgtcatgttttcatctagtttggtgtcttgatgtatgttcttagtgaattgtaataccttcttaaaattgttgcatcacttgaatcatgttgtcccatgattagtagttttaccatgtattggtccagttccctctggtcatgtatgagactccacaagcacccgaaatatactgtgtttgtgactttaacattattgcctttatactgaacgagctgtttttcgtggatacgtcttttgtctccttttatcctgtaattcaaacatggtgattcgttgtaatttttcttgcatgtggtatctagcctaaaatccaggatgaggtgatcatagcgcgagaaattgttatcaacgatgctgaggcttctcttaggcacaggcttaccaaacgctcaactcaagaagatgtatgtgtaactttgctatgcgtattagttacacttttcctatctctagtttaacttctattcgtcgtgcagattcagaggtctaccggtgctgtggtgattactaggtttgtacaacatccaactcatggagaagaaagtcttacaataatctttctagattcaattgtttaacttcttttgtaggggcaagtatcgtcctccaaatgcacctcctgatggtgaaaagccattatatcttcacatatctgccgctgcccaggtttgttatcctttttggcctaaaggatagactctataatatggcagaaagtaaaacgtttgtggcttaaagaaattcccatattcatatttgagaagctttatttgaccgcctagctttgagatgttggcctggtttttacgtatgttattgcagttgcagttaaaagagactacagaacgtatcttagcagttgatcgtgcagcagctatgattgaggagatgatgaaacagaaatcaatttcacagatcggatcagttggtttacagacggtcaaggtatatactgcgtgacacttcttttttgtagttatgaaattggaacagtaagaaattaaaccatatttccagatgctgagcacatgcgtatatttgggtttcgaagctgacccatcatctaatgttgctgctcgtattcgtgggcctaatgtgagtcttccttcaatatctccccccttgcttctttctaatttacaccaaaagaattgaatctacagtctaatatcaatcaagagaagggttagccatttggtgttaggttttcatctttgattaatagttgcacttttttttatttgtctcaatccatgaattcgagagattctaatgttgaagctctctctgacatctccgtgcaatcgggagagaactttttttgtgttggtggtggttggctttcgtacatgcaggatcagtatataaatcacattatgaatgaaacaggagcaactgttgtattaagagggcgtggttcaggaagccttgagaatcaacatggagatggtaatatttccttcgtttgtgtttttatttgcctacttatgaaggtgttatttacctcaaggtggatgtatctgaatgatattgttaatgtaaatccctttaacgcattatggtagaagcacagctaccgctgcatctattattatccggcagcaacccaaagagcatcgacgatgcaaaacgtttagctgagaatcttatggatacaatcagtgtagaatttggggcttcaaggttaatttttccttctatgtcttctatattatattcagaagcatgttcctacatctttgtcatttcatttgctgatctgtaattgtatttggttttgctacaaaatgtttcagggtttcctcaagcaaggtgtatggtgcagtaccaccaccacagcaactgatttctggagctccgggttctgaccaggagaaccaaaatttgatttcaacgtatggtttgatgacatcgatacccatcacagcaccaccatacgctgttagttcgtttccagttactccagcaacaagtctttatcctcagtttccagtaatgcaatctctaggaatatcaaatggtggcccctcgcagcccgtggctggaggaactagctatagtgggtatgctggaatataccctcaagccacaccattgcaacaagttgctcaagtccttaagcaatcaatttctcctgttatctctactgtgccccctactatgttgacagctacgtccttatcgatcccaagtgataatgcaagtaatgaa

SEQ ID NO: 15246 - DNA, 3000 bp, Unknown
  misc_feature (1)..( 3000): cDNA_ID_3095936_gDNA_ID_2926091_Annot_ID_196563 3000 nt of promoter + ATG
agtcatgggatgtgatgaatgtcataaaggaatggcttttcaagctaccttgatgctctcctgatattgctgagaggtttctttttcgtgattgtctcgtaatttaaaataaagtacaatgctcatgccttctccatcactgtccccaaggaacattgcagcaggataggttggtaactgccagtgaggtacaaaggtcaagatcatttacacatatatgtatatcaaacgctaataaagcttctgatgaaaaacacaagcaaaagttagtccacaaacaaagattacgaagcggttaatgttgagtggtggttacctgaatgttgacaacaagaagagcagggagctttgcctcggctttgatgtttggaagctcgatgtgttgggcgatatgatcaatcttccttggacagacaaacaagtcaacacctataggagtgtatggacactgatttggagctggggatttctttttgtctctgtaaacatcattcttcaagagttacggacaaagcagtatatagtaaagatacataaaacagagtggtgataggtttacttgaaataggtttctccacggagtttaaaagttgaaggcggtatctcagaccaacttccgctagactgcttttctctgcccgaggaaggaattgtgaatcccgcttttggacggtacaacaacttacgttgctcagtaacttcctcaccatcacacgacctccttttgaaagaaagccgataaacagcggattttcgtttctgagatgtgggtgagtttagagtcttgtcattaaaactgactgttggcatcaaccggctcaggctggttctcagggttttctcttgagagttacgttttggatccttcaagcctttaaagcttgcatggtccatcagtttcttcttgttgtttccagtaagaacagagagaccactcggatccttgtacatcccttttgacacaaacttctcggctttactcccgtctatcttcaagtaagtctcatggtattcttcgtactttcctttaccatccacgaagcacgaagaagattcaaactgaactacttgaccatttggtatattgttaccagtcgcaccacccgctgatggcgttgatggtacgttttctgctaggagagattgtaaaagagattcacatccacatcaacattaccaaaattgttcctcttattgtatatgacttcaaatgatcttttaaactccatgaatactgaaaagaatgtagattaacatttaccttcaggtaagctgataaagtcctcatcctcatccgaatcaagaacactgacagagtcaaaccatgcatcatcttgcgagatagctgcaacaaaacaacttataaaggtaaaaaatctactctaatcatcaacagaatcaccattatatgatctaccataagccattacagaaacactcaccaaaagaaactcggctcccaacgtcactaggccttctaatattagcatgaggaacaatatcagacactttagaaaagtgtttggaagatctacgacggcctttcctcctaggcctaatcgcttttgaatgggttgacacacatccacccattgttctatacttttatttagatcctgttcaacaaaaacatgtaatgtaagtataagaataagaaatctgcaacatataaacacagctttcaaataaagatagttaagacccacatagagaaactagttgtttcattctgtcttattactaacattgggaccaagttttgaagaatcaacaaccaagtcaaatacaataaaacaatctctcaactataaaataatgtagccagctcaaaaagtgtacccaattaaaagagtaagtgggacacaataacatgtaacaacaacaacaacaacaacaacaacaaatctcaatattaaaaactatactcataagaaaaatctcaaacagagaattctcaaataacaaaaccaacactaattggtaaaattcaatcactttcagatacaaatcttaaacataaaaatatgacttcataacgtcaacatcatcaatgagaaaaaaacgttgaaaacaggaaacagaatcatcaaataaaaatcaaaactttattcaaataatcagacactaccaaaaaaaaaagactcaaactttacgaatctatgacgatcatgtttcatacgtagcggaattagaatagatccgaacacaatgtggaggaatttaaagaagaatcttgattaggtacctgagaattttaggcatgataaagggcagtgcccttttaatgaaattgaattttgggaagaacccaggaagaagaagaagagagaagataagaggaattagattttgaaaacccgattatttcggatccgggtcacggatttagctttccctttgtctctctctctgctttctctgtaaaggaagagagaaagagagaggaaacgagagtcaggggagagaagattatctttgggttttattaattgcaaaattaccaaaacgatttttttttaaaaaagcgtaatttattatttgataattatatgagtaaattaataattgcctaattacagtcatagcagtaagttcggtaaaactggacgaaaaaaaaaaatgtaaaactgatgtatataaggttttttgaattttccaacctaaattatttataaactgatgtatattcttcgtgaaatacaatcatcaactttaatatttctgaaacaaatattgtatatttttggattcatccgagaaaatatgcctccaattaaactagttattaaagcgggtttaaccacaaaatcgcgtttactgttccacaattacgattacccacataagtaatcatgattcttcttgaaacgacgtcgtttcacctttgttttgttttcccaaaaaaaaccaaacccaatcgattgttcgatcgattgaaaaattagggttctagagagaaagggggatttttgagatttatgggttttctttgaaattatg

SEQ ID NO: 15247 - DNA, 3000 bp, Unknown
  misc_feature (1)..( 3000): cDNA_ID_3095931_gDNA_ID_2926091_Annot_ID_196564 3000 nt of promoter + ATG
tatgtcgaaagagctcgcactacaaaatttatgaggatctctttgccacttaagacaagaatttggctgaccatgtatttagccgtttttgaagtctatctcgtacaaatgattacacttaagttttagaaccatgaattttctgaggtaaacccaagtaagtccccatacctgacagtattgtccacgtcatggccaaacattacagatgacttagcagcattgagctgttgtcttgaagcctcgccataaatgctgagaatattgataatctcttgaccctgagatggatctactttgtagaaaaaaggactatcatctgcaaacagtaaatgggatgtagatggacttgcacgagatatttgaaggccttgaatccgcccattccactctgcatctttaaggtttgctactaaaacttccgtacataagataaataggaaaggggaaataggatcgccttgtcggatttccctcgttggtttaatgaaaccccttggtgccccatttaggaggactctatacgaaacttaggagatgcaaaaaattatcatgtttacccatttctgcacaaaccccatctttaacatgagtgcacgtaaaaatgaccactccactcagtcataagctttactcatatcagtctttatacccataaacttatttctgcatgccggattggtccgtagagcatggaagttttcttgggctataaaaatattatctgtgataagtctccctgccacaaaggctgattgagtctcgaatattaaatccggaagaatttcttgagacagcaacttaatacttttgaaataaccttgtagcttacattacaaaggctcactcggctctttagtagactacattgtccattaggaatacaactatgatcaagacatatggtcttcaaaacccacatctgcagatccgaattatatgatcagtagacataccagtcacaacccttcttttgagcacacctaaaacttattttatccttctcccacctattttgcttaatgtttagcctattcttcatagcataatgtaacataacctctttgaactcaaacccagtgaaaaatgttttacctataactaacttatcacctgatgccaacctaattttcctatctttagtgaccacgggatcctaatctgcatcacaactctctggtatttcatcacgccgaatctgaaactcatcaaaccaatttgccacggcttcctctatctcgaactcgaacctctccattatgtcttcttcacacagatctttcgtctcttttctccccgatttcttctctctttgccttacttcagaatcaacatcgtccttctcgccttcatgtcgtttcctgttccttcggctttcatctccatctttctcacccttactttcattgtcggagtcgtctcctccatcattgtcactatcgccgtctccctcatcgccgctttcactttcactgtccgccgtttcgacctcattccactctccggaccctcaaaatcaggatcatctggatcgctctgatacactaaatcttcctcgtgttcataactcgacgaagccccataccagaatgacataatttcaaagaaaacccataaatctcaaaaatccccctttctctctagaaccctaatttttcaatcgatcgaacaatcgattgggtttggttttttttgggaaaacaaaacaaaggtgaaacgacgtcgtttcaagaagaatcatgattacttatgtgggtaatcgtaattgtggaacagtaaacgcgattttgtggttaaacccgctttaataactagtttaattggaggcatattttctcggatgaatccaaaaatatacaatatttgtttcagaaatattaaagttgatgattgtatttcacgaagaatatacatcagtttataaataatttaggttggaaaattcaaaaaaccttatatacatcagttttacatttttttttttcgtccagttttaccgaacttactgctatgactgtaattaggcaattattaatttactcatataattatcaaataataaattacgcttttttaaaaaaaaatcgttttggtaattttgcaattaataaaacccaaagataatcttctctcccctgactctcgtttcctctctctttctctcttcctttacagagaaagcagagagagagacaaagggaaagctaaatccgtgacccggatccgaaataatcgggttttcaaaatctaattcctcttatcttctctcttcttcttcttcctgggttcttcccaaaattcaatttcattaaaagggcactgccctttatcatgcctaaaattctcaggtacctaatcaagattcttctttaaattcctccacattgtgttcggatctattctaattccgctacgtatgaaacatgatcgtcatagattcgtaaagtttgagtcttttttttttggtagtgtctgattatttgaataaagttttgatttttatttgatgattctgtttcctgttttcaacgtttttttctcattgatgatgttgacgttatgaagtcatatttttatgtttaagatttgtatctgaaagtgattgaattttaccaattagtgttggttttgttatttgagaattctctgtttgagatttttcttatgagtatagtttttaatattgagatttgttgttgttgttgttgttgttgttgttacatgttattgtgtcccacttactcttttaattgggtacactttttgagctggctacattattttatagttgagagattgttttattgtatttgacttggttgttgattcttcaaaacttggtcccaatgttagtaataagacagaatgaaacaactagtttctctatgtgggtcttaactatctttatttgaaagctgtgtttatatgttgcagatttcttattcttatacttacattacatgtttttgttgaacaggatctaaataaaagtatagaaca

SEQ ID NO: 15248 - DNA, 3000 bp, Unknown
  misc_feature (1)..( 3000): cDNA_ID_3096020_gDNA_ID_2926092_Annot_ID_196568 3000 nt of promoter + ATG
aattcaacattttcccgccaaaaacgacattcaacattttcccgccaaaacgcaatttaacatcttcccgtcaaataacgcgattcaaaattttccgtcaacaaatgatttcacatttttccgccaaaaacgacattcaacattttctcgccaaaaaggatttcacattttccggtcaaaaatgcaatttaacattttcccgccaaaaatgatattcaatattttttcgccaaaaacgcaatttaacattttcccatcaaatatatatgtaatacataaaataaatacaatttaaaatatatttatgagggatttttctgccaaacacgacttgtgatcttcacaaatagtagattggatccatctatgagggatttttattggacatctctaaaacaacgtcttcggctcgtactccaagcttctctttaactttacttgcaaactctttgtacatcattgaatctcgcaggcaaactaatcgattttcctccatagtttcagattctaaattccaaaccaacggatcgaccttcacccattctcttataacgagcataacatgctcttaagcagtcatttatgcagcgtttacggttggtaggaggagaatcaatcaagtcctgattttttggttatttcaataataaacactaggcctgggcaaaatacccgaatccaaagaactgaactgaacccgacccgaaaagcccgatccgaacccgaacccaaaattttaaaatatccgaacgaatcctaaactttaaaacccaaaaacccgaacccaaatctgattgaacttgaacctgatcaagtacccgaacatatctaaaatatatatacatagaaataatttaatagtaacaatcatatttacaacaacttaattgcctaaatgtttttggattttaacctattttgtatatttttgggtaatttaattatttttgattgattcggataaaaaatactcaaattcttttagaagttgtgtattttcaagtaatttgaatatattttgatacaaaattttgagttttggatactccgggtaaacccgaatccgaacccaaaaaactcgatcccaaccagacccatacctaaagtcttaaaatacccgaacagctcttaaattttttctagtcatgatagttgtatctttaacataaatcttatagcaaaactatactttttttttttttttttttttttttgataaaccctatcggctaatccggtcaaccccggtagaaacgcaccgaagtacttcagagtggactttttcccgaaggaccaccacactgtctgtcccgagtttggatgctttccgactaatgccagggggtagtcaggccgcctgcatttctgactaccaggtaaatcaattgggccaaagcccaactgacagacttcccaaacaaatgtgatttttgtttccaggagcatcgaacccaggtctgaaagtttcacccttccccaaatcttctcctaccactggaccacagatgcttggacagcaaaactatacttgatattctaaatttatcaatttgctcttgtgaacctcatattagcctagagaaactttgaaattctttcaagaagttctatgtagaatacagttttagtaacatttattagccatttcgattaagattattgttagcaaaaagtttttttttttatatatataagaaaaactatgttttagatacaatgtgagttaggcttcttaaattttaaaagttaaatacatttatacttaaaaatagttagaaattcaaatttatacataaatatgtcaatttgaaccttatacccattaaatatttggtgttagatatcaaaataaaagaaaattaaccatttgttacttatattgaattggatattgttacatgtatttatgtttttttttgtttaattttgaaacgttgataaaaaccattaaatttaagttttgtactatatttatttgtcgaaaatataattgtcattaaatataacgttaactttatttttaaaatacgttgttatttttatttcgtatatagaggtaaggtaacttcattttttaaataacaaatacaaatcattctttattacgatttgtttagttaaacaaaaatatttcttgtatatttcaatcataagtagatatgtctaaatttaactctcagattactatgctattcattgttttagctttggtgtgtgcgtttgttccggctttctcaatcgaagaagcggaagcaaatttattatggaaaacttgtcttgttaaaattactcctaagtgtgcgttggatataatcgctgctgtctttgaaaatggaacaatgcatgatccttgttacaacgatctcgtcaaagaaggaaaagtgtgtcacgatacgcttattaaatatattgctgataaacccatgttaattgcccacgaaactgaatacttgaagaaaagtgatgacttatggaaacattgtgtctcaatatccaaaagtgcttgaaatatgtaatattttttactgttttgatcaataaattggtattttctgttattgaagttttcttcactcaaacatttatattttcactttactacaatttcaatcaaagcgaatttcgttctaaaaaaatgtaacataaatttatgattttctattatcacttaaaacaaagtttcttatgaatagcgaaataataataattcaatatttaattattaagaggcgctctaaacattatttttagagaattgtttttttgtattttctttttaatgagattaatatctttttcataatttaacgaagtttaacttttttcaaagcatttggagaacttatttctttaaattccggaaaaaaagaatttaaaatctttatcattattctataattcagtgaccttagccaaaaacctcaaacaaataagcaaatcattttcaagcagatttacaaattttaaatttgaatttcaatgcacaaaacgaaaaacttg

SEQ ID NO: 15249 - DNA, 3000 bp, Unknown
  misc_feature (1)..( 3000): cDNA_ID_3095995_gDNA_ID_2926092_Annot_ID_196577 3000 nt of promoter + ATG
aaagtttgatgcaagaagtgatgaagggatatttctggggtatgccacaaacagtatagcgtacaaagtttacaataagaggttgaagagagttgaagaattagtcaatgttgtgtttgatgacaaacgccctactagactattccctgtggaacaagatgatgataagcatgtagaagaaacaagacagtcaacgcctgaagttgaatcaggacctcaaaaggatctgaacagacaatgatgactacagaacctcatacatcatcttctcgccttactgttccaaaaagtcattcagagactgatgttattggaaagttggatggagacagaactaccagggggataaagatgaactacagagatatgattctgtttacttgttttgtgtcaagcattgagcctaccaacattgaaattgccttagaggatgaattctggtaccatgtttgccatgaagaactaaatcagttctgtcgtcatgaagtttgggatttagttccaagacctgttcacgtcaatgtggttggtactaaatggatctttaagaataaaactgatgaagaaggcaatgtgacacgtaacagaacaagacttgttgctcaaggatactctcaggttgaaggaattgattttgatgagacattcgcccctgtagcacgtctggaatctatccgtcttcttcttggaatctcgtgcttgttgaaaagtaaactgtttcatatggatgtcaagagtgcgtttctgaatggagttattcaggaagaagtgtttgtgtctcaacctaaaggatttgaagattctgcttttccggatcatgtttacaagcttaaaaaggctctttatggttcgaagcaagcaccaagggcttggtatgagcgtctcactctgttcttaatagaaaagggtttcaaacgtggaagtgtggacaaaactttgttcatctttatagatgaaaaagacatcctcattgtgcaaatttatgtggatgatattgtgtttggaagcacaaaatagaagcttgtcacggactttgtggaatccatgaccaaaaagtttgagatgagtatggttggagagatgaactactttcttggtctacagatcaaacagactgatgaaggagttcatatctctcagtctacttatgccaaggggttgattcagagatttggaatgcagacagctaagacctcgaaaactcccatgagtgttactgccaaactgtctacagatgaagctggtctgagtgttgatgagaattgtatcgtgggatgattggcagtcttctgtacttgacaacaagtaggcctgatctgtgtttcagtgggggggggggggtgtgccagatatcaggctaatccaaagaagtcacatctgaatgctgtgaaacggattctcaaatatgtgaaaggtacaatcgaggttggattgttttattctaaacaaactaatcaaaatcttgttggattctgtgatgttgattgggcaggaaatctggatgatcgaagaagtacaacaggagggtgtttctttttgggaaacaacttagtctcatggcatagcaagaaacaaagctgtgtatcttcgtccactgcagaagttgagtatattgttctagggagctgttgcactcagttgctatcgatgaaacagatgctgcttgactacggtatgacatctaccaccctgcttgtgtactgtgataatatgagtgcaattaacatatctaagaatcatgttcaacactctcgtatgaagcacattgacattagacaccatttcattcgtgagcttattgaaaacaagattgttgagatctctcatgtttcctctgaaaaacaattagctgatatatttactaaaccattggatttaaacagtttcttgaatctgaaaaaatctattagtctgagtgaatactaatgtgtcttggtgttaaagctattgcaacacgttccgttgtccagagttgcagcagctttgtattttcatatgtatatatatatattgtgtctgtctttctggcacttcatttcaggaaaatagctgctcttcatgctcttcctcaataaaatttccaaaaaggatgagtgtggtgtgtaataattttaaaaaaaaaaggcaaaaagaaaagcccaaaagaatgaacaaatgaaagttcaaaagaaaaaaaaaaaaggggaacatgtgtgttggcaagaaagggattgatattctttcttatctttggagtatatgtgtatctatgagtaccccctcaaatcatccttcttcattacaggctctaccaatccccctcgtcgttttgaccacacacatcatgaggctacttcgatggagagtatgacgagtgtagactaacctgctatgttcagtgtgtatggcacatctcactgggccaggaagatgttattttctccatattcaaagtaagctatgaacctctgtactttggaatttgtccttctcgctttaatgatatgaacaggtgggttccttgacttctttagaagtaccttcaaatgcttttgaattatatatataggtatatatatacatatatatatatatatagtatttggtattttgtgtttctgttttagaggatgacttgaagagatctcacattcagtttgaatcacagctcttgaacgacagtggttgttaatattcaagtgttgatttgggtgaatttgtggttctatatggtcagacttagattaatgttgcacatccgtttgtatagttgggtgtttgttttgtgtctggattttgttttgttggttttgggcctggttttaggccttatgagtgtttaacggatatgctttagtgttttgcagcctgtcttggttttcgtgttgtttttagggttttgcttaaagtgctcgtgctatttaaccaaagcagctcccacaaaagtttcattcaccttttcggctactcaaccctcagaatttaaagggtcgccttatctctaaactcaaattcatcatg

SEQ ID NO: 15250 - DNA, 3000 bp, Unknown
  misc_feature (1)..( 3000): cDNA_ID_3095950_gDNA_ID_2926092_Annot_ID_196588 3000 nt of promoter + ATG
cttctactggctaagaagaatcctgtccagcttgtcattcagcgctttgatctccttcctgtgtttgtcatcagagtcagttgtgcctctgatagttctgtcgcagtcctcgttgtaattaccatctgattgagcaaggttctcaaccaattcccaaccttcttcaacatctttgttctggaaattcccattgctggcggtatccagaagcattctgatccgtggtagaactcttctgtatagagtgctgagcagagaagctttcttgaagccatgatgagggcattggttggtgtaacccttgaaacgctcccatgcttcacagaagctttcaccagtcttctgtgaaaagccagaaatctcatttctaggtcttgcagttctggcattggagaagaactttgctagaaaagccttcttgcaatcatcctaggtggtgattgagtcatggggcagattcttttcccagatgttaacatagaaatttatttatgttagatatttcataataaaatttcgatatatcataactcattccattattttagtagattatatttaaccagccttctactgtaagtattatatatatatatcagttttaggaaatccaattagagtatttacaatttataattttgttttattgttttaaaagacaagaagtttttaattgagagagatagtgagagacaaattattattcttgtcaaccttcttctctatattgtcgggtaacaaaatttaaccttgtttttttatctattatgtatttatattttatttgaaatatcaactaaaactatttttaaatgttccaaattaaaatatataattttttttggttatatacaaaattatacattccaaataataaatgtatgaaattgaatttagatattcaagttctaacccgttactcaatgagagtttttgttaaatttattcttgtttaaaagaaatatattactcaaatctgtattttgactgttataattttttcttcttagattgaaacatttaaatttgattttaaaaatttaaatcatggcatgtgcagacaaaaatctaattttcattattatattgatgatatgatgatttatttgtttaataaaaatagaatcaaataaagatgaatggtgaagtataatgatgaaaaacaaaatcatatatcatcaaacaaataggccaattgattagtctaatttctaatcataatgaacaacaagtttcattaattgaggaaatacgattcataatatcttttttaaaaaaaactgaagtcgaaaacgtaagttatgtgtatgattcaaaattgataatttattaaatttgggaaaattccccaaaaaaccagaactatttaaaaatctgcaagaaaaccacctgaatttttttctttatcaaaaagcacacaaacaaatttgggttggaaataaaatacacgatctattatttttccgattacctcccttcgccgtaacggactgttaacgacgttaaccaaataatcaaacggtgttagttttatttagtatttgccaaaaaaaatacatgaacttttttcttctcataaaaatacacaaactaacttaattggaaatataaaacagggtctatttttattttttcgatttccgtaatcaaattgtcaaatgtggttaattttatttacaaaatattcttaaaaaacttgactattaaagcaatcctttaaaaccttaattttttgagtaatatcaactaaaatcatgttattgatgggtatgttttatcctaaattactaatatatttttcaaattctatcagatatttagattcgatgtaagcaacattaaattaaaaaaaattaccccctttattcccaaaggttctttttattaatttcttcaatttattgtggttaaattctgaaatggatatatgtgttatgttaaaactaggattcaaaataggttcaatattgataatgggctttgcccactctccgacactctctcttattcctgaatccaaaatcgtccttaactttcttttctttagattttgctccaaaatgtctccttatctccattgttgtcccactacatagagtacctgaaaagacactaagaagactcgataaataacataaaaactcaaaatcgtatacctaaaacatagataaaaatcagtgaaagtaaggatatatcaactcccccagacttagcttttgcttgcctccaacaaaacacaaaagccaaacccgtggaagaggttttgaaaacaaaggaactcccaacattctctagcctattgccatgatcatccaaactaagtccatatgccttacaagtctaatcaaatcctaaccaacatgtacttctctgcaagcttacacaacattctagattccatacctaaattccacaactatatctaccaggcttttatcgctgggtctcatcaaacaagctaacattcaagatccttttagactcattcatgtactacaccataataaatcgaccattctttatataaattttttctttggtgttctttttctcaccaagacttattctttttagagagtaaacaaaggagaactcgcatactggatcgacaccctcagcatttttccaacctttgtaattgatcattccaaatcatatatataatagcagagttttctctcctctaaaagtgtccacgtcactacatctttttaatgtggagcccacatgtttttactctgccttcacatttttttctatgcgtgaaatagatttagtgatgtttatggggccacgatttggtcaaaaagcccatgagccaaagaaccaaatagacttagtgatgtgtatcgggccaagatttagtcaaaaaacctatgaaccgaaaggacctaagaaaacccagttaaaattgcaaaccctcgatttcattttctccaattcgatcgacgcaattcagaggaccacgaaagagaaaaagagtgtttcagtcactgcccc

SEQ ID NO: 15251 - DNA, 3000 bp, Unknown
  misc_feature (1)..( 3000): cDNA_ID_3095989_gDNA_ID_2926092_Annot_ID_196578 3000 nt of promoter + ATG
ggttttcaaaaatcgacttggcctcgggatatcactaaattcgcatagaccaacggacgtgaggaaaacggctttccggacaaggtacgaccactttgagtttgtggtcatgccattcggattgaccaatgcactagcagccttcatgaaaatgatgaatggggtgttccgagatttcttagacgagtttgttatcatcttcattgacaacatccttgtttacacgaaatcttaggaagcttaccaagaacatctaagggtggtgctggaacggctaagggaacatgagctatttgcgaagttaagtaaatgctcgttttggcaaaggagcgttggttttctcggccatattatctcggaccaaggagtatcggttgatccggagaagatacggtcaataaaggagtggccacgaccaaggaatgccaccgagatttggagttttctcggactagcagggtattaccgaaggttcgtaatgagttttgtgagcatggctcaacctatgactcgactgaccggaaaagacaccttattcaactggtcggaggattacgaaaaaagcttcctggagttaaaggccatattgactaatgcaccggtgttggtcttaccggaggaaggtgagccctatacggtttatacggacgcatccatagtgggactaggatgtgtactaatgcaaaaggggagtgttatcgcatacgcgtcaaggcaattgcggaaatatgagaagaattaccttacgcatgatttggaaatggccgcggtagtatttgccttgaagatttggcgatcatagttgtatggtgctaaagttcaaatctatactgaccacaaaagcttaaagtacatattcaccaagtcggagttgaatctaaggcaaagaaggtggatgttacatgggattccggttagtatagtgtcggaccgagacacaaggttcacgtcaaagttttggaaggcttttcaaaaggccttaggaactcgaaagaacctaagtacggcctaacacccacagacggacggacaatccgaacgaacgattcaaaccctcgaggaatgttgagggcatgcatcttggattggggaggaaactgggagaaatatctaaggttagtagagtttgcatacaataacaattttcaagctagtattggtatgtctccctatgaggcgttgtatggccgagcttgtagaacaccgttatgttggacgccagtgggcgaacgttgattgttcggacctacgatcgtatatgaaaccacggagagaatgaagttcttaaaaattaagttaaaggaagcccaagatcgacagaaaagctacgccaacaagcgtcgaaaggaattggaattccaagtaggagattttgtgtacttaaaggcgatgacctacaaaggggcagggcaattcacctcaaggaaaaagttaagcccaaggtatgttggcccgtacaaggtgatcgaacgagtaggggcggtggcatacaaacttgaccttcctccaaaactaaacgcgtttcacaacgtcttccatgtatcacaactacggaagtgtttaagtgatcaagaaaaaagcatggaagatgtacctcccgggattaaagaaaacatgacggtggaagcacggctggtacggatcatggatcgaatcaagaaagggactcggggaaaatcatgggatttgttaaaagtcttgtggaattgtcgaggccgtgaagaatacacttgggaaaccgagaataagatgaaggccaattttccggagtggttcaaggagatgggtaaagatcaacttgatgcggattcggagacgaatccaattcaaggggggagacttgtaatgcccgtgatcctcaataagatcgttggctaggacttggtccgagagaagaaggtggagtctcagacaagtgagaagtagctggccacaagctcggacaaaggggaaatcatgcgggctaagctagaatcataaggaaatcagttgggtcagctcgcccgaagctcaagctcagctgaaggagtgacggttactcaggtcgagtgacattctagcttgggcagctggacgactgacagttgagctcgaggcagctggacgagtgacgattgagctcgaggtagctggtcgactgtccgaccaactgggcggttatccggacggttatttaggcggttatggtcgaacggttgcttgtccaaaggataagggcgagcagttacgggcgaaaagatgcaactcttcggaaaggtgcaactcttcggaaaggtgcaaggaacaaatgtgttgattcgaaaagcatctattcgtcccctatttaaggaagggcgcccaagatcatttaggataccacaacacacagaaaaacaccggaaactcaccaataaactctcgccctctcgggagaataaatagtcggaggttcggtagccggactgtggccgacaaggaagaagaagcgtcggatcgaccgaacaacgtgaaggaaggtgagggaatcctagacctcgagtctaaggattctaggatgcgttatagatgagtcgggattccttgaaaggaacgactgatcggggcctttcaaaacttatatgtgattgattagtttgaagattgttctaataaagtgtgtttattggagttttggtcttgttctagtcaaagtacttagggctcttttacttcaattggtatcagagcgggtaaccaatatgagattagtatatttaaacaggttagatcctagttatggaaccaacggatgttagtactggtacaggcaaagtattcttactggatactaagcggtatggatagtggaaagttcgtatgacacaactcattagaggtcaaggtgaagatgcatggactgtagtagaggaaggatgggaacctccatttgatcttactgaagatgggttcaaaatcaccaaaccaaaggcgaattggactagagaagagaagaatctgtgaaagtttaatgcaagggctatg

SEQ ID NO: 15252 - DNA, 3000 bp, Unknown
  misc_feature (1)..( 3000): cDNA_ID_3096047_gDNA_ID_2926093_Annot_ID_196593 3000 nt of promoter + ATG
attacaaaaattcacgtggaacactttgattccaaaatataaagaaaatatattaggcatgactggcctgtgatataattttttcttaaagaaaaacttggattagtttggaactaacagagtattatttcggacaaaaactaggttaggaatctcccttggtccctaattattccaaattttaaaagatgttttaaaaacaatttcaaaacaaaatgatgaagaattgtaaaattcaagaaaactaatttactattaattaattggtttagcgttacagaaaatcgtaaataacaaaaatgtgcatttatagttaaattttaatttattttcttactatatgtgaaaaacttaaaacttaggaacatatgaggtaataataatcataacctagttattcatacaagttttgaataactggtctatataatacttatgtaatcaatcaatatcacgcttcatttttcttctatgatgtctttttttttttgtgtgcaacttctacgatgtcttttctactattttttctactttttcgtcaactacaagttttatagttttaaacttaccatttaatttttgtttttttgaaccaaaaaggtataactattatttgttgttttctctaaatattatgttgtatacgaaaatgataacatgagataggtttgaaaaggattaagcaaaaccctttccacttaaagagtggaaagacaacacataagacgtgacatatgaattaatctattgattaagtaagggtatttaatgttaagagttaaagaaggaaaaatgtttgtgagttctttttctgtacaagccacgtatagcatatagttaagctttgcttcggtaggttaatatagtagttaacttggtggttataattaagtttcatttttttttgtcttaagtaaatgatcggctataaataaaaatttcattttttttgtcttaagtatatcttcccaaaagtataagcatattttattgtctggagtagtttaaatatataatatagaaaactaaattcaacttctctcaagtgaaaaattaatgctgggaaaggtgtttttttatttaccaatcctaaacgttatgtctagcactgtggattgatatactaatctttttgatagcagcctaaatatcataaacacaaaacacacgttttaataataagaattcatgacaattaaactacatatattttttatattttaattttttatcgatagaattttaataatatccatcatcccagagtctgataaaagatatgttagtgtctaatttagttggttttttatcaatgaaaattgtaaacattttaatatttctataatctttactcggccttgttaattgttattctaacgtatgtagttcttcgcaaaaaaaaaaaaatacagtaatcaatttttgtttaacaaggttttctaaaatggtgatggttactcccactgccatgctaggaaccctcaaacctaggattccgacatacaccatgttttgaagattttgaggtgtaattgccgttataaaatattgttattcgagtagaaatgattttgttttatattaaaccaccttaattttatttttttttgttttttatagtttaagaaaagccagtaaaacttattttgtttattaaatattgatcaatgttaagaaattaacatatattgaaaacaattaaggtggtttaaaattaaacaaaaaacataaaaaaagctaaatatttatgcatgaaaagctaaatattagtcagtgtttagaaaactaacatatatattggaaaaaaataaaggtgatttgaaataaaacaaaaacttgcctgaacatcagaaaaatatataatcaaatcgaataataaaactttgtaataataatagttgtgaatgctgattgggaattagaatagtaatgctagatagaagatttcttaattataattaagaaggattttttatatatatctatatatatatatatatatatatattaaaattagaattatgatttcctaagttacacatttgaagaaaaccaacattaaaaataatatctagaataatataatgtcaaatcatatatattaaaagagaattttgtattttttaaacggtagataaaatataaaatttaacaatgaaatccgaagtttgtgaataggaatgagctatatatgagatttgtcatctataaaacaatttaacatgcacccaaaaatcgtcaaagaaaccttatgataaacacttctccaaattctttgatgttcactttaataagaaaatcatgcaagttataaataagaatggagtattgaaagatagaaaggagaaagtatatactatataacttaaaaactaatttatagttgaatatattatatctgagccaatataaggtgaaaagagagtagatggcgaaagatgacgaatgaattataaaatataacagaaacaattatagtgaaatgagaaatttttaactattttgaaaaaataatgcacataaataaaaaaatttaaaatttaataactataagattcgcattactaaacattttaaatttaaatctgagacgaatttcattaaaaaataaatttttaattaaatgcttcgtgtatataaaaagtagactcaaaatgcctttttattattattttcggcagtgtagaatattccagtctacactctacagtatatgctaactaatttaatatgttttcacttttcacaataatattaaaagctatttaaaattagaaaattgtgaccaccatttctttctttttaattttcaagaatcaactttataaaaagaatttgtctcttcttcttcgatttgaaaattccttttcttccacgcatagtctcacgtacagtcagataaaaaataaatatataaattacattttttaatcataaatcttagcttttttgccttttcgagtttttttaccggtgattcttgaagatgaatcgaacatg

SEQ ID NO: 15253 - DNA, 3000 bp, Unknown
  misc_feature (1)..( 3000): cDNA_ID_3096040_gDNA_ID_2926093_Annot_ID_196596 3000 nt of promoter + ATG
tcttaaatgattataagagactttggttccaaactcgagcttttaaaaattgtcgaagaagaagatatgtggtcagtgtttgcaacggaaatagattcttttacgtaatcattttagatgttttgcgatatcactatacctagaaagttgaatatccgagctgacacccttgcaaaagggtttattttcgagatgtcattttttctatataaattctcgggttccgaagtgattggctcttgatgcctaccttttcgaacctgtttaataatatatagaatattttgtcgtaaaaaagaaaaaaatcccgatttcccgctgcggtatattgttttctgaaaggcgattctaactaagtgttgtttatatgttgtcatttggattgaaaaacgaaaaatcatctctaacatacatacatatcgtaaaatgaacataaattcatggaacctagaaaatcgatttgctatagttgtcgtgtctaatcacagtaacgaattaacacgacaatcatttaacaacatttgatctcattcgctgattgatacgatactcaaaggagcattatttagtcacggtcgtcgactgccatagaaatctatatataacaattaatattattatgccacctacatctcgtaaatacttcctcacatttcttgtgtactgttgttacaacgaatgagtgccaaccaatgattaaactaaacttactaaatatttgtacacatatattattataattcctccatatttataagaattaaacttcgtaaattcattgtcaattttttcaagaaaatacaaagcgtgaaagttgtctacttgtctggtcggccagaagcgcagagtcgacttcgtattcattgtttatcatcgtattactctcccacatattaataatcttattcttatccaaattatttgcttttgcgtacacatttcacgaaagtttctaaaattgtttttcttgtaaaataccatataaataaagcgtacgtaaatacgaaacacatcgtgatagtgagctatatatataatttagatgttaatttgatgatatatacatatatctccattttcttccctattgatgtgttatttgttattatttactcctccaatgtaatttattagaaataaagcgtatgtaaatacgaaacacaaattagtcagttttccgtcgtccaaaatacaatgtcaattaaaaaaaaattatagaaaaaaagtaaagacactttaataatagttttatatattaacagaatgtttcaggtttactgcaaaataataaaaataggccacatagcgctcttgtttgttttcacagtttctagttctaccatttggtaaatctctaatataaaattttcaatattaattgttttaaaatcatatgaaccacgaggggacacgtgtcggatacaaagacaaccaattggatcagatctggtcttcgataggacaagtattcctgggaccagagagagagagagagagggacaagatcgccgttcaatagactctttcttcctattaatcacgtggtgaggtacttaccacgtgtttatattattggcttcttacgtgaaccaatctcatggtcctagttttcacatacatcgttttcctttgtgttgttgtttttctatatgacaataactttgtatctcttttatggtttatataatgtatatgcatgcaatgattaagttctcaatattacgattactctcttggaaacaaaaattctcgtataaactaaagatttgcaaacttcaaaagattatagaagaacaagttgtataaaagtgtttgtttgatcacttcaagagttggagtttttgtgattgtgaccattagagcatccacattggtgattctctagaaatgtctttacaataattattataaaaattaatattattctaattttgagtcatttattagttctgtatgatgtctttaaagatacaaaaatgtctctatagagatatgaaagacacaggtctcccactgtaccattttcttttttttttttctttttcttttaaaaatttaaagacactgttatttttttatgcaatagggatggtctcccactgtaccatttttttttttttttttaaaaaaaaaattaaagacactgttatttttatacaatggggatggtcttagatctccagaagatacggcgtattgaaaagtactgctgatctgtccaatgtaagggctgagttggaactaaccttcaatccactgagcgacatttgtcaatttcaaccaaaacaacaccaactggatgattatattgttttcttgttatttgattttcttgatgatatgtacaaaactataagtcttttttggtatcaatttagaccattagctaggacgcaacaatatgaaaccgtatcgctataagacattttaaacctagattttaatagttctactttcaaacaaatccgatagtttactcggcctcctatatcaaacaaatgaatcactatacaaggccacatagaaaaatcttatccctacgttatacaaatacaaattcacaatttttatttataataaaaaattcgcaatttgattagaacctttggttgttatttattgtacacataatattaaaatggtcaatcattgtctcgtcttgtagtttagcatatgtatggattacatagttttctgtctgttaccctctcacaagcataagcgtcgtctcgccaaaattagacactattcatatacacaaatatagatacgtatataaatatgtagacatttacaacttataaaagaaaattaaataaaaaacaaaagtcggcaaaccaatttgcatgaaataattataataattttttaaagaaataaccaaccaccaagaagtgctttgttaacagagaaagctctgtaagaaccttaaaaaggttctgttgcagaggttccgaccaaaagccagagtttcatctttatgtgaacaaagacagagag

SEQ ID NO: 15254 - DNA, 3000 bp, Unknown
  misc_feature (1)..( 3000): cDNA_ID_3593590_gDNA_ID_2926093_Annot_ID_196595 3000 nt of promoter + ATG
aaaacttgtatgaataactaggttatgattattattacctcatatgttcctaagttttaagtttttcacatatagtaagaaaataaattaaaatttaactataaatgcacatttttgttatttacgattttctgtaacgctaaaccaattaattaatagtaaattagttttcttgaattttacaattcttcatcattttgttttgaaattgtttttaaaacatcttttaaaatttggaataattagggaccaagggagattcctaacctagtttttgtccgaaataatactctgttagttccaaactaatccaagtttttctttaagaaaaaattatatcacaggccagtcatgcctaatatattttctttatattttggaatcaaagtgttccacgtgaatttttgtaatttggaattaaagtgtttttgttgtccaatcaaagcgacaatgcctaatctattgtctttcataactgttcgcctgtcatttatgtccaaactatattgtttacgattttcatcaccaaaactctttaattatactaattatcggtttttaaatatcgaaaacactcagttaacgtattgcattcacattttaagaacccataatattttagtaaacattaatttttgcatcataagcgctaacacatatgtatatataactctattaattgacaaaaaaaaactctattaatttgttcactgccaaaaaatataactattcgtttctcaactattttatttatattttatctttgttaatgactttgtaaataatgttagaaacctaaaacatttatatacaatgaaagaagaatagttaagatctaaagttaactagtgtggcatgatggcaactttagatctaaagttagatctagacttcaaaaaaatcactttccattatattcaagttcgatatcggcttgcgtccttttttttaactcgactctcaaaatggtatgggtaaggtaacattacctttccccaattgagtggttagttctatatacgctttcgacagcatatacgattgagtgtgttgtttgtaccttctggaatcatgttttgaggtaggcaaccaaatgtgtgaggtaggcttttacgtctaaatttcttcccttgctttaatttttgaaagattcaacgggcctgttttctcctaagctcgaagctagtcaatccaaatcaatatcaggaaaattgtggaccatatatatgtaaccttaatcaagaaaagaatggcaataagcagttagctagtttaatagtctagtttagtggaagaattttagccgttaatatatttgaaagagttagttcatctatatgtttacagaattggattactcatacaaaaagtaaatgtctttgttcaattaatatttctaagacaacctaatttttaagattagaaagatatcgaagtttgtggtcctatatcaaatcatgaacgataaacggaggacgtacgtactatgaagtattttatataaacatgattttctgaatcattatacatacaaaatttaacatgaaaattggataatgacaataagaagtcgacatcatcatataactaattctgaaacttaatcgcactagagaaattaattgttagaaaataggtaatataaccaacctcaatgccacaagtcgtattcggtgcaggtaggcaaccaaatgtgttaagttaatgctaaataacatttgatgttggtatgaagagaaaagttaaatcactaatttttggtttggtgactcgctctcaatagcaatctttgtgcttaacaaatcatcactactgatgtcaataaaaaaaagagcatcattactattttatatagaaacaataaaaaaacaaaaccttaattagtttcattcctccaaatgacaaatttaagatatttactagtattagatgataaattattcattcacatataaaactgcataaacataatctatgtttttaatgactgatataggctgaaaagaaaaaaaagagactgatataggctttatatgaaaatactgcatttgaaaaaatttcattccttacatgttttttttttgtcaaccatgcataccttacatgttattttataaaatttaagacacaatttcagattatcaaaaaaatccaggaatttttttttttgtccatatttagatcaaatacatgaaatttataaataaaaaatttaccctctattctagttaaaatacgttttgatgtagattaaaaatagttaaatatgattccaagacacataatttatttttgattatatttagagaactaacgaaaatggtggcttcctgcaatgttgaacaaaactttttaaaaacctatatacttagaagttagaaagtacattgatttacgaatttccaaatttagaatttatatcatagattagttaagaaaaaatattgataattttatctaagactcatgggagatcgacaactactcatattggccaatcttaagatttcgtttgttgcatcaaatctatatttgtttaatcacgaacttattatatctataaagtagaagtaactttatttctccttaatatattttgaaaaaatgcaattcctaatgatttagtatagaggaagttcacgtagacagtcaccattatcgcttcccataggaaatattttattcaaaatacagcagacattgatttttttatttatttttttctgtgataacatctcaaattttaggtagttatgaaatagataatattgaagcgttttcatttataatgggccttataaaaccaatctagcccatatcactaccaacccatttattacatccgaatctaaattaatcaaacccgtatattaaaccgggtttaaaattctgacccgtaattgatccactgacctagaaattggggggaattgaatcttatccataattcaatctcttccaatttctcttcttcttcttcttcttcctcgcgacgcgtta

SEQ ID NO: 15255 - DNA, 3000 bp, Unknown
  misc_feature (1)..( 3000): cDNA_ID_3096101_gDNA_ID_2926094_Annot_ID_196605 3000 nt of promoter + ATG
aaagtcccaagtctttctttttccagttttagataattatggagaaactacaaaacattacatcgtaatgaattggtacgtattaatttactaacatgagtggctttgttgtggtcttaaaattctttatggtttcggattttcctattgggctttcgtctgtcaattattggagcagcagcccccttttcttcatattgggtctgatgtaccatcaccagttttatttctctaagatgttttacattattatccaaattaaaagggctttccaatctaatatttaaagcttttgctacaatgataaaagggaatttaaatgtttcaatatttaacacttttgcagcaaaagttttgctacatattctccatacaatagttatggtcttgcggacgtagaaaagttataattgtttcagtaaagcttatcttgtttttttatctgaattacaacaacataaacctcctatgtgaatgctatcggaagaaaagaagatatgtgtgtgtgactgattttgtttcattaatggttgtcaggtgaatgaactttcttcttttatgatatctagaagctttgattccgatccctttttttattcgaataaattgcagattatcgtgatattaatgacaactacgaatccatgacgtcattgatgattataaagtcacgtgtcaaggaagtcaagaatacttccaaagtcaactatacaccctattatattgcaaagggttaatttctagaattccatgacgacgaaacatgatctttttcctattctctaaagtcatacataaaaatttaagtagtgccataatcgacagaagaaaatatatatttatttagtgacatggtctgatttcattgaattgtttggttttagattttgttaacaactaagttggtgtgtaggattactgttaattttaagttattgaatcgcttaatatcaccattatcaccattgtttaaactagtagttacatctgaatgggttagtgaaattttcattatccaagaaacctaatttcaacaaagctaatagtattaaatgattaaatttcaaaaagttctaaccactattataaaattataatgccgcacattttttagtcaaagcaataatgtgtttgtattatactgtattagaaaactcatttatagatacacgaatatgttagaaatttggaatggtcgcgcagccagacattatgatgataatacaagtaggtgatcaatgcatgtgactgaaaaatatcacatgaagaacgtttagtgaactggtttcatacttattggtattggattagcattctaatgacttaggggtctaaacattggtccaacgaaatatactattgctatcccatttgtaaaatgaggtattaaattacgacgaaattattagcttgtagtgatcgctaatttttttttataaatttatttttcataagagtttttgttaagttagtaaggttcttctgtcgataaaatctatagaaaccactaatgactaaacctaaaaacatactttttgttacttagcaaacaactatttattgaattcgactagtcttcatatatactacgatttgtgttgaactttattattttttgatgatttcaacaatagtaaactattatttattatgaagattcaaataactcatggaattggaagattcaaattcttctattatgatttcatcaatagtatatattatttatttttaaaatgagaagatcttttgattctcgtaaatctatattttagttcaaatttctggatataaacagaaaaaaaaaaatctaagaagtttcgatgtcatgcatgcatgactcataaaagaaacgaaaaacgaaatatataagtaatcagcaaatcaataaattgctaccatccacgcctcttccagctcttaataatcgtcagtttgtttgttttttctttttaacttaagaatcgtcagttttgtttttttcaaactagaacaaaaaaaaaatctaattagtaattactctagagacctggcacaatgattttattaatcgtgattggttattaacttattatatgatttatcaaaatgaattaattcctttccacgttgttttggttactcattaccgatggaagacctgacacaatgattttattaatagttttttttttggttaaggtgtttttaatatgatttatatttttggatgaattaattcttttccacgactaaaacattttctttttgtaatcaacaactttactgcaacaaaaacaaacttttacattcagatttactgttctgaaattttagaaatgaatgaaagaagttaaagaatgaaaatatcgtattcgttagaatttaaatttaatcgatgtaaccatgcaattagtttttaatttttctaggcaataattaaacaaaattctaaggatataggtaaaataataccaattaaattacctttttttttttggtatcaccaactaaattaccttattctagaactagaagcaatctatttcagctacgtgtaaaagtcatttggaaaattcgattgattattctcgaccatatgcattatttcccccggcaaataagaaacccgcgtacatttttttgatacctttcgaaacaaacaatactcatgatcaaagttatatttttagattaaaaaagaaaagaaacatccatcaaaaagtcaataaacgagcaaaaaagtgttaagattcaaagtcgttgttcaaagttgggtctcttttataaaaaaaaataatcttcttagcttcacacatttttgaaaagctaaaataaaaagactccatcttccatttttgttccttaattcatatcttaagattcaacatttttctaacattctttatttcattaaccaagtttgttctccaagtatttttatagatttaaaaacccaaaaatatttctttcgagttttctcaaaattttcagacaaagaactaaactaaaaaagctatg

SEQ ID NO: 15256 - DNA, 3000 bp, Unknown
  misc_feature (1)..( 3000): cDNA_ID_3096096_gDNA_ID_2926094_Annot_ID_196606 3000 nt of promoter + ATG
ttacgtttttggcgagaaaatcacgggtttacgtttttggcagaaaattataggtttacgtttttggcgggaaaattacagatttacgtttttggcgagaaaattattggtttacatttttggcgggaaaatcacgggtttacgttttttgcgggaaaatcacggatttacgtttttagcgggaaaatcacgggtttagcgggaaaattacgggtttacgtttttgacgggaaaattatggatttacgtttttggtggaaaaatctcgggtttacgtttttggcgggaaaatcacgggtttacgtttttgacagaaaaatcacgggtttaattcaattttacaacacttgatgggttaattgggtaaactattgaaaccattaaccattacaacccaactcattttactcctcaaaccaattgactcatcaactcatttgacccattaactcatttgagttaaaaatttcaactcattaaaattcatgggttgaattgaattaaattgacccataaattttaacccattttaacaccccgtataaccatcacttatatctttctatatcaatttctgaattcaataacttctccatcgtgacaaatactttatatctagcaacacgattacacattaggattgagaaagtggaagataattaactatataaatactatatacaatatcttcaaccaactcacatttagcattgttttttattacaatagtattctattgcttgttaatatctttaaatgtcatgtactcttctttatttttcttcaatgtgataataataaagataaggaaaagcaactgaaacgtatcatcattaaagctgaattagaattacaaagtcacttagtaaatgattagtgtttaggatttggttcggcataaagctataaaatagaaaagaatttggggaaattttatattatgacgattcgattaatatcttaatcgcctcttcttcttttgtaatgtttatcgttattcgtcggacacctaaacaaatagacttcgtgataaaagattttttatttttttttgtaaatctcataaaatgttttttattaagctgattctttttagggaaaaagacctaaatgtttggagcacattatgattcaacgaagactatctttttaagaaagagaagacacaatcttacccaaaatcggtagcatcgaactagcaagtgccacgttcgaaagagagcacctattaatcacacacaacacaaacaaaaatcgatttcagaaaattaaaatgttctgaaaatccctcaagaaagaaaatcagtatttaattgaacatatgagctcagtggagccattagtatttccaagagaatatgcattacctatacgaactttgattatgattattgacaattgatgatggtgtttatatttagtacattatatatagttttcatatgatctctttcattccaatttggatgaataatactattttttttttcctacgaaaatatataaatacttaactgaatcagattaaaagttcgttttaatagcttttggggcaacacctagctctctcaagctagctccatccaaaataaggacttggtaatatatatttttaggggtcaaggataatgttaacatatatggtcaaataattttcactgtttttagtaaattcatattatccccttattaatatctgcaacaaaaatattaattctagaaagaaaaaaacaaattgctcatatgggatggatggtggtgtgtatatacagctgtattggttaggctgatctttgaatagaatctgtagaataaatgtgtcgcaatgaagcatatataactttgttctgtaatgttcttagctttctcttttggtgtcaaatccaaccactcttgtaacaataatgttaatttctttttctcttttctggctacgtttcttcatttaattcaacgaatcacacaaataaaaaatattcagcgtcaattaaaaaggtagaaatgctgctaataattattggtgcatttgtgcccatgttaattaaaatttaaattatcaaagactcatagtatgtaaagtatggaccagaaacaacgtaaaacgctttgcttttgtcactctcaaaaaaagactttatgttttttccatgccatgacgccataaacatgctacgtgttcaagagaaagaagactttgtctatactttgtctaacagttgtttttaatatcttgtcctgtacaaaatttctgtaaaaataactgttatttttttcattaatggttgtcatgtggaattttttttaaaacaacagttatagtaaaacatatgtaacaagaccacgacatataacctagtacgttacatgttgaaattggcatgcgttctataaacggccaacggggatagtataaactgatatagcacattttttacaagacaaaatagttagctatacaagtatacaacgtttaaattaaatatttaattagaaaaaaaaattcatatttttactgtggggagtaaattcagataggacataacaacctatgtaatgtattaaatacttgtcacttatcaatttagttcatcttatgaaatgcaggtttaagtataggggttggtagtgcgacgaccactccaaattcataagtttaaggagaacatatatttctttttgtatatacaaaaggacacatattttttattgttgtaatcagggcaatgaagacattgattatttgtggttattgtaactatattataaactgaatttttgtttaccgtgtattttgcttgtttttcataaaacggtattagtttttttctcgatatcaataattcttttttttggatgttaaatgacatatcttataaagagagttcccacttctttcctttatatacacatcgcataacatgtgaacttatcaaaacaacacaccaaatctctctcttcgtctctctctttttctatctctctttccttctctagatgatg

SEQ ID NO: 15257 - DNA, 3000 bp, Unknown
  misc_feature (1)..( 3000): cDNA_ID_3096082_gDNA_ID_2926094_Annot_ID_196612 3000 nt of promoter + ATG
aatatgggcaatttggtcattttggatctgtcaaagatgggtttaagaggtgaggttcctttaggtttaacaagtttgagaagattgaggtttcttggtctcaacgacaacaacttgaccggcactgtcccatcaaaagagctcgagacattgccttgtcttggtgctctatacatcaatggaaacaatctatcaggagagctaagattctcaagaaagttctatgagaagatgggaacaaggtttaaggcttcaaagaatccaaatctttgtcaggatgttgtgtcagaatctcggcaatatgttgttggattgaagtcttgcatgatggagaaggcagaggatagtttggtaattaaacaaacttggagcaaccttaagaaggaggatgagtcaagttcatcaatgggtgtgatggttactagacatgtgttgttgtcaaatgggttcatgtgggatttgcttttggagctttctcttatattattattgaatttgttagtttgttaactttttgtttgatggttaaatagtattgatgtgttggttgatagattttgatgtcggtgtttgcttaaagagaagaaaaatcaaatccttttggatgtaacaagtctggtttcttctccatctgtcttaatctaaaaatttgtatatgtttgtaatgtaatttcctcttataactaaacttaacatatttcggatcgagagaaacaaacgaatttgggaaactccaattatttttcatgttaatttgtttgatattcttactttgagttttggttttagatattttcaaatttgtgtttactgtttagtgtatatttttcatttttaattttgaacattttggacaacaaaaatattttgatacctatgatgtttttggcattggcgtatttttttttgtattgaaaaaatgagaatatgttttgtaaaaaccacgacaaattgtgctaaatgttttgacgatcctaaattgacattttaatcgtataatgtataaactaaactctatagacaatagtataggtttaggttcaaacatttggttttgactataaatgtgaaatgctttaaataaacatgcaaagcatttaagcatatatccaaagatagctaactttggtgtctcaggctctgtcattggtttcaaacagacaatacaaaccaaaccaaacaaagccttgtactgcctggaattttctgacttcatatacagaatttaatgactcttttattttttcaatattttttttggtgaattttaaaagtagatattgatgttcaattaaagatgagacagttaggggtttttagtatagactgaaaaaatcttcttttactatttactttgttttttcttagtttgcagttagctttttacgatcatttatagctatttttttctctctttcttttgttgctttcataggctctgtctccataactccacaagtcattattagttgttcataggtgacggcttctgtactttttctcagtatttactaagacaaaagcaaaaataattgtttttcttgttttataactcggctgcaacaagttttggttttatgtaaaagattttagcgacattagatattgaattagacgaaaaagatgtcgaattcgtgtctgaattatgtttaacaagttttttattcccattagtaatattttacggacttgttgagttaaatactgagaaagtctatttcccaaaacactctttttcctctatgtttcaataggaataacataatatttctaacattttttcaaacttttgattatttatataattattgaaaattacaatttatgtctatcgtatcattcttaaaaatttcaatggagaataaagtattttcattgttaaatacgttcttacgatctttttttccatttcatcttttcttactatcttatccacaagcttgtgatttgtgaatcaaaattaaaaagaaatttatattttccttttaatcagttaaatccaatgagatgttcttggaattgaaaacaatgatgatatttaataaatgattcttgcaagtttcaatgagccgtacggattaaatagtaaagttagtaatgagtttggttttcttgaacaatttattaactcaaccctctggccaagagttgaatgttcctgcagtccttatttcctggctcttttttcacttttttaccgtaaagtaatttatatacagttaatgtaattattaatttccgtacaagtttttgacacttttatcgtcttgatttgattgattttgttggatggagtaaatactttactctatttacttacaaattatatcgagctcttttgtttagtgtcatatccttaaaacatgtataatgaatgactaatacatgtcaacaagggaaagcacaaataaccaatgacataagttcgtcatatttttcaatttttacgtcatacgaataacattgattggctagttcgattaaaactcaaaagcatggtaaagattttacagcggaaatacttgaatgtatatttttaccaatgttacctaatttctaaagaccttctcattgtcaactgttttaagcttaacataaaatatatataattatcgttacgttaaatacaattttgggaacatacatataacataatagataatcgtaagtcgtaactattcataactcgttctacagtctacaccatcgccgccttaacttttattgggctttaacgataagaaaaaattgtattgggctttattacccatttaatttcggcccactaataaatcttctctccatgttttgaacactgaaaaaagtcttatcctgatgatttctctccttcctcgaacagtcgccgaaacattttcgccggcgttacaccggagaattcatccttctttgtcttattactctactacccaatttcagtttaaactcactatcttcccaatttgatgattcagtgattcaaattcgaaacttcaagcaatg

SEQ ID NO: 15258 - DNA, 3000 bp, Unknown
  misc_feature (1)..( 3000): cDNA_ID_3096072_gDNA_ID_2926094_Annot_ID_196614 3000 nt of promoter + ATG
aataaaaattaattcagcttctttctaacttttcttaacttagtaaaaataatattttaatttaaaataatgttaaaattgaaaattaagaaccaattggggttgctcttacaagaatgggaaaattaaatagaaaaaaaatgaaatcgagggactgtaacgagaaagacatttggttatatgttgttgtctctgtcacataaaaaagtaaatgtggcatttgttcccatatcccatacatgttaatatacacgtatttacttcttcaactttttagtttttctcttttgaagtagagtatgtgaaaagaagagggctaatgtggaaaataggatcacaacttcacaaggatcaaggatgctattgcacttctttaatgtctattgattattgataaagatttttttctttacttctttaattttttttttcttatagctcttccagatgtcccgttgacatttatttgtagttaattattggcatagctttattcaaaataaagggataaatgtgttttattattctttgtagcttccataggtaagagcatctccaatggaaaagctttttctatggttctcttcattttttaaaattaaatttttaaaaaaacttacaagagagcttttggattttctttttagtttttcattctccaataatagtttctcttacacaaattctctaaagaaaggaaattattttactattattttattaataataattattgcaaatcataaaatattaaaaatacattattttgaaatattttaaaatagatattccaaaaaggaaaattgaaataacgatcagttgttctgttgattgatgatacgatgatgcatctattgagattgataacgttagaaacgagatccaacagagtaatatccataacagaacacaagaataaaaaaagaataaaaggcaaaaaaaaaattgttaaaaattttaaacagattaattatagcttgccacgtagcaggctcctcaagttaaaaaaaaagctcttctctccatattaatgtattttcatttatttttattacaattaaattagagaacccgtgatttttgagcagagaacctcctattggaagtgctctaagttcgtcgtagacaaagttaatcaccgtcctggtattaaccacacgacctcaaatagacatagattttttttttcttttacctttttaaatagagagttatagttataacctttctatatatctttgtttttatggaacttcgttcttattaatttacaacgtttctatgttttacttataaactatttatctatctctatttacttatcagttgatcgattttgattcttaatttgtaacatgtgtttttatggattttgcttaaatctttttatttatctgaagccgaaaaatcttatatgttgtttgatgtagaggggttgaagtctcctatcatttatgtttttttgcttaaatggttcttttgtgacattaattattaagttgctctattttatgcgtatgtgtgttttaccatcgaagcagtagtagctgactatactggacgaatccctaaccttttttttttcgtccggaatccctaacctacgtttaaaatttgaggcagactttagtgttgctaataatagtttagggttaatatcattggtttgtaaaaaaaaagaagaaatcattgacttatgtaagtttttattattgtgtgtcgtttgatatgtcaatgttgacttcatgtgtctaaagatgattcattatcttctttggccaaacaaaaactatttgtctgcatatccgaataaaaattatttactttgcactgattttggtggagaattaaactttgaaaatgttccctaccaaaaaagaaaactttgaaaatgtttattttattgcaagcatgcgttaatattttttttccaagatttcatatccactcatctacaacttgatagattttgttctttcacattacaaaatatgcatttgtaagaaattaatacaatactagaatcttctcatggaaaatacccacgatgaaagatatgttcatgtcatgagctcaatgtttgagcttcctttcaatttcagttttagaattttagcatataaaagtttctaaatttttaatgtaatcactaatttgattgagaaccaacttttatcattgcacaaaagaatacaaaataaaaaatattttaccttgtgttatgtaccttcaaaaaccaagtaagtactatatgatgttttactattttctgaatttcgtatttgaaatcaaatttctgtcaatagtaattatttttttttgaaaaattacagcaattataaagtcttttatatattagatacttattattaccaacatcaatatatatatatataattaatattctgacaactattattaatcatactctctatgttttttattaatgtatattaaaggattttccacatattatgatatgattatagatgcaatatttttgtgatttataattttgaattttttataactcgaaatcatctgtatttaattattattttttgaagtttataattcattaaaaataactaataaatattgcattgagaacttaaaatatctttttttttgaaataaaacaattcctaaacatagagtaacaaaaataaaaagagagtatatatatttcaccaaaatataagataactgattaaaaaactattagtatatagtacatttcaccaaaatatataaaacaatctactactttaaaaataataattaagctctctcgaacttaaaaattgcatagcacaaaccgagactaattgattcaaccgagactaaaccggagaataagcctaaaccagaaccctcggaatcatttagaaggatagtcttgttgtatcacagcgagacagcttctcttccccatcttctctcgctgcttcttcgatcattgaagcatccacccagaaaaaccctaattctcctgacaaa

SEQ ID NO: 15259 - DNA, 3000 bp, Unknown
  misc_feature (1)..( 3000): cDNA_ID_3096194_gDNA_ID_2926095_Annot_ID_196623 3000 nt of promoter + ATG
atagcttatgatccagggatgacaagagaagctttggcctatcatggttgtgctgaactgttccaggtactttaaagtttatagtattgtctagttttggaaagaaatgatttcttagtgtattacgatttacttgtttattgcattttggagctactcaaaggatgttcataccgagctgattcaacataaacgagcttggatgataaaacgtggtattgtcaaagggaagctctctgtagactcagccgagcaacgcctcgcggggttatgtcctcttatgccagaagaagtaagaaatagtataaatatttacgggttttcgctcggtaaagtaacgaaaacccgcattaaatgccttggttgtctctcaggttggtattcttttacgagcttatggatactcatgggatacaatcatatatgtcgctgggggagaggtttttggtgggcagagaacgttaattcctttacatggtatgtttgagaatgtcgttgaccgtacttctctaagtactagctgggagcttgctaaaatgtatgggcgtgaggcaaagcataatgatatcaagaaaatgacacctccttcgatcgaggtagaaacgaaacatgattcattgaaaagcacaagacaaagacctcaaccgcttccacctccaccagctagaccaaagtactacaacatcgaaggttggtggggttgggtagccgagagtgacaacgagcccgaaagcacggttattgagttgagaactaatgcccataagttgttgtgggaagcgatagattacgttgttagcgtggaagcagatgtgtttatctcgggttttgatcgcgatgggaaaggacatccgagtttcgctagtttggtcatgggacaccggctttatcagtctgcttctgctaaaacatttagaccagacaggtaatataatgaatgcatcattctatttagaagatattaacagattatgtaatcttgaaatttctcatacttgtaggaaacaaattgcaatgcttttggaagagattcgagaccatatgtacgaggcgaatcacacttggataacatcagttaggaagctactaaagagaagcatactcgagggtctaatggaatcttccaaaagatcaaaagcatttagttttctttcccatcctgtacccgaatgttcttgcattacgcgaacccatccggtttcaaatgccacaaatcttggggtgacacaccgttgtccgcaatgggtggatggtgctgtaagcgaaagattaaaggagtataagaacgcagagaaagaagaggatcttgatgaagaggacttgtcttcttcaggattgttctttggtcacaaggaaagtggagggaataataatggtaacaatgagactgtaaattccgaagctaacaataaggaagaaggtcagcttgaagatcaagaagaacttgaaggcagcgaaagataaggcttgtggttgaagatgcaacaatgagcaagtcgcagatagatctaaccttttctcaaaaatagtttatagcctggttattacttattaggttgtgtattagaatatgtctttttttttttgatgatcaattttacaacagtttagtgatttttaagaacataattctatggtactatatatttttgtaacatgatctcagtggccaattggatgactcaactttttttttttctactaatgcttagtaaattgtagtagaggtaataagagtagatgaatgtcttagctcagccgaatactcttcatgttatttgagtaacaaattagtatcaagcttatatttgtagataatttgcttccttaaagaagagatcaagaaactggtttatgaataccatcaatatctagcggaggagcagcaatgaatgagataatcaaaaccccaaaccatccaatgtaaaaaaattcaatggaatataatctaccaaacgaacgtgaagactcattcataatgtaccaagaacaaggtaatggaaccaccagtcaatctgataagccactatatgtgtatacaagaaagaatagagcagaggaagccacaggtgtgaaagaagaagcttgaagaagctaatgttggcacgtgtgaataatgactcgtgtataataatagtttctcatttgattaggctttatgcattgtgtgaataatgactcgtgtaaaataatagtttctcattggttaggcgtgaagaaactaatggtcggtgacgtgtcactagagtgagagagagagttatgaattggtgatgtgccggtggctcaatctctttataaacggtgtaaaaggagaattgtaacaatccttatcacaatccacttgtcaatttcatgttggcttcgagattcatcaacaacatgcctactttatgcttatttgatggcaaaccatcgagatcaacagttgttcaatagagctgaccctgaaccgtttgtgagcaaactaattcgcattatggagaatccactcgtcaatcttacctaagattcaaaacccattggcagcatgcatattttaatgtaaaccaagaagagcacactagttatggccggcgaagaacttgctttaacttttctttatgaagaaaatcttgaatctgtaaatgaggattagataacaaaagttcattgtcacgtttcagaaaaagagcaaaaaaaattatgtttccacgatttgattcaacattcaagattggttagccgagggaagacatctttaaaaaaaatctaaaaacaataaatgtaaataaaagtggtgctactaagaatgttgaatattgtcacttttctttatgaagaaaatcgtgaatttgtaaatgaggactatataacaaaagttcattgtcacgtttcagaaaaaggtacattatattacagctgcaagtataaaaagagagttcctccctcatataatcatgcaacgataaaccataaaacaaacacatacaaaatagttgaaagagagaaattaatatg

SEQ ID NO: 15260 - DNA, 3000 bp, Unknown
  misc_feature (1)..( 3000): cDNA_ID_3096161_gDNA_ID_2926095_Annot_ID_196631 3000 nt of promoter + ATG
gaaatatattggctaacaaaggggaaaacacacaaatttcgacctaaatatatataatccaacgatggtgagaatgagaaagtatgcttacgacggtttaaagaaccaaataacccgttatttacgctacttctctatttttaagaggagataacaaaactcaattacaaaaaaaaaaataacaagaaaaacttgagaagtataactagttgtttatatccatcggacataaccgcaaaggatgcgaccagttgtgaggagaaaagtgctttactccctgccatcggacgtctcactcaagaccatttacgtcaacttgcccaaaagacaattactttccaataccactcagcaaaaaattcacaagcaaatttttctgataagaaaagtctttgtttggtttagtttatttataaacaaagagtaaccgttgacgttgagtatttatcacccaattaatctttctatattgaactagtcgtggagtagttcactcacctaattttttcttttatcatccacttttagttaaaaagtaaaaaagccattaatgtgaaacattgtttatacataactgatgtgatacagtttaaaatgaatttttgtatcaaattatctgtttttacatttgcgtatcgaaaaatttaaaataaagagaaatttgtgaactcatccttatcgctctgaaatttttccaaatattttgaaaatgcttgtcatttagttgaaaaacacataatcttcaccacatatgaaaaatctgtaaaaataattactaatcatacatttcactcacctaattttttaataaaaatataataaaatacaattttgactagcaaaataaaaatggtttgataataacacgttcgcaaaatttgatccatgacctaaaaaagagtttgttgttatagtttccacaaaaaaattgggatactattcattttacatggcaagaaacgtaaaggaaccgaatcataataaacaaatgaaagatacttagagctaagcattaagcatcccattttgcgacaggatttgacgcattatgcttacctccattttaaaatttgatatctcttgtcaaatctttatttatatatattatacatgatatgtataaatatttcacgaagaaacaaagtatagatgcttcttattgtctgatcagatctctactttttattgagaatcttgtatcaaatatggttctttttgagccaaacacgccaactttcaataatcttcactttgctgactactacttcatgttgattaacatacttattccaaattacggctctaaagaaagtgaaactaattaaaacgtgcgtgttgatacttgatagtatatatacttcttacgcatcgcctgattagatatttgtttttattaggattccatgagagctatattgcatggttaattggataaatggtcagagagacgattaggattaaagtaaatgacaaggacatttttgattatttctcgattatcatggtgggtgtaatttaacatgctgtttaattgaacgaagatactgtactaatattttacacgccctaagtaagactcactttatcccattttatatagatttttttaagaaataataaacattttatcatgataaaaattcaaccaatagaaaaaatacggcagaattcaaatagtcataaaatatcaaattaatagttatgcatagaaactataaaaaaaaaaaaccttataacaaaccatcaatatattgcgacaaaggcagttataagtaatctcaaggtaatataacatgcttatacatccatattacaaaactcatggataaattataatgggttttctgcaaaagaacctttcaagtcaatctcgtttgcaagtttaccctccaaatccgagttatgcaagtcaaccccatcatctctaaagtcatccgcaatacagccttcatgtatatcgataacgtggcactcaataactctgtttaaaaacataagggttttatggaaaaaaaactctcaatataaatttgttttgcaaaataaaccttcatgtcaaataaatacagatcaaactacaatctaaaaatctcatgaaatataccccttttgtgtatcgatgacatgacagtcgatacccattcagagcatgtgcaataggtatagattttatgagtcgtttatttaagattttctgctatcacaattccattaataataattttatatttttatctattcactattctcgatcctggtttatctaaacatagtaaataatttttcttattttttattcatgataaatcaattacttatttaatttaacgttctataatttatatttcttttaataatttattcaattaatacttaaataataaagggtgtgctggtaaatttcaatataaaaagagtaagcatagttttttcaaatttgcataaatcatttgaactcgttattttcttaattatataaatggtatgtctttcactttgtacggagtatcccaatgtggggtacataaatattaagagaaaaaaagagatcaagcttactagtttaagcgttaataattatactgactgaccaatctacttgttcatgtagctctaatgttattaattaatatatagtcttagattgatctaattaatgtctgtgtatgatgtcactttgtgatgatggaagtcatgagagcttccattacttaactctctctctctctctctatctatttttacggtcatgtatagtgtaatcaacaataacaagaaaaagccaagttcaaagcactatactattagttaaagacaaatgcgataatgatacgattctgagcattacttgagtcacaatatatagtcacaccctcatcaaattctttctatcttaccaacttctgaaaaaaaagaaaaaaaccaaaagacaagtaaatacatatataaatatacactcacacacacacacatatattgatatacttataatcataaatc

SEQ ID NO: 15261 - DNA, 3000 bp, Unknown
  misc_feature (1)..( 3000): cDNA_ID_3096143_gDNA_ID_2926095_Annot_ID_196636 3000 nt of promoter + ATG
tgtaagcacttatttttaataaaatggttttaattgatttttatatttaaataaagggttcaattaataaattaaagaggaaatacatttttttaaaactattaatctaactacatttttaaccactcttaaaaatcattttcagatcattattggttatatattaagtttcgttgggacgaacacaaaaagacaattaataaaagaagacataaacattatctaaagatgtgtcttatcatttctgttagttgaacaaataaaaaataacaaagaccaaagagatttttatttttgaatttgttggtattctccttcttgcaaagatctaaaatagcacagctcctcgagtaacacgtgtcataatttcacgacttcatcgtatctattctcatctaaatttatggaaacatcactttcacacttccacaacaagccacacattccaaataaccaaaccaagctactaattattcttccaataagaaaatatttacatctaaatccttaatttataagagcatttaacctaaataaactattttgtaactattaatatatatgcaccctaccaaaaaaatctaatatctatgcatatttctatttatagaacagttaaataaaaaaatgtttagggcttgttctatgcaaactgaaagtctttttttatgttatgataagttcccgtttcttctttcttttttgggtaatattagaaagtaaccatagaattgaaaagaatgtagtaactaaccattgtcagtttatatgtgagtaaataaccttatgacggcataagaaaatacaaaaatatccttgcaagttgaaccaaaagcaagagtatgaaaatagcatgatatttataaaaaaggtgacattttataatgtgttataagaataaataatatgttatatgaaaaagtagcatgttgacagagaaagatttccagttataacgtgtaattcgaaaaagtagcatggtacaaaagaaaataacatacaatttaaaaagaaaacataacgacgatgattccaagaaagaatcaaaatcgaacaaaataaatagcacgatatttatcaaaaaagtgacattttataatgtgctattagaataaataatttgttatatggaaaaatagcatgttgtttgagagagattttcaattataacgtgtaattcgagaaagtagcatggtaaaaaagaaaataacatacaatttaaaaagaaaacataacgacggagattccaagaaagaatcaaaatcgaacaaaataaaatgagaaatcttctgcaaattgagggaaagatgatccgtcaatataaataacgtttagcagcctaaatttatcgaaaaagagacttggtggttgtgatggtggaagatgtggtggttgtggtggtggaagaaagagagatgagtggtggtttgttcggattcatcaaaagtttttcgccatataatcatctaagtgttctgtgtgattttgtaaaatagcatgtaatacatataaaattcgacaatgggtataaaagtaattgcaaatgatgaaagagagtgtattctgacaccatagttactttgttaattcttttacaattcatagtcattttgtgcatattctcttcttttttttaggtaagaatatgactttctatttcaattcaaaagttcttgttatccaacaaaatagttaccatggatttgtatttatactatactctaatgttattgaaataagatttagaacatctttaaatcgtaatacagtgacaatgattatgtcatttaaattaacaaaatttgatctataccaaaaagtttgataacacaagataacttgattgtttagattcaaactcaagcatcaaatgtccttaaagtagaacttaggaaaaatgattagcaactgcataaaaagactccatcatataatcaaactttaaaaatatcttattagctatacacaatattgtcattatataagcacatctctaaacaaacataaatcatattgtaaacaccataaccattatacttaccattttttttgtgtcaaaatccattatacttactatgtatctacagaaaaagacgccatcacatatggaaacttgaaaaatatcttattagctatacaaaatattgtcatcgtatatgcacatttctaaacaaatataagttatgttacaaaacaccataatcattatatttacttcttttttttttctcgaaacctattaaacttactatttatgtgtaatggttgccaaaattcagaattaaccgagattgactagtgctgataaaaaactatattatttatttttaaacacataattaaatacatttctccaacacaaatattttatatactattgaaaatgttttaaccaaataaaaataatatttactctcttttaaatattcaaaactctagctattttaacatatcattttgtaagaaaattatatgaaactcaaaaatcacaataactcagtgaataaaattaaattaaaagagctactcacttatgactatgaagagtcatgctcatgaacaaaagaattaaaaaaagaaaacacgtgctaatgcttctcctcctcctcctccacatcgccgggttttcctcttcctcccccgtgaaaactgcatttatatcaattcttcagattccccaaaccctaaattctctctctctcccaatttttctccgtcgttttcccccaaatttcctctcttttttatgtcttcaaacttcaaatccaatcttcttctctctccagctcattgactcaaccaaatctagatcaaagtttgaatttttaaaacctttcttttttttgttgcttccttccaaaaaaaaaaacgtttcttttttttttcttcttcttcttccttctgcatctgaaagtttgtatttttcctgggtttttacctttcttggtttgaatagacaaaagggttttcaaaattctgtagatttcattgttacaaaaa

SEQ ID NO: 15262 - DNA, 2324 bp, Unknown
  misc_feature (1)..( 2324): cDNA_ID_3096137_gDNA_ID_2926095_Annot_ID_196637 3000 nt of promoter + ATG
cttttggcggaattttaaatgataaaaagttatcttttcacttttacaattggggaagatgttgtttaatacgcaaacttttaaaaggtggtcatttaatacgttaacttcaaatatgcccatttaatacatgtaaaaattgttgaccggccatttaatacatgtaaaaattgttgaccggccatttaatacatataaaaatcattgaccagaccaaaatctacacgacgttatctaacattaacaaattctgataacagtcgttaactaatctccgttagtacccaatactgacgtcgttttaccataatcgaaacgggaaaaacgtcatttaatacactaacttttaaaacatggcagttttatacactaacttcacatgtgacaattttatacatgaactaaatgttgacaagccgtttaagacatgagaatgtgttgaccatgccaaaaagatataccactatctaagcctaaacattaagatttgggtcagattcggtttggatttattctaattcagttaattcagataggagagtttattatatgttaggattttataactattcacttcagatagatgttagattcatatcagttttggatccaaatctaacacctatcaaaactgaatagttataaaatccaaatggataatacactctcctacatgaattatctgaatccgattaaatccgaacaaaatccaaaccgaaatctgaatatctaggcctagacagtgatatgtctttttagtctggtcacatattcttatatttaaaatggctgatcaacgtttagttcatgtataaaatgatcacatgtgaatttgatgtataaaatatctacaatttaaaagttgaacaatcaaacgacattttttcccatttcgattgtggtgaaacaacattgtattgaaaactaacaaaaactagttaacggttgttatcatgtctgttaacaccaaataacatcgtataaattttaacttggtcaacgatttttacgtaatataaatgagtggtcaatgaattatacttatattaaattacaatatacgaaattcacgtactaaataaccagtttttataagttcgcgtatcaaactatattttttccttttacaatttacgttttttaagaaaccagaattagaaaactgttaatcatgcaacataagtaaatttaccaatactacataacatacaaaataaaataaaatatcatatgtttagttaaaccaattacataatgtttttacctttatatatagtatctttttgagaccataattctcttctattttataaactttcaagcatattatatacaattcagaaaatcctaaacactgcgtcgattttctccaaaatccaatcagcaccacctaagatcaaataaatagtcaacataatacagtaaatttgacaatttaatttaatctaatctcatttaattcacctttcctggatacacacgtacctcattatccaataaacaaacaaaatccatttttaaaagattatagtgtcgtacacaatcacaatttccatcgtcagcaaaaccaaaatcgtgaggcctataatttcccttcatctccaaaatcatttctcctcaaatttcttctttagaagattaaaaatcttctctctaatctctccactctttcataaatattttcctaattcttctaccttggtgtctgattctagcaccaaaccattttctcctaccaaaatctgggtttcgatcaattttaggtcttttgattcctacttgtctaatcgtgtaagttctgaatcaaaacagtcaaatttcatttcttcaatcagaatccattttctgggtcaaaccaatttcgatcaaaatcaattggttttgaatcaattttagatcttttgattcctacttgtcttaatcacttgaatccaagttttgtctctttttaaggttgtaataaaattggtttttgtaataaaatcaattgggtttggatcaattttagagctttttgattcctacttgtgtataatcttgtaatttttgaatcaaagttcaaagtctttttttcaaacagtaaaatttcgttttttaatcaatttcatcagaatccaatttctgggtcaactttcgatcaaaatcaactgggcttgaatcaattttaggtttttcgattcctacttgtctaatcagttgaatcaaagttcgtctcttttaaggttcgttgcttcaataatacgtataaagatttatttttgtacgatgtcttatgttatttttgttctctaaatgaattttgacagcttgcaatttcaaagatg

SEQ ID NO: 15263 - DNA, 3000 bp, Unknown
  misc_feature (1)..( 3000): cDNA_ID_3096156_gDNA_ID_2926095_Annot_ID_196632 3000 nt of promoter + ATG
caagaaaaatcataaatccaaaattctaattcagcttaagcattgatgaatatatatgaaattaccttgtttgctgcagcaaaaccacaacgcaagtatctccggtaaggattcgaatcggatttggaagttaaagccacgattccttctccgcaccaacatcttttaggcactccgacgactcttcctcttccacgaggacctgtagatcccgtcgaactagtagatagattgctcatcgaaattgaatttgggttttcaaatcgaactaagggaattaagatttcgatgttttagggttcttagagtgggaattatcgattgagaatggcttttgattatttggggatgaatattgggtcgggtctttaaaaggaattggatatattttcggtttacttacgaccaataattggtttggtatagggttaactcaccaaaccgacaaaacccagtctcggggacattaagctgtagaacttcgacttggtggggatataggcatttaacttccatattatggataaatagaccgagatgaaagaacgggctctatctggcgtgatatcgatagttcccgtggggaaataggtttttctcatatatttttttaaaaatatttatgcaggtaatgtggaagattaaaatgtagacgctcacatgattttgttaaagtatgtcttgctttctaattatttatcttttatgcgaagtaataagttaagctttttttacctctctatatatttataagatgagtaattctgattgaattttttgatagggattacggtctttttcctgttaatttgcataaacacgatgatgatttataatttgactactatcttccaatgaacaacaaaattataaggtatacaatattttttcttaaatctgatcgatagattctctttcactaatatattgagattgtgtaaatatttttgactgtagtttagattttaatatattggtattgttaattaaattaattgaattttaatataagtttttattaataattcttttaattttttcttctataattctgattttgataaaatttatttttgtcttattaatttatcaaatttgataattaatatatatattaataaaatacactaaaccccgacacaccatgtatacaactacatatactaaatatacaattatgtattcaaagggatacatcaattctgtaataaattcaatagtatccatgtttaaatgataccaataataaattgagaaacttttaaaatttataaattatacaaataattatttatagataaaccgaatatattaaattcgtaatatatacagaagtgaaactgataaactaattaaagcatgactacgttaagtgattcttagttaaaatttttttgaagaaattgaatatattaaaagcatttcattttcccatttacttaatgcaagcttttttaataccaatggagaattatgtaatctattctttttttttttttttttttttagttattagttttaagtacgaaaaaagacattttccaattattatttgtcaaattttataattcacttacatgttaatgacatacacgaaaatatacaaattttctatgtgtacaactacatatacaaaatatacaattacgtacccaaacgtacataccaactatagacatatattttccatgctacaaaccgaggaaactatatatactaaacaaaatatggtttgaccagagtaaatatatttagttggtaccaataatacatgataaacaactacatgtttaaagataatgaaaatataatagagtttctgtggaatacacagaactaagatttgataattgattaaattaaagataccgtgtgtagcacaggtactgacctagtatgtgattataatgaacgactctacaaaagaatttcatgataggcacctagctattttcataacacttggatctcctttttgaaaattgtgtggtgccataataattaaggatagacactcgtatatgtaacattcaagacgagcaagtgtcgttagctcaattgataaatattctaggtgaattttagagatcgccggtttaaatgacgcttgggacgaaactaatattatatgttatggtttcaggtctgaaataattacgggtttcgacccagcttcgacccaaaatctcctgtattcataaaaaaaagaaaaaaaaactattcgtgaccaagacgaacggttctgcgtgcaatattctaaaacgtatgattagtattacaccaataatctgtatataaatgcgttattttaaagaaagtccaaacctagtgtaaaaatctttaaactttttaccacttggataaaagactttcacaataaactatagtttaacaaatcacttatgaggtaatgaatctcatattttgctctctattgccttacgtcgaaggtaaaaatgtttgtgttatgctcctccaactacacatttctttttatctagctatctacaaattttgtgggagatgaatttaatttatggaagatgaatttaacttggtataaatttaacttggtataaatcccaactttaaaagatataaaacttctgaacttaaaattttaaatattaaacaaaacaaaaaatccctcaagaaaaatgtgaaaagatcagataattactttgttgtgtgtggaggccattttattttcctttatataatcaaggggccagccaatattatattattacatgcattgataataaagatgcacctagaagtaataatattctttttgttattactagacgacagaagccgtgcccttttgactcgggtctttactcttaacctatcgatgagaccacagaaagaaatataaaattgtaacgaacatattttattgagcttctttaccctcatatgtatgtaaatcttcttcaaaattaaagagagagagagagaaagaaaacttggaagaatctgtctgtgataatcatg

SEQ ID NO: 15264 - DNA, 3000 bp, Unknown
  misc_feature (1)..( 3000): cDNA_ID_3594434_gDNA_ID_2926095_Annot_ID_196624 3000 nt of promoter + ATG
ataggaaaggatgaaatcgagcagcaccatatttctatggttttgtactttagtccatgaacttttctctatttacagattatgcgtcaagcttttgaaatgatcataaaaaccctgaaattaaacagtttattttgatcaagtcaacccaaatttgattcttcattttgttcaaattcggggtgttacacaactcttatgccattgaaagttttactgagtaaaatgcaaatgactaacttgtaaaggttggcatcaacatgatcaataccatagccacatatatcttcccaaaatcgatattttattacgtaaattgtagacaaaatatgaaacgtttatattttttagaataaatggatctctaataatagagcatacaccatccacattattaaaaaaactcattctaattgttgtagattgataacaagtaattattattatttatttgatttaaaattttatcaattagtatattgatatgggtcatattaacctaaagaccactttctcaaataagagatcgttgtaacactttaaaatcgaattacacaaatttctcagatctcacaatagactaacaatttcgaattaagattaacagaatatcaagaaaattaaataacagcaaagcaagtaaaatcagttgtaaaacagatggattaaagcgtcaggtttagggaaggtctcaaaaaatatattaataatagttctgacagttaattaagattataagtgaaccgttctataacttaaatcacaataatataatcatttaactttcgtcacatcaactaactatgcctaatagtattgatcccacctctcattgtaaatccctagactagacaagcattataatcagatttgataatgtatgattatacttgataagaaccttgcaacccggccagtccataagcatctaaagcatgtgctttaggccaccgcttatattacgaatatatgagtactatgtttaatagattttggtagctaagatggttttgttgacttttgaaaattccttggtcctgtgttcaaacgaccgcaactacagtttacccctttccttcttctttttgctgcaaattgccttttttcttaacaattttttttcctttcatgttttatagtgtttgttttgtttcacgttcagataattgttatagtgttttttttcctttcatgttttgtagattaactaatattatacatttacttttagtatattttggaaagacgtaaaaaatgctttaggactggccatgactgctatacgtataatcatgcattatcaaacctgattataatggttaagtgatttaatagatgatgcacaaccttatagcccacgccaaacatatccactgtcatctaacttttatatcattccaacttgtgaattatcacagatatcattgtagatatcatctccattattatctttcaaagttccaaaattatgaagagtgtagttatggtgcatgctcctcctctctaaaggtgattttccttccaaatagagtgtaggagggtacctcctcttttcactacctaatcacatgtttgcacatgaatcaaataaacacattatgttagttaaatcactctgctaatgctaagctacaacttattcctatatatcattcttaaaaagctacaactcattcctatatagttaaatcattcctatataaattttactctatcaattgtttatgtcaagacattttgtctcaacttctctaacggctctaaaactatatcacagacatgagcttttttttttcatttctcggataaatattcacatatatctctctattcaacacctaatgatgcctaaactatgtttacatacaattaaattcccatataagtctactaaaacttcaaaaattttgtcttaaaaccttctatgaattgataaccgtatctaaacaaaccaaccacgccaaattaaaattaaaatttttctaacttctaacttctctttccttccagaaatgccttcacaatccaacgattacacttcatatcgatcggaaattgaaaaaaaaacaattaggaaaaagcaaaacacttcattttaaattcgacattaacatatttgtgaaattgtttcaaactcttacctccacacaaaagttgtcgtttcgtgctgctaactctttgtcctccatcgaatctttgctccgccttgaatttggaccaaccttcctgtgagacatccttaggatctcttttgcttcacaaacttaataagaccatttagatttaagaaaaatagacaataaattagattaactaccttactagaaacacttcttcaccggaaatcggcccatttgaagattttgtttttctcttgctgtcggaaattactaccgaaaaaaagaacatgaaacgagaaagagtttgatttattggtttcgaattggatttagagagtttttatttcgtctttttttttttaaaatcgaagataatactactataaataaatgaaaaaactcaatcatataaacttttttgcatcgcttttgaattattgtagtttaaaaaattatataataaaattacaatttgagttatttttgatcttttaaaagtcattataggtcctttctcaaatttgaaacagacatatattttatttttctcaatattattacaatgggaaacaaaaaaaaaagttatcctagaggtaacaactgtaaatcactcgtagaataagcgcgtcagagaaacatagaaaaaaaaaaaaaaaagtaaattcaatgaaagcagattttcagagagagggaccaaacaacccattgtccgatcaacaccgatctacttctccagacatgttctcacacgtgtctcttctctctctctctctcttccgattcaacttttcttctactctcactttagtctctgttatgtcctccattagcaaaagaaccacttcacttcacttcactttcacatcttgaagtagagatg

SEQ ID NO: 15265 - DNA, 3000 bp, Unknown
  misc_feature (1)..( 3000): cDNA_ID_3076789_gDNA_ID_2926107_Annot_ID_138553 3000 nt of promoter + ATG
cggtaacaaaagttacaagtgaaagaaatcagtaattttttatttattttagaagtgaatttggtttgagacaaacacgaacaataaacttataaatctacttaattaattttctgcttgctgatgagttctaaaaatttggtgctattaaagattaaacaaatgccgattgcagatctttcacgtggttaatcaatttataaatttttaaaacaaaacaatcgaagttcaattttatttttgtcgtaatcgaagttcaattgttggatacaggtctgacgcgatcgtgataagattttatatgctatttaaaagaaatcatgtggcctggccaaacacacaagtgttattagtaaaaaactatcttcagacttgtcttatataaatacatttatttgtatcacctattatgaattgttttttctccatatatatacgttgggttatatcttatttcaagtgggtagcttatactctctctgttcctttttgtttgattgtttagaaaaaacacacatattaagaaaatatattaaatgttgattataaatgtattatttttagtgttttacagttttctataactctaaaccaatgatagttaactatttttcttgaaaattacaattcaccaatactaaccaataaatattacatagaaaacttaaaaaattaatcttttagaaacaatttttttttctaaacaatcaaacaaaaaggaacagagggagtatttaattgcatcagttacaattttgagaaactctcttactaaaaataatataaacaattaataaataagtagagagaatgacaaaaataaaaaatagtttctctgcagagaaactttggagtaatgatggaaaaactatatgtataggtatgtgtttataattggacagaaactaaattatattaaatatatattttttttttttttgaaaaacttttaaagtatatgtaaatctattggtgagatggctaagtttctcttcttctattttttccttctggatattaagatctattatctcattattatatgtttaatccaagataatcacttacctgccggaattgattctcgttatatgtaaatcatcatgttaaacagttaaaaaaattgtgatatgatcaagtcctataaaagtttgaaatgatgatcaaacccaaacaaaattaagcttacaaaaagagaaaaaaataatatataagccttatgtttaacaaaatgtttagttgatataagtcgtttttaggatctgattggtgcacattttagctgaagaaaatgactcttaacgtcagctcaaaacataccaatcaagtaaaaagacaagagaaaataactatgctagctctactcttcatataactgtaaaaagaaagagatgttttcaccaatacaataggatgaaaatacttttcttttttgtttactccatttaaaagagttacttttactctatatttattatttataccaatgaaatcagacatttatatcagtttataagaggaaataaaactttaaagaaaagagagaaacatagcttttcgccaattttcactgtgtatctgtattcaaataattagagtaaaacagaaaaaaattatacccaatcttaacataattattttcagcctttatttttcagctaagatgatttaccaatcaatttttaggtgagatagttatgatgcctaataaattggaggtgcaaagttcaacaaaaattttacttttatgtttaattgaaaaagactgcttctcagtttaagaactatggcccatttatagatactgattaaaacgtggattgtaaaatgtgggcaatcaatattattttaaaaatgtggagccatagttattaactgtgattaaatttccccctcctccactttcacgcaaactaatatttaaaacagtcttaactgtgattcaagtaataagatttttcttttattattatttgacagtacttcctccgtatcattttaagtgatattttaggaaatgtttttagaatgtagagttgtagaggaaaaactagcagaaaaacaaaaatgcaatttatatatagtacagaaggttagtttaattgtgtttcgagttaaatctcttttttgatatggaaaattattctttaaattaaaatatttaacatttgactttggataggagaagattaaaagctgaaaagctggaacttcaacacttttgagaaaagtgagctacaatagtattaatcttaccatttactgataaataaatatatactttctgttcaattttaatagttttcaaatttattcttgttgcacataaacaacataggatatataatttttttagttaggaaatatatgcttttacgtttctatgaaaattctagatatgattataatttactcttaaaatatgaaatagaaaaatggagtggaatattattatttagaaagatatatatatatatatatatatatatatttgtttgtatgcagaatgttagaccaatataattagtggacatttctataaaaaaacaaaaaattgtggaatggatgggataaaaaaaaaagagagatcaaagataacattttaagatgtttttctttctttaattttcaacaattttaggcaatttagtagtagggggaaatgtatttctatgaaaatccaaatatatgctaatgtatgcaacaaggaaagatatagtaaccaaaactccacttcatattacaaacaataattatttttataaaagtattgacttgtcgtctgcaaacgtgattacgtgaaccttactggtaataatacaaaaatcacagctctaatttgccaacccaatccagatctctctagttctcaacttctcatataattattcattaatatatttattttgagattttggttgattttttgatatataaatattggacttgccattttctattacaaccatcaaatctcaataaagcaaaacgaacaagaaa

SEQ ID NO: 15266 - DNA, 3000 bp, Unknown; identical to SEQ ID NO: 15265
  misc_feature (1)..( 3000): cDNA_ID_3076789_gDNA_ID_2926107_Annot_ID_196648 3000 nt of promoter + ATG

SEQ ID NO: 15267 - DNA, 1208 bp, Unknown
  misc_feature (1)..( 1208): cDNA_ID_2996367_gDNA_ID_2926108_Annot_ID_138554 3000 nt of promoter + ATG
gatatctaaatttaatatgttagcgttactcaatattttatttaattttatatggttttttacacggattttaattcatctttgattgaaattttaacaaatgtcaatcagttttcaaactaataatgcaaaagcttaaatgtgaaagtaattttttttttggacaaatgctttaaatattataggtaaattctatatgtttgattttaaagttaataaattctatattcaaaaaaaaaatccttataaattataaagtacaccaccaataacctctttaagttaactattatagtattatgtttagaatgtagttggacatgttttatccgattaataccaattagaatagttaattatcaagtacacgctatgagcctatgagcaagagaaggcagcatggtccttggcctctttctcaagtcaaaatgtattttaataatcatacatgctgtaaacttcaaattcctactttttcagagtaaacaaaaaaaaatcagaaatcgtaaacatatccccatccctgaatacttaaccgtttgacattgagagtacacgtacaggaatatctagattgattaggtatatataatattttgtattaataatttaaaaaaaaaagtaattatcattaccagaactagctagttgacatctcactacttatgagtattttctaaacgcaaaagattatgttaggtgagttacgtgagtagtgcgcagtaatgcaatttggttaacgctgttcaatacaaatttgaaactagttgaatccagcaaaaaaaaaaaaaaaaattggcttccaaaatattgttaccataaattcataaactttcgttaaacttaaagtgatttatacacatagtatattcaaatatcgataaatgtattttgctaatcaaatcgtatattcttttataccagttttttaacgtcatctcgccaaaacaacaacaaatagatgtaaaataatgaaagaaaacaaaaaacaagatccatggggaagagtcacatgcatggagcatgcaactagcttacttcatccaattcccactcaaaattctctctttatatatacactttctctaccactacttccctcaaaacaagctaactcgatccttctcactaaagcgatcgtaccgatcttaatatctttagcgagcgagagagagagagatagaaatcctgagaggaaagagaggatg

SEQ ID NO: 15268 - DNA, 3000 bp, Unknown
  misc_feature (1)..( 3000): cDNA_ID_4359824_gDNA_ID_2926108_Annot_ID_196653 3000 nt of promoter + ATG
acgatatgctttcttcatcttcttctgatcaaatcaatcgcctcgctgtttccgtcgagggaccctacggccctagttccactgatttcctacggtaattcacttaaatcacaaacagagaagttcaacattctgtttcttccgacacaagtaacattgatgctctgtttttcttccaacacaagtaaaatgctctgtttttctttaagtgcagacatgaatctctggtgatggtgagtggagccagtggaattacaccgtttatctccatagtccgcgacctattctacatgagttcaacgcacaaatgtaaaatccccaagatgaccctgatctgcgcgttcaaaaactcttccgacctatccatgctcgacctaattctacccacctctggtctcaccaccgacatggcctcgtttgtagatatccagatcaaagccttcgtcacccgagaagagaaaacatcagtaaaagaatcaactcacaataggaatatcatcaaaacccgacatttcaaaccaaacgtctcagaccagcccatctcaccaatcctcgggcccaactcttggctctgtcttgcagccatcctctcttcttccttcatgatctttattgtcatcatcgcaatcatcacgagatatcacattcacccaatcgatcaaaactcggaaaagtacacttgggcttataaatcgctcatttaccttgtatcaatctccattaccgtggtgactacttctacggctgctatgttgtggaacaaaaaaaagtactatgcgaaaaatgaccaatatgtcgacaacttatctccggtgattatcgagagctcgccgcagcaattgatatcgcaatctaccgacattcattacggagagaggcctaaccttaacagtaagtctatttataacattttcatagagtaaaatgctgagttctaactctgtttattctattgtgtgaaacagagcttctagttggtttaaagggttcgagcgtgggaattcttgtgtgtggtccgaagaagatgagacaaaaggtagcgaagatctgttcttttggttctgctgagaatcttcactttgaatctattagttttagctggtgaattttaaattcagactgatgttttatcatagatgtttgggttacaaaagaactaggtggcttcgagagttcataactctaaacatgtcctagtactaatttatccgtctccggtctcctagtagactagtactaatattaaaatgtgaagcgatatatgagtcacatgttggcaggatttaaagtttgacagatctatatgcggtggatacgagttcggttagctgaaatttgtagaacaagcatttatgtcatgaacgtttctgaatggttttataatggtaattagtgaatggtttaagacattctttaggcagtcatgtagttttgtaatatcaaggaaaattggcttggctctgaatatgatttttttttctgaattggcttgttcgaatcctcaagatgattttttgaaatgtaaagttgcattttctgatataatttttttttgttgccttttataaataatcatcttttctttaacatttggttgccttttattaaaaatcatcttttctgattttttttggtcaactaatgtaacaccttttctttaacattttttttaaaaaaataaaacgcaaatgaagtcatggtaacccttttgactttcacaataccattcagtgacatctttcttacttaatattccgctgtcatgtcccactttggttaacatttgaggaatttcatcagtaaaaatcgaaaagatataaaggcatcaaaggagaaaccttaaaaagtcaaaatagagacacaagaagtgtttctttgtaggcttagatgagaagaagaaactaaggaaactgtattcctaaagtaaatactacttccttcattcctatgataatcaattattaaaagatatggagtcgcttaccaaatcataaaaccggtaacccaaatctaggaaattttattgtggaataaataacaaagcctttattttatttaaatagaacaagataaaacaccaaaaataatagctatgttctgaagtcttgaccaaactactgatacgggatctcacctagattacttacaatgtaggtgtaaaccgagtttttaaccaaactaaaacgaattaagcgacaattagttacggaagcttaaactctacatagattgatagattaaaaaacccttgaacaaaaaaagaatccaaattcagcttgaagtagattcaaccaaaccgaaataattttttaaaaatatgaattttgtttcagtttgaatttcatttgattttccaaaaattcacaaaccaaaccaaaaactgaatatcacttgtagctgtacctataaattattagagcattaaatctatctcaccaccgccaaactcaacgtgtgttaatcttttaaccctaaacttctaaattaaaaaatagacgacttttttacttatttcttcttcttccccaccatctttttttgtgctctatgttctcaactaatctcatttaattcaccacatacagctgcatcaaacatatatatatatgcatgtatttatgtacttatacacatacatacatatgatcatttaatgaaattcattaaatgaaactattcctttcgctgcaaaattaggtaccagtaaagcataaacaccactttaccacttcttgaattccaaatctgaaagctctgtcattatatatgtataaaccaatttaaacatatacatgtctcaccgataacaacggaggttcattaatgagggtttgattatgatacttacgagtgacagattgtgaatatcaaagagaagcttcttcctcccttttttctccctataaatttccgtagaaaaatcattcattcgcatctcttctcttctcaaaaatcaccacatttctttacttctctgggaaacaataataaaagagctac

SEQ ID NO: 15269 - DNA, 3000 bp, Unknown
  misc_feature (1)..( 3000): cDNA_ID_3096242_gDNA_ID_2926108_Annot_ID_196652 3000 nt of promoter + ATG
cataagtttctccttcatcgctctccctggtttctacatcttcttagtcgatcgtttccttcggtttcttcagtcacgtgaaaatgttcgcttgctcgctgctcggattcttccttccgacactatggagctcactttctccaaaaactctagtgagtaccttttgtccaattggctaattgtatatgaaaagttcacccttactggatattgatctaattctaaactattctttttgttttatagagttggtttatagcccgacgagcataatgtttgtgaacataccgagcatttcaaagctgcaatggcatccgtttacgataacttccagtagcaaactcgaaccagagaagctaagtattgttatcaagaaagaaggcaaatggtcaactaagcttcaccagaggctttcttcttctgatcagatcgaccgacttgctgtttctgtagaaggtccttacggccctgcttccgccgatttcttaaggtgatttgtttatatacactttctcaatcacctatctaataactttatattcagatttgttaagagtcctggaaacttgattgacttgcatttcaagaaacattgatttcatactttttttttttttgctttctaggcatgaagctttggttatggtgtgcggaggaagcgggataactccgtttatctctgttattcgtgatttgatcgccacaagccaaaaggaaacatgcaaaatcccaaaaataactctcatttgtgcgtttaagaagtcttcagagatctccatgctcgatcttgtcttgccattatccggtcttgagactgaactatcctccgacattaacatcaaaatcgaagccttcataacccgagataatgatgcaggagatgaagcaaaagctgggaaaatcaaaactctctggttcaaaccaagtctttcagaccaatccatctcatcaatcctcggaccaaactcatggctttggctcggtgcaattctcgcatcttcgttcttgatcttcatgataattattggtatcatcactaggtattacatttacccgatcgaccacaacaccaacaagatctattctttgacttcaaaaaccatcatatatatcttggtcatctccgtgagcataatggcgacttgtagtgcggctatgttgtggaacaagaagaagtatggtaaagttgaaagtaaacaggtccaaaacgtcgaccgtccatctccaacatcttctcctacctcatcatggggttacaattccttgagagaaatcgaaagtacgccacaagaatcgctcgtgcaacgcaccaatctgcattttggagaaagacctaatctcaagagtaatatatacatgaccttcttttaatttctctatctctatcttatatataaggaattgttattctaattatgttttttgttggtttatatgagcagaacttctacttgatgtggaaggttcgagtgtgggagttcttgtttgtggtcctaagaagatgagacaaaaggttgcggaaatatgttcctctggtttggctgagaatcttcattttgaatctatcagtttcagctggtgattgcgtatataactctgttttcactatgtgttgtgcaatttgcttgagttgcaagttaataaggtggccctgtgatttgacctatctttgtgtgctttacattgacttttcctgttttttgtttttctttatcctcttctaggaatattcagtgttaaaaaaaaaacttcctttcaaaagttccggaatatcctttttttgtttgtaacacaaggcatacagcttttgtaaattgtaaatgttgaaatataatactcatgttgggtcatatatatgattttatctctatttttcagttaaacatacttacgaaaaagtcaatttgctcgaaacgagttgggttatacacagatgtgagctacatgtaaattaatatttggatctatcagaatttatctgtcaaatacagaaatactatcttgcagatagcacaaattacctaattgttggttaaaaagacaagaagaagttacgtgaacataaaaaaaaaaaaccgtttcaattgacatgtcactaattattcgatttaagtaagaggaagtacaagaacaaattaaagaactcacctatatatacatccgtttatttaaaatctgtgttattgtgtaactctgctacaatttagtgggtaactaacaaaaaatatcatggttaaatttggtgttctgaggaaatttaatgtaaaattcataaatttacgtgtgattttttgataattgattattcaaaactcagtacaaggaataaaatcgaaaaagaaaaaaaaacgtaaagataatagaaatatacgtctacacgcatcggcgtacaaactcaatgattctgctttccgttgaatttgctaattttaagcccaaaactatagaattgcgttttcaatgtgaaatgaggaaattacacactttacctagactcttccacgagtcaagcctgttttgtaagtcagcagtaaaatgaagctgtaaatcacaaattaattataaaaagattcaattataatttctctggataatattattattttaaaataataataaaataatttcttattggtttatacaccagaccatattttcatataaatttaattattattttaagaaaataatattatgcatagaaaaatgacttaaatatcatttcttttatataagagtatattattttatatatatactctatatctttaaacatctcaagttctcaacatatttaattattggatcttttctgcatttagcataaaactactaattacattggtgtaattagcatatatatatgctggaaaaaaatatctttctatatatatgctggaaacaaatatagcacatatatatgggttttgtaaaattcattgcaaactccatttcgctttgttttttcttctcatttcttggaagttcatctctggtgcc

SEQ ID NO: 15270 - DNA, 1019 bp, Unknown
  misc_feature (1)..( 1019): cDNA_ID_3096248_gDNA_ID_2926108_Annot_ID_196651 3000 nt of promoter + ATG
gatatctaaatttaatatgttagcgttactcaatattttatttaattttatatggttttttacacggattttaattcatctttgattgaaattttaacaaatgtcaatcagttttcaaactaataatgcaaaagcttaaatgtgaaagtaattttttttttggacaaatgctttaaatattataggtaaattctatatgtttgattttaaagttaataaattctatattcaaaaaaaaaatccttataaattataaagtacaccaccaataacctctttaagttaactattatagtattatgtttagaatgtagttggacatgttttatccgattaataccaattagaatagttaattatcaagtacacgctatgagcctatgagcaagagaaggcagcatggtccttggcctctttctcaagtcaaaatgtattttaataatcatacatgctgtaaacttcaaattcctactttttcagagtaaacaaaaaaaaatcagaaatcgtaaacatatccccatccctgaatacttaaccgtttgacattgagagtacacgtacaggaatatctagattgattaggtatatataatattttgtattaataatttaaaaaaaaaagtaattatcattaccagaactagctagttgacatctcactacttatgagtattttctaaacgcaaaagattatgttaggtgagttacgtgagtagtgcgcagtaatgcaatttggttaacgctgttcaatacaaatttgaaactagttgaatccagcaaaaaaaaaaaaaaaaattggcttccaaaatattgttaccataaattcataaactttcgttaaacttaaagtgatttatacacatagtatattcaaatatcgataaatgtattttgctaatcaaatcgtatattcttttataccagttttttaacgtcatctcgccaaaacaacaacaaatagatgtaaaataatgaaagaaaacaaaaaacaagatccatggggaagagtcacatgcatg

SEQ ID NO: 15271 - DNA, 3000 bp, Unknown; identical to SEQ ID NO: 15269
  misc_feature (1)..( 3000): cDNA_ID_3096242_gDNA_ID_2926108_Annot_ID_138555 3000 nt of promoter + ATG

SEQ ID NO: 15272 - DNA, 2231 bp, Unknown
  misc_feature (1)..( 2231): cDNA_ID_3096257_gDNA_ID_2926109_Annot_ID_196658 3000 nt of promoter + ATG
  misc_feature (569)..(569): n is a, c, g, or t
  misc_feature (1467)..(1467): n is a, c, g, or t
  misc_feature (1480)..(1480): n is a, c, g, or t
  misc_feature (1497)..(1497): n is a, c, g, or t
  misc_feature (1501)..(1501): n is a, c, g, or t
  misc_feature (1529)..(1529): n is a, c, g, or t
  misc_feature (1562)..(1562): n is a, c, g, or t
  misc_feature (1565)..(1565): n is a, c, g, or t
  misc_feature (1580)..(1580): n is a, c, g, or t
  misc_feature (1589)..(1589): n is a, c, g, or t
  misc_feature (1614)..(1614): n is a, c, g, or t
  misc_feature (1622)..(1622): n is a, c, g, or t
  misc_feature (1639)..(1639): n is a, c, g, or t
  misc_feature (1655)..(1655): n is a, c, g, or t
  misc_feature (1687)..(1687): n is a, c, g, or t
  misc_feature (1702)..(1702): n is a, c, g, or t
  misc_feature (1706)..(1706): n is a, c, g, or t
  misc_feature (1709)..(1709): n is a, c, g, or t
  misc_feature (1753)..(1753): n is a, c, g, or t
  misc_feature (1797)..(1797): n is a, c, g, or t
  misc_feature (1814)..(1814): n is a, c, g, or t
gtcgacatttgccgactacatacaccttttcaccgcctaattattgaatgattggactcacgctgtataaaaacttacctataatttttatatcttcacagttatctcgtgagaattgttgatctttaaaactttcatcatgtgagcaaggctctagaaccattaagtctgtaaatttgtataccttttttaaagttgcataatgtccatttacaattacagccgctatttccccattttccacatcaggttgtttctttaatactgcataatgaccgttgggaacaattttattcatggattctccatttactacaagcccaaaaagttcatcagtattatgtgtcttaatatggaggtattgattcgatcctactatatcttgtacagcttcaattggagtacccgctgctattttccctatagacgggaattttagttagttcgtaattttcaagttctaattcacgtagctgttcagcttgagtcgtcaaaagaactttcattacatcgttaggagtaatgtcttgcttcattccgtgtacgatggcattgcgatcatcttgaantaattttagtacaccatcgacaatagcagcttttttatttttataagttgtatcaatatcagcttttgttacaccgaatacggcagccattttctcgagaacacctgaacttggtttagctctgtaattcatataatcacttagtgtacttcttgcaataccaatttgattagccaattcagattgagtcatatcgttttcttttaaatacttttttatatttttaactatagtttctttttgtaaatcagtcataatttcacctcctataatgattacgtttttaatataccatattacgaataattcgtaaagtgtacgttttgtgtgattttttcgtacttttgtattgaaattacataaatttagtaatacaatgaatctcgaaggaagggggttacacaatggattatttcaaaagaacattgtatgaactcagggtaagtgcaggattcaatcaagcagaacttgccgatatattagaagtatccccaaaaacattatggttatatgaacaagattcaactaacataccagacgaattaatcaaaaagtacatgtacttgtttgatgttccttacgaggatatattttctggacctaagtacgaaaaattcgtacagatgaaaaatcgagtaaaggaaagagcgaacaatttaaaaaatatcgcctcatgaaatttcgttataaatggatagtcctactgtcccacatacatataaatgcattgaggtgatagaggatgagtaaggaacaacattattcgtgatgaatatgggtatgtggtaaccagtaatccttacaacagaccagccgcagacattttccacaccgtcggtcccagctgcacggcagcttcttattcaaaggcaagacgacaacgcagaggtggtgtggnaggattccgggangttgttcttagttagtngtgntggagagtggagtgaagtaatgtgaagntttaaagtctgtgtaggtggagcgtgtggtgcncgncatcctcaggcgganaggctgacncccctggtgagggtaggaaactcanctcctgangtgcgcttctgacgcanggaggtggctccaccncccgggccgtcctttcttgtggctccggctcnggtccggactctccntgcngcncggtgcttttaagccgcctcccaccacaatcctattcgcattanctcccttcgctctctgtctgaggccattgtgtctttgaaccaancggcgtagttcaggtgnaaaggagcagtaatgtgcgatgcaagattttgtgggaagacgattgttggtagggggaatgcgtaaggaagcctgatcatccaagtgaagacgtctatggtgtgtggtagttgagaacaagatgataagtatgattatgtgtggacaagatcccgtacttgtggggaatctaacacgctacttgatcgcggaacacgatgttgaatgctttcgagcggtataaaaaggaagaccacctgcgccaacaggtgatttagagaaatgaaattcacagtcattatataatcaaatttggtgatgtaaatgaaactatttccgcaccaagatagagcgttaaacgatacatatgaacataatcgtgttgcgtactaccttgacatgggacttgggaagacctttgtggtctctgaatcaatg

SEQ ID NO: 15273 - DNA, 3000 bp, Unknown
  misc_feature (1)..( 3000): cDNA_ID_3096275_gDNA_ID_2926110_Annot_ID_196663 3000 nt of promoter + ATG
gggcttaggccgccaccgtaatccgcgtcggtccacgccccgaatcgatcggcggaccggattgctccgttccgcatccgaccaggacgcatcgccggcccccatccgcttccctcccgacaatttcaagcactctttgactctcttttcaaagtccttttcatctttacctcgcggtacttgttcgctatcggtctctcgcccgtatttagccttggacggaatttaccgcccgattggggctgcattcccaaacaacccgactcgtagacagcgcctcgtggtgcgacagggtccgggcacgacgggctctcaccctctctggcgcccctttccagggaacttaggcccggtccgtcgctgaggacgcttctccagactacaattcgaacgccgaagacgtccgattttcaagctgggctcttcccggttcgctcgccgttactaagggaatccttgttagtttcttttcctccgcttattgatatgcttaaactcagcgggtaatcccgcctgacctggggtcgctatatggactttgggtcatctacagcttccggacaagagcgaccgataaaatgtaatggatcaagttcaccaccgcatgtcggtacgctccaggcgtccttggctcggatttaggccaacgcgtgcggtaacacacgggagaccagcttccgtcccgcatcagcaaaggatggtgagggacgacgatttgtgacacccaggcagacgtgccctcggccagaaggcttggggcgcaacttgcgttcaaagactcgatggttcacgggattctgcaattcacaccaagtatcgcatttcgctacgttcttcatcgatgcgagagccgagatatccgttgccgagagtcgttttagacttcagttcgcagcacagcatccgcccacactccgtctccggggaggcgaatgccagccgttcgtttgcatgttccttgacacttttcgtgccggggttttgtgatatccggaagcaacgcgcacgacaagaccgagataaaagctcccgatcatgccgatacgcgaaaccacggatccggcgggcaaggaatcggctaagaaaccggcccaccgagagtggtgatctttggttcgcgggtcgttctgttttggacaggtatcgacaatgatccttccgcaggttcacctacggaaaccttgttacgacttctccttcctctaaatgataaggtttagtggacttctcgcgacgtcgcgggcggcgaaccacccacgtcgccgcgatccgaacacttcaccggatcattcaatcggtaggagcgacgggcggtgtgtacaaagggcagggacgtagtcaacgcgagctgatgactcgcgcttactaggaattcctcgttgaagaccaacaattgcaatgatctatccccatcacgatgaaatttcaaagattacccgggcctgtcggcaaggtgtgaactcgttgaatacatcagtgtagcgcgcgtgcggcccagaacatctaagggcatcacagacctgttattgcctcaaacttccttggcctaaacggccatagtccctctaagaagccggccgtgaagggatgcctccacgtagctagttagcaggctgaggtctcgttcgttaacggaattaaccagacaaatcgctccaccaactaagaacggccatgcaccaccacccatagaatcaagaaagagctctcagtctgtcaatccttactatgtctggacctggtaagtttccccgtgttgagtcaaattaagccgcaggctccactcctggtggtgcccttccgtcaattcctttaagtttcagccttgcgaccatactccccccggaacccaaaaactttgatttctcataaggtgccagcggagtcctataagcaacatccgctgatccctggtcggcatcgtttatggttgagactaggacggtatctgatcgtcttcgagcccccaactttcgttcttgattaatgaaaacatccttggcaaatgctttcgcagttgttcgtctttcataaatccaagaatttcacctctgactatgaaatacgaatgcccccgactgtccctgttaatcattactccgatcccgaagccaacacaataggatcgaaatcctatgatgttatcccatgctaatgtatccagagcgtaggcttgctttgagcactctaatttcttcaaagtaacagcgccggaggcacgacccggccaattaagaccaggagcgtatcgccgaccgaagggacaagccgaccaatgcacaccaaaggcggaccggccgacccatcccaaggttcaactacgagctttttaactgcaacaacttaaatatacgctattggagctggaattaccgcggctgctggcaccagacttgccctccaatggatcctcgttaagggatttagattgtactcattccaattaccagactcgaaagagcccggtattgttatttattgtcactacctccccgtgtcaggattgggtaatttgcgcgcctgctgccttccttggatgtggtagccgtttctcaggctccctctccggaatcgaaccctaattctccgtcacccgttaccaccatggtaggccactatcctaccatcgaaagttgatagggcagaaatttgaatgatgcgtcgccagcacagaggccatgcgatccgtcgagttatcatgaatcatcagagcaagccagagcccgcgtcgaccttttatctaataaatgcgtcccttccataagtcggggtttgttgcacgtattagctctagaattactacggttatccgagtagtagttaccatcaaacaaactataactgatttaatgagccattcgcagtttcacagtctgaattcgttcatacttacacatgcatggcttaatctttgagacaagcatatgactactggcaggatcaaccaggtagcattcatcgatcacggcaattccccgccacatcctctcaaacgcaatg

SEQ ID NO: 15274 - DNA, 582 bp, Unknown
  misc_feature (1)..( 582): cDNA_ID_3096271_gDNA_ID_2926110_Annot_ID_196664 3000 nt of promoter + ATG
ttcgttaaggagctgttgctttgttagtgtagaaacacttgtgtagaattggggattgttttttttggagtgatttaggggagggtcgaatcttagcgacaaagggctgaatctcagtggatcgtggcagcaaggccactctgccacttacaataccccgtcgcgtatttaagtcgtctgcaaaggattctacccgccgctcggtggtaattataattcaaggcggtccgaacgaccgttccgccgaacggacttagccaacgacacgtgcctttggagcctaagctcctactgagggtcggcaatcgggcggcgggcgcatgcgtcgcttctagcccggattctgacttagaggcgttcagtcataatccagcgcacggtagcttcgcgccactggcttttcaaccaagcgcgatgaccaattgtgcgaatcaacggttcctctcgtactaggttgaattactatcgcgacgcgggcatcagtagggtaaaactaacctgtctcacgacggtctaaacccagctcacgttccctattggtgggtgaacaatccaacacttggtgaattctgcttcacaatg

SEQ ID NO: 15275 - DNA, 3000 bp, Unknown
  misc_feature (1)..( 3000): cDNA_ID_3096292_gDNA_ID_2926111_Annot_ID_196668 3000 nt of promoter + ATG
caaaacaataaccattacgattttcgaaattttgctacaaagaacatcacatttattttttttttattttaaaatcacgtttttctgtagtttaattttcgcccttaactaaatcaattgctacattatctaccccaaagcatcatactactactaattagtttactctggtttaattgtctaaacgtccacttaagtgtaatcgtttccaaaataaatacaattctatatctttgttgtggtcagataatgttttacccaaaaactgatttaatcgtctaaatgcctcaagaaaatataggtttgacggaaagaatttatttttgacatttagaatattgaaatcaattaaaaaagacagactcacggcgatgtaatgagagttggtaacgttccaaccatcgacataaatattgaaatggttgagagggtcaggtcgctgtgtcctctccgccgctaacaccaatctggtcccattccctccttccaaaatttgcctcctcactcctaaaatcattttcttaaatttttatcagaagccattttttaatcaaatttgtataattgtatccaaaagaaaaaaggggtttctctggtttaaaagaaacaaaacttttaccttgaaatgaggtagaggatggacgatgatgacaagaagacgaaactgcatgagaaaaagaaaccaaactcgacgtgatcagaagcccaacggtgatcaggaggagacgccggcgactatgatatgacggcgtttcgctattaaccattattctccctatttttcttgtctaattctctctctttttttgtttttttgggggaggtttggtttctaatttctgaaactctaaaaaagggtttatcaatcaaacgtatgaataagaatcttttacttcttcaggaaatcaaggacaaagaagatgaaacgaaactgttccctttatttagattttcaccatccattgttgttattctgttttgttttaagttttcacctcattttcttagtttttaaaatccttaattaattactcttttaactcttattggctgtgtgacctaaaacttaaattaatgaatcacatttttttctataaaaccgattatacaataaaattgaaatgaaattggtaaaaatactttatactcagggtcgactcggagattagaaaaagaaacggagaatggcattaattaccaccaatactgacatgagagctactctaattttgtaacggaaaattcactccgatggaaaccagatcgctatcactaaaacctccaactccataacatttcaattccttgacattcttcatctcaaaatctgggaaatagcgcgtttgcgagacatctaccgattcgaaatccaaaccggaacgagaaacctggagaagaatcgaattgagatcctgagtgaaatcagagaacctgattcgcttcaagttgcggaatcgaaggagatgacgattgagtaaaggaacagctcgatcggtgacgacgaaagtagagcgaacgcgattggtgattgagaggaacaaggttgatacgagtgaaacagattccaggaatcgataatcgtcttcatcgatagctttgcagattaattcccaacattcttcaggtaaatccatggatgatggatttgatgaagattagctcaaatcaaactaacaacaaacacagtatgtaactaactatatatcatccttcaatttcgctggcagctggcttttaaccttatccaattttaaaatttcgaaactgggcttgttgtggctttttattccttaatggcccaataactatatttgtttttccaacagatattgggcctaacgactgattcatttcaaaatttcaaaactgggcttgtattgacccaataagatataaaaggctcattattcttgtaaggccctcaataagtctagttgttattcaactgtacagttgtgactagtcagtgaccacttgtgtcggtaattaaagtttgaagaggacagacatagagagttcacatgaataatgctcaaacttttggacctttgtcgtctgtatttttttaaaataaaaagaataaaattcttggatgcactctattaaaccatgacttgtcgttttgttcactaaatccgcatgaattgaatttggggagtgacccaatcgaatcatttggattactgtgcctcgatgcaaacaactctatcgagagattacacaatccattctcaatccatattctttccatatatcacaccattttattaatctgattaaaaataataatttcttttacgacaagatgtattttttttttcttggaaattaaaagactaaacttatgaatatgaaggaacattaaaaacaccatttatgtaattggattgtactttgattgctttatgtactttctttgtattcttgatttttctaatttaataaagatatagtataactatacgttaaagaaaaaggaacaaggctttaattaatagataaaaatctgttagctttacgtataaaaggtttaattctatttgtcaactagtagtatcagcatcatctctaacattgggatgttaaattgttgtaatggtagagagaaaatcaaaattttaaagattggctaatgggaagaaactgttttgctaactacacatcctcctcctcactctctccacaactccacgtcttatcaccacgtctgggattaggcactctttgctgctttattagcctttttgtccaccttttcataactgccacatgaagaccaaacacctaaaacctttgtccttctctctctctgtttcccaactccaacagtgtctcttgtctacatctcctccagacaaagataatctctagcatttttcaccatctccataaaagaattagatagaacacgaagcagcttcgtactctttatctctctctctctctctttttgtcttttctctgcatatttgttgataccagacaacaaaattaaatatg

SEQ ID NO: 15276 - DNA, 3000 bp, Unknown
  misc_feature (1)..( 3000): cDNA_ID_1814830_gDNA_ID_2926112_Annot_ID_196676 3000 nt of promoter + ATG
acagagaaaaaacacagaaaataagcaagcacggactccacctgtaaaaaccttcaaagttacttatgctttacacgccacaacacaacatagattcctaagatcaattagaaagaattaactctatcttgtcaagtcatttcttttatcaacagattcatatttagaaatgtgatgaaagtggatcgactcatatactagctattcgattacttctgcagaagatcttaaggctcttatgattgaatccagatcaatcacaaagaatgtgttgcaaagactctcacatttgactaattcaaacattaggtgtaaaaggaagctaacaagtaacatacataagacttttatcaacgagtgagcacatgggacttaaacaatgcaattgttgctagcatttgactatctctactaatctgaaattcctccttaattatagggatctacactagatacttcatccttaacataccaaaactcctaaatatagcaaaccaagatcagtcaaaagattattaagccataaatcaagtaaaccaaaatcaaatttaaacctttttgagtagctttgggacatttccatccatcagtagcgagagtgatgttcttaggaagcggcacattcggcggcgcaactccgaactgagtcccgacgagctcaacacgagcttgcatctgagtgacatcaccagcagtctgaatagctgatttcaaatccgacgaaggataaccagcgaaaacggtaccgttttcgacgctcaccggtaagctcgagccgtctgagagtacagcgtttgaagcagagacgaggatctctcggtgtgcgaatttgacgaagacacgccatgatttgagctcgtcgcggccgtggttgagcactgttatcacagattcgaaccggtagggttgatttgcggtgtcgttgggtgggatcttagatcctttagtgtgagtgtatgaaacgaatacaccgttgcatagatccgaatctgacggtggtgacggtgacggattagtagtgttggcgtcggattgtgatgatgttagaggaattgatacgatgagaagtgatagtagaagtaaccgagggatgaagttgggagctgaatccatggaaccctaaaatctcgctcttagtcaaaaagagaagttttttgaatttgaattttgtttgggaattgagagaagttagaaaaatggaagcttttgaagagatgatgactgataaagcgaccgcgatagtgcaagctgtaatgaaaaatgtttgtatttgcaattcaaattttcccctggagcattttttgttggctttttttgctttttcttttgttgaaaatctaagaaactttatggataccaatactcttacattattacataattattttcttaacaaaaataatgtatggatataatttcttaaaccctattttataagaaaaataaagattaaaaataaaataaaaaacacctaattgcaacaaaaacttcattttgtattcaatttttagatatatttaaaacgcactaaacaagtgagagcacatgagttctgtcgcaacataccaaattcttattttctgttcaacggtggtttgcttacttataaatggtatgagcatgagactatgagagcatcaatacatattccttaaaaccatccttgtacaactttccgagtcaatgagttcgtagactttctcctgaatagtgaagaaaatgttttgtatcatcgccaaattccactctttgcgatattaagctgtgttcagtgttctcgttcatagtcaggtgattaaaacaaaataacttcagaacatataagaaagcccaaaataataaaaagcccaaacccaaaataaaacgtatagcccgatacaatagacgatacatcactatcactagtactaagccaactagacataagacatctcccgtgaaatgtttgcttggtcttaactcttaagcttaattaagaagacaatgagataatcctcatgccaagttagatcactaatacactagtaacctccaatccattattaacagtatttctaatcatcggaccagacaagaatattaaacattcatgctactgtcttgagtgtctatgatctctttcccttaaactctcttgctgctgctgctcacaaatgattcgtccaacagaaaacggtgccgtcttttcagaaactttataaataatggataagaatactatgttttttactacttgggttttgtcacagatatcatctgcctcgtcagaaaggtaacagataaaaaaaataaataaaaaaaatgatgaccttatcttcaaccgctactcctacaacttggtaactgctgctctagatagataaatttgcatcttaaaaaattgtactatatttagaaagaattatacaaatactcagagattagttacaaagatggagaatgttgagagttaacttgcaattaattgaattgcaatcaactaaattacaatataccaaacgatgatcatatcgacatttgcggataagatcaattgtagttataagtccaaatcatatgatattggtctttcctttcttattgtcctagagagtttagataagaaaacatatatagtacttttaattatttctgcaatccattctttcccaatagtgcaattttcagtgtggaatttatatcccatatataaaattcatattcacgaaattcgttttatcttttttcttgaattgcggtgttacgtaaccatccttcgcatcataataaattattaataatttataacgattttaaggaagaaaaaaaagcttttaaaatcggagaattaatttcggttagttcagatttatgagtgaaagagcaaaattgcaaaaaaaaaaaaaagtcactgaagatttattagactctcttcttcttcttcctccttggcgcaatttcgcaatttcgcaatcgcatcagtcaattatcgaatcgtcctcccagagattaccggagaaa

SEQ ID NO: 15277 - DNA, 3000 bp, Unknown
  misc_feature (1)..( 3000): cDNA_ID_3096333_gDNA_ID_2926114_Annot_ID_196686 3000 nt of promoter + ATG
gctcaaaacctaagacattatccaccatcagtagatccacttccgccaccagggcgccacctaagctcgctttgaagtcctctttgaaggatttcggtgtcatcgcagtggcaacagcagcttcgatcgttttagctggaaatgcgatggccatggaggttcttttaggatccgacgacggttcccttgctttcgtaccatctgaattcacggtggctaaaggagagaagatcgtgttcaagaacaacgcagggttcccacataacgtggtgttcgacgaagacgagatccctagtggtgtggacgcaagcaagatctcgatggatgagacagcgcttctaaatggtgcaggggagacttacgaggttactttgacagagccaggctcttacggtttctattgtgcgccgcaccagggtgctggtatggttgggaaactcaccgtcaagtaaattgtctagatattctcttgttcgagtaggagcttacatattcatgatttataaatctaatttggaagagaatgttggattgataaagaggatcatataatgtttactatcataagttactggtttcagtggctcttttgtacattttaagtcacggtaatacaatccgataacctttctctgtgtccgtgtaaagagcttttagtttgaataaagtttgttttaggtgtatctgcgttgggtttacttgccttactttggtcccaacgtttgagtcttttagaggcccagcacgcctatatatcacaaattgggcctaacgactcatgttttttggggaaatataggaaacaggtttagctaggtcttacgcaaccactactgacccacccaaaaaaattgcattaacaaatcacgagaaagagagaatatcacgtgatgaaatcattattgattttaaatagcaaaaatgaagacggatcatggatccattaccaagggtcaggcagggaaaaatgtctatttcggtcgcctggtttgatttgatcttttgctgaaggaacagggaaagagacaaataacacagatcagcacactcatatatagctgatatgtaaccgagactctctttctcgtagagagttccacgttgaatatgattcccatatcttgacaagtctagttgcaattctgaattaattaatatgaatagtttacattggtaatgcgaagaaaaagctctcaaacagttgtcacattttgtgttctagagaaaagcacaaagtgattattaacatatttgaaggtttcatctctcttatctgtgtgtatatcagttatatataatgtttaaaatgtataaatcatgatttcgacaagcttcaaaaatagtttcttcgaatataacagctggagatggattgtcgtatgtgcattatggtctacagttggaattattagagtaaattatatatcgggttcataaaatacgataaaattggaccaatctataacgaatttgtcctcactcacacattaattatgtcgtgtgagcaaatagatcacgtgagtgatgttataaaaacaagctgtaatatggagtgatcaagattcgtgttaacatagagacagattgctaacacatcgtagacatgtgatacgatcatatgagtcatgcatgtgatacgaccaatttaccaaaaacaaaattttaatttaaacaataattgggatacctaaaggaccagctaattaattagttattaaatgagctcacggatcctggacaaaagtgtaacgattgtagtgcctttttttccttggtaatcagagttttatcattaggatataggttaatccgtatcaagaaaagtatcctacctaaacctaacgcattcgagaccataacaaaaaatcaacgtcacggacttatacccggaccgagagcttcaagccttcaaacatttcattggctatatttttccttaattcatgattcaatgttatactacacagtctcaattctatgaaaacaaatctgaagtcgtacggagagcgagagatacatacgattacagtatatgaaaaaatgttaggtgactttcacattaaaaatatattataaggagctggcctgaccctacaacgtggaaagagtgaaatgcttgtagaacttattaaggatatcacaaaaagaaaaatctctcagatatatgagttcaagatcgcaaaataatgatctcatggcatttatattcacatgtactcatgtagatctggatctataaataattgtagtttttcattgtgataactgatttgagaaaacaaatataaacgcaagaaaaattgtgatgttacaaggtgttattggattataatttaaaagtaattttgatgcctttactaaaatcatagaaagtaaataaattataaccaagtgctaaagagtttttataatcttgttattagttattctataatttagtgaagtttctcaaacaatatatctatttgatgattttttcatgattttattttgtgaagaaaaatgtataaaattataaactaataacacaatagtttaattcattaacaatcatacattttttttaattaaacaacacaaaaaatttattgactttattaaattttgattctaataaaatcagatttatgaaaattttaaaagacttttaatttacaaatcaaaaactaataatacattttaacagaaattaataaagttttgattgaataacaagagtcaaaagatctactaaagtttttaaaacaatatttcaatcacaaaccattttaggtgattttatttattttaatataatttctttctataggcagtagtgtggaccataaaattactgttaatttacttcctaaaaaggattatttaattgcaagattctaaactggattattcccacaatacacctttgtaaataaaaaccattaatccttcacaaatacagagtcgtgaacttaacgtctctctctattcctctgcttctctctttctccctgtgaaaaa

SEQ ID NO: 15278 - DNA, 3000 bp, Unknown
  misc_feature (1)..( 3000): cDNA_ID_3096331_gDNA_ID_2926114_Annot_ID_196687 3000 nt of promoter + ATG
ttactaaaatcatagaaagtaaataaattataaccaagtgctaaagagtttttataatcttgttattagttattctataatttagtgaagtttctcaaacaatatatctatttgatgattttttcatgattttattttgtgaagaaaaatgtataaaattataaactaataacacaatagtttaattcattaacaatcatacattttttttaattaaacaacacaaaaaatttattgactttattaaattttgattctaataaaatcagatttatgaaaattttaaaagacttttaatttacaaatcaaaaactaataatacattttaacagaaattaataaagttttgattgaataacaagagtcaaaagatctactaaagtttttaaaacaatatttcaatcacaaaccattttaggtgattttatttattttaatataatttctttctataggcagtagtgtggaccataaaattactgttaatttacttcctaaaaaggattatttaattgcaagattctaaactggattattcccacaatacacctttgtaaataaaaaccattaatccttcacaaatacagagtcgtgaacttaacgtctctctctattcctctgcttctctctttctccctgtgaaaaaatggactcggtggctctctactgcaccgctggtctcattgccggcgccgtctactggttcatatgcgtcctaggtccagcagaacgaaaaggcaaacgagcctctgatctctccggcggctcaatctccgcagaaaaagtcaaagacaactataaccaatactggtctttcttccgcaaaccaaaagagatcgaatcagccgagaaagtaacactgcttcgtcgacacgttctcacaatcttgtcactgatatctacgagtggggatggggacaatctttccatttctctcctcatgtccctggaaaatccgacaaagacgccacaagaatccacgaagaaatggccgtcgatctcatcaaagtgaaaccgggacaaaagattcttgacgctggttgcggcgtgggtgggccgatgagagccatcgcgtcccattccaaggcccaagtcactggaatcactatcaacgagtaccaagtgcaacgagccaagcttcacaacaagaaagctggacttgattctctctgcaacgtcgtttgtggtaactttttaaagatgccgttcgatgaaaacacgtttgacggagcttactcgatcgaagctacgtgtcacgctcctaagctcgaagaagtatactcggagatcttcagagtgatgaaaccaggatctttgttcgtgtcctacgaatgggtcaccactgaaaaatacagagacgatgacgaagaacacaaggacgtgattcaagggatcgagagaggagacgcacttcctggactaagaagctacgctgatatagccgtgacggcgaagaaagttgggtttgaggtagtgaaggagaaagatttggctaaaccaccgtctaaaccgtggtggaaccggttaaagatgggaaggattgcttattggagaaaccatgttgtggttgtgattctttctgctattggggttgctcctaaaggaactgttgatgttcataagatgttgtttaagactgctgattatttgaccagaggtggtgagactggaatcttctctccgatgcatatcattctctgtagaaaaccagagaaagcttctgaatgaatgattgagaatcttcttccttgttctcgtttttcttcttctttctttctaagttcatgttttgccccttaagaatctctttgtcgtcgtattaatgttatcactttgttgtttattgtatttttttttttcaatttgatttgtttaaattgatgatggatcactggaaattagtttttcgctcttcttaaatagtttctgaaagaattagccgggaaattctattggagtgatcctttacctttttaaaattttgtagagtttacaagtctctgtttagttttaatttctaagatcaaactcggaataaaccggattagcacgtctatagagttgcataaacttttagtatcatcaatgagggtagtttggtaagtccttaggtgtcacattgtgtctgtagtagtgagtcgggagtggtcgtgtgggattttgtgggctgtccgataatgcatatgttattgtcgtcaactgtctgatatattaatctatgtatcttttaaagatttgattttgatttattttaggcttatggtttgtcgcattgcggtagtgggtagcagcgtggtcgcacgaactccggcttaccttagaaaacgatattttatttagttatttagtttttttttttccaatttgttttgtgcattactaaaaagattgtgtcatttgtgtgtaaaagtttactaaaacactgggtcatttctatagtgggcttttataatgatgggcttaaggccaatttttattggtttacctcacttccagttccaccgggagtggatatatgcttatattcgtacgtgacatcaacaataatacgcgtatacatgtgtaagtcaatggaccaatttgggtcgaagctgtgaaaattgtcccaacttatggagagcttgcggaaatctttttggttcctttttggccaatacatttccgcttaccagttggaaaggaacccaacatggccgaattttaaccaacgggtcaaattaggccttacttggattgctgggtggaatttttcaagaattgccaacaactttgaacaaaaattaactttgaatttgcttttagaaacaggcaattctcacccaaggttcaacatattccctttttatatccccacggaaaaaaaatctaattcaacagtgaacacaatcccacacaagtttaaacaagtggacataaaagtcttggacccattttaaaacatctatccacattaaatcattcactgatctctaaccaatcccacacacactaccacaaaca

SEQ ID NO: 15279 - DNA, 595 bp, Unknown
  misc_feature (1)..( 595): cDNA_ID_3087735_gDNA_ID_2926122_Annot_ID_138621 3000 nt of promoter + ATG
aataaatctcgaatcggccagagagagcgtgtgacaaatgagttcataagattccggtatcgtcttccggattcctccaaatctccggcgaatttgcactctttacctctcttccggactgtgaggttttgttttccttatcaatcgaattccatttcgtgctcgtaacgtgattttggtagattttttttatgggggatggaaacttgtttattatctatagatgatgattttgttttctccatgagaatctatgcttttaaacttttttttttttgttttttgccttcggagctaactttttggtgctggtctctgtctcggttttctctccactaaaaagataaaaagctttttgccatctttttttttttctcaataatctatcacatcgttttttttctttgtttttttctccatttgtcttcattgagttcatagccacataattattgatttctttttcttttagtgtttctgttactgatgcgtttcattatttatacttctcacttgcagattcgaggattgttagtctcttgtgatgtgtgagtctttgaagcaggggatttttattgtattgaggaagaagatg

SEQ ID NO: 15280 - DNA, 595 bp, Unknown; identical to SEQ ID NO: 15279
  misc_feature (1)..( 595): cDNA_ID_3087735_gDNA_ID_2926122_Annot_ID_196695 3000 nt of promoter + ATG

SEQ ID NO: 15281 - DNA, 3000 bp, Unknown
  misc_feature (1)..( 3000): cDNA_ID_3100788_gDNA_ID_2926123_Annot_ID_138623 3000 nt of promoter + ATG
aaaaacagaggataaaaaacgaacaaacggttaaagctggcaaagatcccatcttccccacgctgtcaaattttgtcactacttcccaaaaaaaactctcccgcctctctctctccctctcccttcttattctcctccttcttctccttcaccatctccagatcccaaaatcttcatcgatcatcatcatcatgagagaaatcctccacgtccaaggcggccaatgcggtaaccaaatcggttccaaattctgggaagttatctgcgacgaacacggcgttgatcccaccggacgttacaacggtgattccgccgatcttcagctcgaacgtatcaatgtttattacaatgaagcttctggtggtcgttacgttcctcgtgctgttctcatggatctcgagcctggtactatggatagtatcagatctggtccctacggtcagattttccgtcctgataacttcgtctttggtcaatccggtgccggaaataattgggcgaaaggtcattatactgaaggtgctgaacttattgatgctgttctcgatgttgttcgtaaggaagctgagaactgtgattgccttcaaggtatatatatgaatcgatttctcccttttgatttatgaatctgctggtgctttgatcatattatctgattgatttgtgaatcaaaactgcaattatccgatggtttcgatcatttaaatctcgtctcgtgagtgttaatgtagttgcatatttagtaaccgatgatttcgatttcagtttgatttttgatcatcttcgcattgcactagtgaatctctcacatatcgtgttttgatatttgattaacgtttctcttcattgatctcttcatggtcatggttccaattacagtttatgaattacatgaacatgatccgtcgatgttcttgtgtttgatttgcgtttttatggtgtttctctcctgttgattactgtttaagagtgagctgttaacacttaatgattggctaggatttagattttgtctattctttatagtaaaaagttaacatcattgaaactaaggacaatatcctaatttggcggtagtgtattagtgtcccctaatgttttgttccagatttgtgactgtggatcaacaatatcacgtgaaaccttaaaaccatatcgaattttataataagaactttagggaatactcttgtgttgacactttcgaggtgaaacatatcactttgtggggatataattgaataagcaagtgggtcatgattggtttcagcaattgttaaataacatctcaatactttttggatctggtttaggtataagggacttctttagttttgtagtacattgtttcacacttgttcttaacatttctgtattacagggtttcaagtatgtcactctcttggaggaggcacgggttcaggaatgggaactctcttgatatcaaagatccgtgaggaatacccagacagaatgatgctcacattctctgttttcccatctccaaaggtctcagacacagtcgttgagccgtacaatgcaactctctcagtccaccaacttgtagagaatgctgatgaatgcatggtcctcgacaacgaagctctttacgatatctgtttccgcactctcaaactcagcactcctagctgtaagtaccatcaaaaccttaatgtttgttactttgttttcttggttcctaaattctaagagttcatatatatatatacattttgcagttggagacttgaaccacttgatctccgcaactatgagtggtgtgacttgctctttaagattccctggacaactcaactctgaccttaggaaactcgccgtgaaccttatcccattccctcgtctacatttcttcatggttggtttcgcccctctcacttcccgtggctctcaacagtacatctctctcacagtcccggagctgacacagcaaatgtgggacgctaagaacatgatgtgtgcagctgatccacgccacggacgttacctcacagcttcagccatgttccgaggaaaaatgagcacaaaggaagtggacgaacagatcctaaatgtccagaacaagaactcatcctactttgttgaatggatcccaaacaatgtgaagtccagcgtctgcgacattccaccaactggaatcaaaatggcttccacgtttgtcggaaactcgacttcgatccaggaaatgttcaggagagtaagcgaacagttcacggctatgttcaggcgtaaagctttcttgcattggtacacaggagaaggaatggacgagatggagttcactgaagcagagagcaacatgaatgatctggtctctgaataccaacaataccaagatgctaccgctgatgaagaagacgaatatgatgaagaagaagaacaagtttacgaatcttgatcttacaacacaaaccaaaagatgaaaaaacacagaagtcacatctctatctcttttattgaaatctctattcctactattaccactatatatatatatacatgtatcaagttgaagaatctgggaaatgtgtttgtttgtttgttactttatctttgtggttctctcttattgtattttgcaacttagtttcttctcattgcctttataataaagagtctgtccacgtatctccctctttagcctttatttcatagtattcaaaaaaacgattcttagaatcctttcagtttatagtatagacaaccaaaacattggaaacttggttgcatattcgttacaaaatcctgctatttctgctatataattatcaccccaaaaaaaggtttatcaaaaactacttaaattgataagaagagatgaatctattaaaaagcttctactataaagcacacatcttcttcttcatctctctttcgctctcagaatcctcttttaagtctctgtttcataaataaaactaataaagaagaagaagaaaacagagcaattaaagtccttaaatcttcttcttctccaattca

SEQ ID NO: 15282 - DNA, 3000 bp, Unknown
  misc_feature (1)..( 3000): cDNA_ID_2996375_gDNA_ID_2926123_Annot_ID_196701 3000 nt of promoter + ATG
tttgtagccttgtcgtttttatcattaacatgattgacaagactatgacctatatatcttattattatcattgctctctctatttgtttatattgattattactttttgagatttttcaatggttttatctctaactaaacattataattagtgaaacaagcttagtagaagtaaaagtattattctatgctaaagtacattgattagtagagtgtgtaattgtgtatacagataatctataaacaattggtgcatctgtatataaaactttatgatttatttattgtatttaataagtatatgaattgggtacctaactttctaaacagttccaaatttattcttaaatcaaattgcatatgatttttaaatattttgagacgattttattataacgcaaacaacagagtaaaagaagcatatgttgcaaattgtactatggcaagttcaaatcgaaacatttttgtgaaaatcaaacatgtgaaccaagcttctacagtttaattccctttcgtataatttaatttcaacaaatttattgatatccatctagaaattggtccaaagttctttcacccgtgagtcatttagtgataaagatgacatgatttttggtgataaattttccatcgttgctatatgtcgttatattattctcctatatgtatattatactatttacatcagaaaataatccaaagtttagagattcttttttacaataataaaatttcccacttactaaaaagagctccttttctgctgaagagaacctaaacctttattcccaaagttcattgagttagagcattttcagcgaatcacataagagatgctctcttcttcatcactaattgacatctcattgttttaaaggttgcacttgtacctgttgatctgattctcaatccacttaagttaaaccaaatagacacgagaaaaaagcacatttatttgttgctaagtatgcatatttttcagcgtttacttcttaatctaatgtatatcataagataatatctaaaagagaatgcacaaaagattattaatatgagaaattcgctgccatttaggaaggacctttataccaatataccgcaataataatagaacattggtccccaagtgtatgtcaaccccaagtgtatagatttctttaaagattaaaatccctttttgttgctaaagcacctgatatatttttctatcaaactaaaaaaattgttagcgggatgaagatatattcgccaagaaccatagtgcttgtataacggcagaccattaattcacaactattattattttattgttagattgttgatagaatcgattttgattgtggcagaatcgatcttgtaaaaactgcttaaggtgcttacttataattaagaaagattcacttatgtaagttaagcatattaatcatatcattcggcctaattcattaggaatattttgctattcgttttgccatcattaacaacaaaattgacacgttttcagccaaaagtattaacaactaaacctaaaacttcaaacattaaatagtttttagtatctttagtttcaaactagtgatttgtcctaatatcaacactacgaacgaatttatatacattgaacttttttctgaatcaccgattacaaaacgaatataatttggtatcggcagttgctattaatttgatcggtttggactttggactaatcacgatcaaatcttaaatggaccgaagtgaataaatccctaatgttttcaagagagtcacacgaacgaaacaaaggtaaaatatgaacatagagcgtggggacttgaagcagaaggtctgtatggtgacataccggtgagtggagtgtatgaatgaacgagaagtgagaagacaaaatacaagaaagagcgttgacttggaagttaaagccaaaaaaaccacaaggggcaaatttgtctctttaggaaaaggacacagacagactttctatacgggccaattagaaaaataggccctacttctaattaaagcccatttacttctctccttgtcttcttattcctcttttctccccatcacgtgacgacgatgctataaacgccgtcgattatataactggtgccgttgacagacggcgacagaagaaagaaagaagaaaccacaggctctagggaacgtaacgttatgtcctgtctatagcatttataacggtcagatcaacgccgtttagataaagatctgtcaatgttaaagaagagatgcatctctacaccgttaaatttaaaacgccgtgaacctcttatctattgatttttgtttgatgaagccaaaacaaatcgtgtcagaagacttatcagagaagaagaaaacgacgacgttcccgtttctccatgtctaataagtgtagtagtggcggctactaaaaactctaaagtttgactccagtaaaactgcctttctagtgtaattccagtgattttagagtttgaatagtgtgtgaccaaatttgaaagtacaatctcagcaatattattgatcactcgttataaaagaatcgaatgtaaaaatagccaatgagagactgagacgtatgtgtttgaccataagtcgtatagtttgtatctatctacctgcaagatcagcagatggttctctgatcaattgtaccttaattatcttttattttcgtaaaatttctctattcacaaatgataaatctacttaagacagtaaccataacaagatttacaagataatttgaaaaatgaacacataaaagtattttggcgcattatttttaataataacaatatttatgtaaagtcacataaaagtatatattcgctcacaaagtcttacggtatttagaacagtagtaccacatcgattctcttcatcttcttcttcataatatgccattgttcatgtctctgtgtcctatcgcataacactcacgctatcttattattttctctcgctctttctcactgagaggacactaaaaaaatg

SEQ ID NO: 15283 - DNA, 3000 bp, Unknown; identical to SEQ ID NO: 15282
  misc_feature (1)..( 3000): cDNA_ID_2996375_gDNA_ID_2926123_Annot_ID_138625 3000 nt of promoter + ATG

SEQ ID NO: 15284 - DNA, 572 bp, Unknown
  misc_feature (1)..( 572): cDNA_ID_2105101_gDNA_ID_2926123_Annot_ID_196698 3000 nt of promoter + ATG
atgcaaagttactgtattcattacgcattgatcgtcttcttctacgcactattattgaatttttgtttctcgatgttttcagaagtcataacatataatcaagggtggttgtagctagtcgtgatgaaattcgaatagtaaaagattcatcaaatggatcaagatttgaaactagaatgaatgatcgatacttgaaagctatcacacttaaatagttaaatggacgatataattcaacaatatcttaaataacattaatcattcactttgtagaaatttcaatttgacggtgctaacaacaatatgtgacatttttgtttgcagcaaaaaagtcaaatggtaaaaaaaaacatttttttaaaaagagagtatagtaaaaaaaacagaggataaaaaacgaacaaacggttaaagctggcaaagatcccatcttccccacgctgtcaaattttgtcactacttcccaaaaaaaactctcccgcctctctctctccctctcccttcttattctcctccttcttctccttcaccatctccagatcccaaaatcttcatcgatcatcatcatcatg

SEQ ID NO: 15285 - DNA, 3000 bp, Unknown; identical to SEQ ID NO: 15281
  misc_feature (1)..( 3000): cDNA_ID_3408947_gDNA_ID_2926123_Annot_ID_196699 3000 nt of promoter + ATG

SEQ ID NO: 15286 - DNA, 681 bp, Unknown
  misc_feature (1)..( 681): cDNA_ID_3087770_gDNA_ID_2926124_Annot_ID_138627 3000 nt of promoter + ATG
aatctgttactgtcctgccttgcttactatagtagacagtttctgtggttttgtaatacttaggcatgtgttaactatgattagaggacttacagtgagttaaggtgtcttcgtgtgtgtttctctcaaaatgatatatttgttactctgtatatatatatatatgctcgtggaatcctgatgagaatttggttacagctttatcaatcctctaaatagttttcaacagtgcaaggttttgtgttcctctcttgaaaatatagtctctgaagtgttaacaagctatgtatgactgtttgcagagttcaggcagcaatgtaaatgagctggagaatataagcaatgataggactgagtcaatagttcaagaacgtgaaggttccgacaactaagcaaactgcttcttcaatttggttcgataactgtagataaattgtgataaaatatcttttatttgatcaatcattacattattgtagagaatcctcggccaagagattggtagctagatagataaggttgacttggagtcaacttcttgcttagagttttgataaactttatagctttcttcatttattatagtaaacgtttttaactcattttttttccagagaatctgtacccttggcgttcttgtactggttcatcgtagatgattctcgacgactagttgttatg

SEQ ID NO: 15287 - DNA, 413 bp, Unknown
  misc_feature (1)..( 413): cDNA_ID_3087761_gDNA_ID_2926124_Annot_ID_196711 3000 nt of promoter + ATG
ctacgaatattagtaaattcggatctgataaaatcatatatatatatatatactgtataaacttttttctgaaatatggttctcatatttaaaccaagattcccaagttaaaaatattgtcctaatatttaatccaagattcccaagttaaaaatatggttcttttgtcgaaagtaaaaaagtacatattcttctcggagaaatgaatcgatcgtataaaatatagtttctcgttgggaattaaaatttaataaattcgataatttttttttttttgaaatgttaataaataacctaaaccaataaaaccgcagttttttcctcctcgccgaaacgaagaagattctccttctctccgtcagacaaatctacgaacaagcgagcctgagcttaagaccaaactcatagagatg

SEQ ID NO: 15288 - DNA, 3000 bp, Unknown
  misc_feature (1)..( 3000): cDNA_ID_3087755_gDNA_ID_2926124_Annot_ID_196709 3000 nt of promoter + ATG
ttgtagcaagtttgttgaaggcggcgtgaactctctcttctgtgaacagtctatggttttcataggaatctaatatctccattgcaatattcttaacctgccaatatgttcacacattccgatgaccaactaagcaagaccatgccttctagtaacaacagagataacagtgcatggacttacaatgttcatgtcgacagaaagctcttcaaaccatgtctttatatctttctctttgtgtacagaagcaatgtaaatgcaagcgagtgtgatgagaaacggcggatgtattaggatgaggtccattctgtatatgtcgttgacaagacccctacagtttccacacaaaactttaagcatcaagagagcatttacttttttgcctgcaaatcaaaacctgtttagctctcttccaatttcagatttactgtgttgacttattgattacaacaacacttgatcaagaagcttaatgaaggacaaaagttttggacacttaccaagttaaatgggtcatactagtgtcattgattccagaattctgcaagaacctgtaagtaatgcaagaaggataattaaaacgaaacacatagtatagtcgcaaaaaacatttcgacatcgacatatgagatcctaagcaaacaacttactcaggcagggatcggtatgggtggaatacaacaagatagaagttcaatgcttccaaaaccttcatctccatttcccgaatatctttaatctcatatctaaacttttcatgaaactcagacaaaaaaaactcaacaaagtttgggaagcagaaaacaaaaaagaatttacaaagttttttcatgtagaagacaagaagtttggcatgcaccactctctcttctgccttgcaagccaaatacaagcatgtaggagcaacaagccgaggctcatattccgtcaaactctttctgccaaaacacagtacccataaatcaaatgaccaagcctcgtgctacacaacgattaccgaagaagccataccttgtgtaaacaagacgcatatacgttactgcagttgcaacaactctgaatcatttttattcaaaaaaaaaaaaaaaaactctgaatcatagaagtgctaaatcagtgagccttgttcaaattgccaatgcctaatcttaatatgtttagatatatccgaaatcgaacaacaacaagaccatgaatatgaattaatatcacatacatcaaaactaaaactaagaaaaactaacaaaaaaatggagactggttattgttccatttattagacctcagcttaagaaagtcaaagagcttaaactaagatttaaaacaattataagagataattgatggacacgtgagagtgaaaaggcaatcaaaagtcttctccacactttttttttttttttgattttgtaacagcttttaatttcttgtttacagatgagatttaccaacctcaattaggttccatgtcttcgtgtttggtgaggttagattggttttacaactaaatgggagagaacaaatttggtgttggctactccaatgatcaatgtagtgaaggtgttcgatgaaatgactaatagagactttggggaaattacttcacctgaagtgtgttcatttcatagaagagctagtgaggaaagaatctttgttgacttgatactgaattctagaagcgattatgttaccaagcgttgttgccaaggatgctactgatgatttgagtgagtaaagatcttcctgcaggctgcagctttactaaagctgttgaagaaaagatacacagtgacgtggtggtcttgtctcttaatggctttctcttccggctgaaacggtatcctctgatttccttttgatttgtatgtaatcatctgtatataatatatatagcttattaaccgatcaatatgttgctattttgccctgcttgctaactgctgtagtagacagttcatgtggtgttgtaataccctcttatgataattttgttaagagtatttataagctcgtggaatcctgatcaaggattgtttatgttcagttcaagtttgattttgcaaacaccaggtttcaactatgttttctgattacaaccccactaaactgtattcaagtttcgtgtgcatatatataatataagcctctcttgaaaatttagcctctgaagttaacaagctacacatgtaatttttgcagagttgaagcagcagtgcgaatgagctggaggatccaataggcaatgataggattgagtcatcagttcaagttacatttttgcaaacaggtttcaactatgtccttcaatacaatccgctaataattttcaacagtgcatggttttgtgctcttgaaaatttagcctctgaagttagcaagttttattgactgggggatcgaataggcaatgatagcaagaaaaattgttaccagaaataatcctcttttctttctaagctcacgatgcagattagcaatcacgacaacgagttggcctgaaccaaagaacatagctgattttagaggtgatgtttcttgagattaacaggttatgggaagaagatgcctgggagtgaataaaaggagtgtgtccgcggaaaagaggtgagatattatggtacatacatcaagtaattattttttgaatttcattagtgatgtaaaaaagagagatatgaaacccagtggtcacaaattacttttgttccttatcatgaaaatggatatgttgatgcagaattgcagatggtgttggcctgacagttgtagacaagttgaaataatttaatagtatctaacctataaaatcacttttatttaatcaaaatgaattactatatatcttttctttaatcaaaaccctcagccaatagactcgtagctacataaggttgacttggggtaagcttttagctgattcttgatctatttttccgagaatctgtaccattgacattcttgtactggttcatcgtaggtgattgtcgacaagtagttgtt

SEQ ID NO: 15289 - DNA, 681 bp, Unknown; identical to SEQ ID NO: 15286
  misc_feature (1)..( 681): cDNA_ID_3087770_gDNA_ID_2926124_Annot_ID_196705 3000 nt of promoter + ATG

SEQ ID NO: 15290 - DNA, 3000 bp, Unknown
  misc_feature (1)..( 3000): cDNA_ID_2996383_gDNA_ID_2926128_Annot_ID_138650 3000 nt of promoter + ATG
agaaaagacaagcaacaaacatacgccaaatagttttgtatctcctctttggtcatcttcaaagcaatttagttcagtcaacttggagaacctagcttcagggggtaatttgatcaagaaatttgatgcggctgttgatgagaccgattgtgctctgaatgctacacatggactatcaaataacaggtctttggcatcagatatggcagtgaataattccaaggtaaacggtttcattccaagaggtaggcaacctggaaggcctgctgatcagccacttgttgatataacaaatcgcagagatacagcttatgcatacaataaacaagacagtacccaaaagaaaaggctgggaaagacagtctccgtttctcctttcaaaaggccaaggatttcatcctttaaaactccttcaaagaaacatgctctgcaagcttcaagtggtaatatatatgattaatttttttaagaattttttatgttaatctaattggttggttctcaggtttatagttttggtgtcctgtctattatcaggtttgtctgttgtatcgtgtgatacacttacttccaaaaaggtgctttctacaaggtatccagaaaagtctccaagagtatatatcaaggacttttttggaatgcatccaacagctacgaccagggtaaattctttttgtccctttcaactgttcctgcgttacatagcttttttcttcattcactcaaacacacttacgaggtggtttttagatggattatgtgccagaccatgtcagaagaatcaaatcaagtaatgcagataaatatgtattctgtgatgagtcttcttcaaacaaggttggagctgaaacttttcttcaaatgttggctgagtctggtgcttccttacaacatgcatccagaaagtactttctctgtcccttgaaatgttaaccgtgttatttgtttattatatcagaaaaagtgtgtgaccgttcttttgaagcttgcatgtgattgtcactctattagatagacagtgagtattgatgtctatatctattaacttatccatcactacgtatgcactaggtgggtcactaatcactataggtggatagtctggaaacttgcatgctacgacatatactacccagccaaatgcagaggaaactttctgacaatcaccaatgttcttgaggaactaaaatacaggtttcccagtctcacaacacaactcgttacttaaactcatgcaaagtctaacatggttaatctttcttaatagatatgagagagaggtcaatcatggtcattgctctgcaatcaagaggattctgagtggtgatgctccagcttcttcaatgatggtgctctgcatatcagctattaatccaaagaccgataatgattctcaggaagcacattgttctgatagttgcagcaatgtgaaagtagaactcactgatgggtggtatgaaattgctactgctattctgttacctgttttcttgactcatttccatatgattttttttaaaaaaatcacaggtactcgatgaatgctgctctggatgtcgtactaacaaagcagctgaatgctggcaaattgtttgtcgggcagaagcttcgagtaagttattttcatgcaagatatactttgttttgcaacacagattttggttagatcactgacttgcagcatgcttacgttcttatctcttatctgaagatcctcggggcaggactttctggctgggctaccccaacatcaccacttgaggtttcctagactttgcattttataagattttctgatatcttctcaggttggtttgttcataagagtttcattcaaccaaactttcaggcagtgatttcaagtacaatctgtttgttgttgaatattaatgggacatacagagctcactgggcggaccgactaggcttctgtaagtagctttatgctgtgggcctcactacatcatctgagttcttattgctttcatattgttatctttccattgatcgtttataatctcttccttcctcaaggtaaagaaattggtgtccctctggctttaaattgtatcaagtgcaatgggggtccagtgcctaaaacgctagctggcatcaaacgaatataccccatcctatacaaggaaaggtcaatataaatgtgtgcctgttaatgcattttggtcttctttatacttctcgcaaagcattatattttcttgatgtatacaggttaggtgaaaagaagtcaatagttcgatcagagagaatagaaagtagaattatacagctgcataatcagaggcaagtttccttataactgtagagagcaatttttagtaacattgatgtgatcaatttagcacatgcatctctttctaagaagtgtcagattaactcatcaaagctagagacattttgttacatacaacaatttggtggcgtcaccaagttgcagccttgaaccatttgctcttttcattttaaatcctaacatgttatagagcatataattataattatcatgcgcaaatcggcatgtatcaatttagttatatttatcatgtgcaattgtgcatgtatcagtttacatacattatattatcatgcagattatgggaatcttagcggttcaaacgtcttaaagtactgcataactacatatagtttgactatacataactacttatttatggctatgatcgtaaattttagtataaatgcaatattcactgttagaatacgatattcaaattcgttttcagaattcagagaacaaaaagtagataaagtgaccttggtttatgttgttttggtcaaatttatcgtttataagtttgctagctaatgttatactatttgctaacatataattaaatgttgagtgctaatctcgaattttttattagaaaagacaatctttgtatttattagaaaagcttctggccttctgattatggatggttttcccaacaaaagagccaaagattgcagttcgtcatg

SEQ ID NO: 15291 - DNA, 3000 bp, Unknown; identical to SEQ ID NO: 7467
  misc_feature (1)..( 3000): cDNA_ID_1817868_gDNA_ID_2926128_Annot_ID_138651 3000 nt of promoter + ATG

SEQ ID NO: 15292 - DNA, 3000 bp, Unknown; identical to SEQ ID NO: 7468
  misc_feature (1)..( 3000): cDNA_ID_1817865_gDNA_ID_2926128_Annot_ID_138652 3000 nt of promoter + ATG

SEQ ID NO: 15293 - DNA, 3000 bp, Unknown; identical to SEQ ID NO: 7469
  misc_feature (1)..( 3000): cDNA_ID_1817861_gDNA_ID_2926128_Annot_ID_138654 3000 nt of promoter + ATG

SEQ ID NO: 15294 - DNA, 3000 bp, Unknown; identical to SEQ ID NO: 7470
  misc_feature (1)..( 3000): cDNA_ID_1817857_gDNA_ID_2926128_Annot_ID_138655 3000 nt of promoter + ATG

SEQ ID NO: 15295 - DNA, 3000 bp, Unknown; identical to SEQ ID NO: 7471
  misc_feature (1)..( 3000): cDNA_ID_1817855_gDNA_ID_2926128_Annot_ID_138656 3000 nt of promoter + ATG

SEQ ID NO: 15296 - DNA, 3000 bp, Unknown; identical to SEQ ID NO: 7472
  misc_feature (1)..( 3000): cDNA_ID_1817848_gDNA_ID_2926128_Annot_ID_138658 3000 nt of promoter + ATG

SEQ ID NO: 15297 - DNA, 3000 bp, Unknown; identical to SEQ ID NO: 7475
  misc_feature (1)..( 3000): cDNA_ID_1841836_gDNA_ID_2926128_Annot_ID_138659 3000 nt of promoter + ATG

SEQ ID NO: 15298 - DNA, 3000 bp, Unknown; identical to SEQ ID NO: 7479
  misc_feature (1)..( 3000): cDNA_ID_1817832_gDNA_ID_2926128_Annot_ID_138663 3000 nt of promoter + ATG

SEQ ID NO: 15299 - DNA, 3000 bp, Unknown; identical to SEQ ID NO: 7480
  misc_feature (1)..( 3000): cDNA_ID_1817821_gDNA_ID_2926128_Annot_ID_138666 3000 nt of promoter + ATG

SEQ ID NO: 15300 - DNA, 3000 bp, Unknown; identical to SEQ ID NO: 7473
  misc_feature (1)..( 3000): cDNA_ID_1817809_gDNA_ID_2926128_Annot_ID_138669 3000 nt of promoter + ATG

SEQ ID NO: 15301 - DNA, 3000 bp, Unknown; identical to SEQ ID NO: 7482
  misc_feature (1)..( 3000): cDNA_ID_1817799_gDNA_ID_2926128_Annot_ID_138672 3000 nt of promoter + ATG

SEQ ID NO: 15302 - DNA, 3000 bp, Unknown; identical to SEQ ID NO: 9186
  misc_feature (1)..( 3000): cDNA_ID_1818549_gDNA_ID_2926128_Annot_ID_138673 3000 nt of promoter + ATG

SEQ ID NO: 15303 - DNA, 3000 bp, Unknown
  misc_feature (1)..( 3000): cDNA_ID_1818556_gDNA_ID_2926128_Annot_ID_138675 3000 nt of promoter + ATG
tgttttgcttttgttttctttagagagaaacaagaacacgtttaagagcatgatgtcttgataataaaacttgggtgattctcttacaagatacaaacacacatacttattatagttttacttgaaacacttacacacacaagcatgctcttaaacgcataattaactctgatttcttgcaagctactctactacatattgggactctaacaacaagcatgctcataaacacaatttatgtttctttttatttcctcacctactttgcagtttcaagatgcagaatctcttaatttttttattatagacataataacttctgtgaaagattgtaactaaatgtatatgttttattttggttgcatttggtacttgagaaagaggaactagtgtcaccagaataactcaaactgcacgtaattatcataaacaataaatatacaatttacaaacatcatttcagaatccattttgtttaatgaggttgaacctatcaccatataagctatttagaactcttgttgaatatgtttgtgaatccattctattgtgtgtttctttgttttgtaataactctggtcatgagttttgagtagagagacattaaaaaaagaagcacatttacaaaatcctaaaagttcattacaaccatcgaccaaaaggtttgttagacaacttatcttaatcttgttatagctaattctcacacgagaatccaaaagactaaaaatccataaacgtagatagaaagataaaccctaagatagataacaaaagagggcattacatccttagattaaccctatacaatccctaagatagcttcttcttcttcttcttcttagttggtttgagcaagcaccgaagtcacatccttcaaaacatccatctccgccaacaacaactcacatttcttagcgtccacaaccttcatcttctcttgaatcttcttcttagtctccagagacaccttgctccacttcttcttcacagaatactcatccaaaccgagattcgcgataaccggaacaagaaaagactcctcaaaccactccgaatctgctccaagaatcacttgctcatcttctataaccaaaggtttctccaccttcttctccttgctattagccttacccttaacaagaatagattcatctttcttcacaggagattcaacgttcataccatcagatccccaaatcaaaacagccaaacccaaacatttcttatcatgattcgattcaccacttttgttcttccggttaacaaaatacttattctttaatcttctaatcttgtcaaagaactggacatgactaacatcaaagcttatagatttcttggcgatatcaaaaaacgcattcttatgatcccaaggacttgtacctgtctcagctttgaaatcaatcactgcctgtagaagagagatctcatcttcttcactccatactctctgaggattcgcctttttgttatcgtcctctttcttaactcttttgacatgcatgtcccttgaggtgcttccttcaccagctcgcttcttccctgacttcaccgccggtgattcagcagcaccttctttcttcttccgcctggttaagacgaatgactgcttctctgagtcatcagaagaatctgtcttagaattcacagcggcggaaggagattttagggttttagaggaaggaactgtgacaggatctttgggtttgctttcttcagaagaagacttaaagatctcttcagaagaactctcaacttcgcttgaagaagcggttgctggactttccaaaggagccattggattttcttctttcagattctcgggtatgagtaccaagtgggaactgaagggacaattttagggtttgtgagttgcgagactttttatttttttacactgtaacatctcttatatttaagaaacaattaaagtaaataaagctcaacaacaaaaactaattaagcccaacaaaataaataaaccatcatccttatatgtaacactgtaacatgggaaaaaaaaacaattttttgcccaaatgtataagaaatttgtataacaaaattcatactagattttcttgttgtaattcttggtatacaaaatgaaaggtttctttgttgtaaaacaaaaatatatgtactaaaagtaattttacaaagtcgctttatatttttacatttagaaagatcatttgatcaagtgggaaacctttattgaaattaacaaagtggaaaagattgtaagtagtgaaatttagtgtcatctatagacaaaaaaaatgtaaattagaatttaggaatatgaattcggttaggattagtcgattaggtttattgagtaaactcaataaaaattactgtagtaatacttcagtactcggttcggtttatagttaccgaactgaaaccaaacgattattctaatttaattgaagttaccaatttttatcttaagtttaattaaaattattgaaaaatatgaactctctcttacagtaaaccgacctgaaattggtttttggttccaatttgacaccaatattttatcttgaaccaaatcgaaatttatgctattaaaattgaaccgagccgaactttactttcggtctacttcggttcaagaaatttcaatccaatacatatgaattctgaaagtcctgaaccgaaccagagtgtttaaccacaataaaagtctcttcaatggtctcttcttgagtatatcaatggtctctcatagtttcaacaacaccaataaactgtcatcttcaagttggagtttattacactcgttccttcaagaaactgtaccgtcgactttcagatttagccatttaggacttctcaagattttgaaaatggcgcatcaacatttcttcaagcctcttcttcctggcttccacgcctccttggtactctctttctcgctctttcccttcttctatctctgtctatgtctctctgagaagctaaagatgagtctggttttgtatttgc

SEQ ID NO: 15304 - DNA, 3000 bp, Unknown; identical to SEQ ID NO: 9200
  misc_feature (1)..( 3000): cDNA_ID_1818559_gDNA_ID_2926128_Annot_ID_138676 3000 nt of promoter + ATG

SEQ ID NO: 15305 - DNA, 3000 bp, Unknown; identical to SEQ ID NO: 9187
  misc_feature (1)..( 3000): cDNA_ID_1818567_gDNA_ID_2926128_Annot_ID_138678 3000 nt of promoter + ATG

SEQ ID NO: 15306 - DNA, 3000 bp, Unknown
  misc_feature (1)..( 3000): cDNA_ID_1818571_gDNA_ID_2926128_Annot_ID_138679 3000 nt of promoter + ATG
atccaagtcatcgatctgcagtgggatcttggatgctattgctcgccactgagcacgtgacttattcacaatcacctatatatgttattatacttcagggtcagattcaaacaaatgagataattaaatcattgcgagtgttaactcagtgtggcattatgaaagctagagcattagcttctgcaatatgaagatgaatagtgagaaacagataaactaacctgactcgaaaacagtgaattgggtaccaaaaccggaaatttttctgcattcaacaaagatgttgtcgtaagtcccatttcaataacttgaccttctacggatccagcctgcaaagtggggacaaggaagacactatatcttgagaaaaatatgagtgagaactgccaatatatttgcttgctctatgaaactaaataaaagaagagagcagaaaagaaaaaaaggttcaactaactttgatagtatcacccatagagaaaggccgcgagaattgcattgacagaccactcagcacattaccaaggatatctctggcagcaaatgcggtggctacccctgaaaacgcaaatcaaaattggtatgttatgagcaaatactatagaatcagtaggatatctaaaaatgttagcaacccctgaaaaagataagactatatgcttgtgatggcctctagaggcctttattttctgttgaatcctagcaattagcattataggctgagcaaaacgactaatatgaaatggagaacattagacagacctccaactccaccaactgtcaagatagattgaacagctacaccacatgcttcagcagaagccatcaaaccgatagcgaaaagaccaacagatgatactttgtctaaagtcaataccttctccctatcaagcccaccaaaactcttagccgacaacattcgggtaatcacattggtcttccaccgatataggaaccacacaagtgagagaataaccgctcccttcacagtcggggaaaagtattgagctgctatagttgttggcgccaccattgcagcactgcagcatatcacattcatcaagtctatctattttctacaacatacatgtcaaaggaataaagctagagagactcacatttgtgcaaaagcaatgaaggtcaccaagtaacgagcaggatcctctaaagctccccaaaagcttttctcataaggaacatcttcgttagagaagccaacgggaagcagtttagcggaactttgcatagcataagtgtgaaaccttctaagaatcctaggcatcacaacccaagcaaataaagtaccagtcatagtgagactaacaggaactataacatctttaagataagggttagagtcaaggaactgctgaacatgagggatcatctcatcagagacatctttagtcttctttgcagtctcagtaacagcatcgacactagtctgcaacacatctttagctttctcaacccaatcattcccattcccattcccatcaccagagccagtaacaccagaggctacaatacttccgaaatcatcagatttggagctgaaagctcgtgcgtacgaagaatggcctaagtaattgaaaggcttagcatcattatgcaggcgtatgttcgatgaaaaggagatcatcgaaggagaagcttttggtccatcaagaaggtttccgcaagtaaaggccctggcatgagagtttaggagaccagaacacgattttgcagtggcatgaggttttattgatctttgaattgacttgagaagcgataacctaactccggccattgatctacaaatcaaaatcaaaaatcaggatttagaagtcttaatcacattcttaaccaattgaagaagaacacagtgttcactaattaagagcttgctagagtttcgataatggcggaccagatcaaaaattgaagtcaatggaatgtgaagagatcatagaacttgtatattacctggagagacttgaaggtagctagattcttagccaaaattctcgctgagagataaagaaagaattctaaattttgcttggcaaagagggaaagaagatgaagaagaagaagagacaggtttatttcgtcaactctgcttcttattcggtaacatcgacgtcgttttagtcaccttcaacttctgggccttttgggcctaatgattcaaatttgttgggcttaatgcaagtttgattaatttggtgcaaaaccttattaagaaacacacacacacaaagttgtgaatttgtgaatttacttaactacgtacatatatataatcattaattaatcacggtgtttgtcaaatatatatggttacaaattcaatatgttttggacaaaataatatgtgcctaaatctgcttataaatgacaaaatatatacaaccactaaaaatagaagagatatttatcatgaattgtactccaataaaaaaggtattgactttagacaaagtatcatcctaagatggagtattttgcaaatacttggctacaataaaaaaaactgatagatttgtgtgaaaaacgctattttcagttattaattactgtaatcattaatgttgaaatgtcgttttccatcttatggttttattcttgtggagaattaatgttccaaaaacagctttgactctaataaattgggaaatataaaaaggagatttctttctaaatccaaaattttttttaactaaataagattattttagacatcatcaaaatatatcttgtcttaaatttgagttaagttgtcttaattaaatttctcggagtagtgtaataattttcatatgtaaattaacaattgacagcatcgagacaaaccttgcctttttggcattagataatacagattataattgtaattaaaaaaaaataaacttggtttcatttcttaataaaaagccttcaatctcaccaacaccaccactgtcacaactcacaaagcaaaaaaaaaactagtcttcttctatgtcaatcagagcc

SEQ ID NO: 15307 - DNA, 3000 bp, Unknown; identical to SEQ ID NO: 9188
  misc_feature (1)..( 3000): cDNA_ID_1808340_gDNA_ID_2926128_Annot_ID_138680 3000 nt of promoter + ATG

SEQ ID NO: 15308 - DNA, 3000 bp, Unknown
  misc_feature (1)..( 3000): cDNA_ID_1818575_gDNA_ID_2926128_Annot_ID_138681 3000 nt of promoter + ATG
gtttgggagattgtaatgacactgctcaaaggtaattatccatttggttcttcactccactttcgactattgtctgcttccttcgttagtttcggtgtttttttctagggttttactcgtatttttgataatcgggtaatttaatttcgcccgaatccaaatgccgggcgacccggttataatttttcaattatcttattttcgattatcgtctaggtttaatagctccgtgagtagtaatcaaagtctagtctccgtagagaagcttaatctcaatgcggcggaggaggataagtacgctatatcgccggaagttgaagacccaatggatcagagcgatgactatgacaagaaatccgaagctcttgagcctaattcgccggtcaaaacttccggtgatgatgaaaaagtggttgtaacaattccgacggcgcctaaacgtggacggccacgtggttcgggaaagaaagtttccgctccggcattgaagaatccgtacgagttttactattactctggtttcgggccacggtgggggagaaaaagaggcggctccgacgacgagaagatggttataaacgatagtaaaaagagtagaagtagcgctagtagcagtagtgacgaagacggtcataaaacggcggcgtttggaggtgggagtgtgagtttcgacgagtttgattttgtggatgaggattatgacgtaatggaacaagatcaaggaagtgatcatgggaggaagaaaaagaatgagaagatgataatgatgaagaagacgatgaagaaaggaaggaagcccgtaaaggaaaggtctttgaaatccctcatgtgaaatattttatggcttttaagggtatttccgtctttttctacttgttgttattgtctggttttgttggtacgggggtttggtctgtttgtttagtttgggaacatttgtaggaagattttctacatctctgttgtatttgttagatgactgttttagttgttctttaaattgtttttttcatagactctgatgttgtctacacagatttaaagagtcttgaacaattttcaaatcaccatcggttaaacctaattgtatacatgtttcgaatcctatcctaaattgttaagttaaaagtaaatatgagggtcttttaagagtttaacaaaagatatagctttacatagaacaatttaaaatatagaaggttttaggagcgtctcaattttcaaatttaaatttatatcgattaattgaacatgtacattatatgattacaatctatcaaatgtataaaaatattacaaaagataataccttttaattttatttcagagatacaaataaaatgatataagagtacactgttttgcggagtatcataatctgaattaattttaataattcaaaatatcttttaatatatatatttatcattatataaaaaatctcaaaaaatattttctgatttaatattactaatacatgataacaagtaacaacatgcatcatattagaaaaataatatactcgcaaaaactttaaacctaaatttttttgtcctaaagaaacacttttatccctcaattttgtttatatgatgatgttggagcttgtggatctcctaatctctcagagatttgctctgattttgtgcgaagtttgttttttatatgatgatgatgttggttgtcggattaattcctccacaaaaacacttaacattcccaatttctcttttcttcatctttattttctccgattaatttttctgtaattttggggattttgtgaggttcattttgtgtttgaattgatttgatctattttaattttgaatatgtatggcaaatctatttttttttttaatttcaatctgaaaccagagaagaaattatcttaagtagagtacgagttataggtttccataagattgtgatttattcgttttcaccaaccactaaaagaaagagacaaaaaacacgttgcattagttttgttggcgtctttagcattttcaatgtagtctatattatacattggttcagcttgaaaatttgcaaccttgataattaatattgggattccctataattactggttcgcatatctcactcgacaactcgtatttaacataattatagcaacaaatcaccacaaaatatactgaatttagaagattttccataaaattcaataacatctatacattttttttgccgatcaatgcaggtttacaaacttcagttaattatgttagttaacatttttaagttttaacaattttctatattaagatctttatgaaaaggaaaaagaaaaaatgaaaataaaaatatgtataactcaatcattataatatagagaatagagaaattaatgtcattgttagtctcattatgttagcttccaaataaattaagaaaaaaatccttaattctaaaataaaataaataattagaattaaaaaaaaaatcaaatataagaagaagttttctaaaaaattaacaaaaagttagtaataaacaaccgagagcgagttttcattcattaactcgctcttggttgcttattcaagatttatttgaatggatggtacgaatgtaacatgtgcagtaaatattagatttaatgtcttagtgagcattttgcaataaaaatctgtggatttcatgtttattacaaacagtttcttataaaacatttccttcattattcattaagaaaattaattaagagcacaaacatttccttgttcgtttgccctagacaaggcaataaatcatatcctagagaagcgtaatcgatcattcgattttctttacctaagcgtacaattgaatgttttcttatattatttcttccgttcctttgtcttattattccttaagtctatgttcttacttacgttcactctttttttcttggttactcggacagattccaagtttcttattctacaagataaatgaatcttggttaaaatcaaacgtggaggttgtgaagaa

SEQ ID NO: 15309 - DNA, 3000 bp, Unknown
  misc_feature (1)..( 3000): cDNA_ID_1818579_gDNA_ID_2926128_Annot_ID_138682 3000 nt of promoter + ATG
actgtagataattcagaagacatttttcaaacacagctcactcacgacctctagtagtctactatcgaccactcaagcgagattgttacaagaaattgttgagattctaaaatcatgctcttgtcccgatttgttttaactaaaatcataatctatagatagtcagtagtgcaaagcaacacaaatgcaagatggtgaaaaggattactgacataatagtaaacaggtgttccaacaagatgtgacttcctcgaagaactacagcaacctcccattttcaccagctatagtaataattaagcaagagtagcgaacaacagtccttgaagcattttacagatgcactgccactgcaggaaaagagtgaactgaacaacgattacttgaatgcaacaagattaatcaaaagtactcttaagaaaccccaataaaaaaaaagtgattattacagtgttagtaagcaaaatgacaaaagaaaagttggtctgatggcaaagtcatccataagaaacacaaaggtatgggaagagtgaatagtgagaagaacattacgaaacaagattaatcaaagcagacttgagaaatcccaataacaagtgattattacagtgttaataagcaaaatgacaaaagaaaaagttgatctgatgccaaagttatccataagaaacacaaaggtatgggaatgttccttatgctctgttgtaatgtcccatcaatagctgaaacttgaatctatattctaaaacaacctctaggattcagtcaagttgcaatgaaaacagtgacgcgagcaaaagcatttcacacttgagccaattttaatcaaacacaacacaataaccttcaaaattggtaacatcattgatatgtaactctaccataagatcttctcataagaatagacgacaacatgaacacagtaagcacatctaaatcagaaactaaacaacactaaacagtacgcgaaccctaaaattgaagaagccgaaaagaccaaaaacaaaaagtacacgaaagccgactccgggaaacaaaaaaagagatggaataattaaccgatgagagcagtaaacgaagataacctgagatgtcgccggagaatttgatgttgtcgtgattctccggtgaagaaaagtgagaagaataaatgctggcgacggagggtttcgacacacagagctccttttctctagtcgaataacctcatcatagtaagtaattatactgtaatcctactttactttatttagtttgcctaattattctcaaatctcattaaataccttttaaatagtacgacgtcggttaaggatacgggctaatcattgggcttttgttttctgaaacatgggctataaacattttagaccatggtccattctacagaaggtcaaaccctctgtcgctatcagaggctattgaatattttgctggtaaggtctcaattctcatcatccttcacctgcctatgaatcttccttgttaaccgtaacctaatattgattgacttctaatcaaagtaatttaatctaccattttattatttcctctaatctaagcctttttcatataaaatgtatctaatagtaactttataagaaaaatattatacctttttcttggtatctttgttgtaaaaaaaaatacaaattaaatgcgagttcgattattgcattaatagagatagacccatctggcatttaatatggtggcggcggaataatcgctaacaagatattagttgaaaattttcaaatcattcggatagattacgtctggcattgaactaattatcctctataaattcaataatgacagaatttagtagatgttctaaatactaaaattatttaataatcttacatatgcaattttccatgtacgtgctgttttggagcgtttaaaccgaattaaagtactactgtaaataaattgaatcgaatttaccgaaccaaaattgaagaaaaaaaaaattaaatcgaaccgaaccaaaaattggaaactagtcgaataaatattaaattctataaccgaaatatctgaaataaaaccgaataaatacaaaccaaaatattttgggtaaaatatctaaagtataaatatatttttaaaagtgttaattatttctagactaaataactaaaaatacttgaaaatataaataaaatagtaaaaatatttggaaatatctaaaaatatttaaaaatattcaaaataaccgaaatattttaaatgaaataaccgaatggatactaaattttaaaatcgaaaccgaacagaactttcaaataaccgaatggatactaaactttaaaaccgaaaaaatcgataacggaatggataactgaacgccgagaactactattatatacaaagtatttagttattcaataaaatttgaaaccaatcgttttttttcaaaattaataattatcgaatttaaatctaaggaataaaaaagcttattacaaatcattagacaaaatgtaataaaaaaaaaggaaattatacacattaattatcttagcttgtcgagtttaaattttgttaatcagagaacgtcaagttgtacagctggcgtcaataaatacccaaaacagtcgtctttttcaacggagaagaaaaagttgaaaaaattgtaaagtcagtctctccgactcttccttccttccgtgttcaccattgctacacgttctccacgaactttccgatgcccagtcgtcggagacatagctacaccgtcggatctcctgcaaccacatcttccaattacagtaacactactttcaccgatcgttccttcccgacaacccctgcccgtacatccaccgacacaaccacctccatcgctcgtcgcatctccggtatcttcatcaactgcttcactcctcccgattccgtttcctccaactacatcgacaattcaaagtcctcttccggtatagtttgatcagtaattcttagattttagacttttagtggaaacagttgatgatg

SEQ ID NO: 15310 - DNA, 3000 bp, Unknown
  misc_feature (1)..( 3000): cDNA_ID_1818583_gDNA_ID_2926128_Annot_ID_138683 3000 nt of promoter + ATG
gctctgtgtgtcgaaaccctccgtcgccagcatttattcttctcacttttcttcaccggagaatcacgacaacatcaaattctccggcgacatctcaggttatcttcgtttactgctctcatcggttaattattccatctctttttttgtttcccggagtcggctttcgtgtactttttgtttttggtcttttcggcttcttcaattttagggttcgcgtactgtttagtgttgtttagtttctgatttagatgtgcttactgtgttcatgttgtcgtctattcttatgagaagatcttatggtagagttacatatcaatgatgttaccaattttgaaggttattgtgttgtgtttgattaaaattggctcaagtgtgaaatgcttttgctcgcgtcactgttttcattgcaacttgactgaatcctagaggttgttttagaatatagattcaagtttcagctattgatgggacattacaacagagcataaggaacattcccatacctttgtgtttcttatggataactttggcatcagatcaactttttcttttgtcattttgcttattaacactgtaataatcacttgttattgggatttctcaagtctgctttgattaatcttgtttcgtaatgttcttctcactattcactcttcccatacctttgtgtttcttatggatgactttgccatcagaccaacttttcttttgtcattttgcttactaacactgtaataatcactttttttttattggggtttcttaagagtacttttgattaatcttgttgcattcaagtaatcgttgttcagttcactcttttcctgcagtggcagtgcatctgtaaaatgcttcaaggactgttgttcgctactcttgcttaattattactatagctggtgaaaatgggaggttgctgtagttcttcgaggaagtcacatcttgttggaacacctgtttactattatgtcagtaatccttttcaccatcttgcatttgtgttgctttgcactactgactatctatagattatgattttagttaaaacaaatcgggacaagagcatgattttagaatctcaacaatttcttgtaacaatctcgcttgagtggtcgatagtagactactagaggtcgtgagtgagctgtgtttgaaaaatgtcttctgaattatctacagttatttgattgtgacactctacaaagtttctatttattaaaagtttgttacgcagtgtccagaatcttttgaagagcttgtcccttcaggaacccgtgctggtgtgggatcagcattcaccacaggcctcttggttgatataggtttggagacatctatacctgacaccttttgtgctcctgctcctcttccatatgatttgcttttggggcgaccacaatgcacagattctgagtccatcaaaggaaggatgagtggaagcagttttgaaacgctagcgacgtgtgaagatcttggggaatcagactgtaaaactctagccagctcagtcattctttcaccgaggaaatcagatttctcgaaacatcaaggattgaagatattggttgatgaagaggaggactgttgtcctatttgctttgaaggtaagaaatcaagaccgttgaataaaaagaactctttaactcttgtttttatgagagagctaaacagagtcgtggattgcactatgcagattatgatgttgagaatccaagactaacgacaaagtgtgagcacgaatttcacctctcttgtcttctggagtggattgaaagaagcgatagatgcccaatatgtgataaggtgtgtttcccgcttgagctttctttggcagatcgattgtcttgatgatcaaagaattgcactttactgttgggaattcgtagttagatcaaccattgatggttgcgtaattagggtaaataagtgcacaatttggcaactaactaacattctgtcttctttaacacaggaagttgtgtttgatgatcgcttgaactagcatcattactatcccctggcttgaaagtttgaaggtgtggcgctttgtttggttagtctactacataattagcatacatctattttgtttcttcctcacacactttaagtgttgggtctccacatttccacttagttttgtcgtattggttatgttcgttttgcccttgtgcgatcatatagatatacataacaattgtaaatattacctagcttcttgttcgttcgtttgtgatctccggggtgtgatagagaagaaaggaccaccatttcagtattttgattgtttgcatcttcaaaatcatgtccactcttgtcttgatccatgattctatcttagcaatattggttaatgccctgatctgggaatcataataagcatgattttgtttgtttgtttggttaaagaaagagagagattctattagatatggatatagtataattccatagtctaaagagaaactgaatattccaaatagtaaattgatccacatgcgactagtcttgtcgtgtgtaagatattaaaaagaaaatgattctttgattaacaccttttgtctgctgcataaagtaattaattagaaataattaagaaaaaggttaggaatcatttaagaagaagagaaaaaagatgtcatggctttgacttctagccacttatgtctgccactgccacctccctcttctcaattcctattctgcccttctctttcttttagttcctatcctgccggtgttgatgaatgagggttaatatagtaactttggcgttaggaactatagttccaaaacctttttctgaatgaatttactttttggaggtatgaagtcacagcttttacagattttatcttgcaaaaattctctccacatttcaaacgtctaatagttaaagagagcttttgttttttctttcccatgtctatcagtatcaccaccgagaaaatatcatcaacaccaccaaccaaacattaacccacccgagagtaccca

SEQ ID NO: 15311 - DNA, 3000 bp, Unknown; identical to SEQ ID NO: 9197
  misc_feature (1)..( 3000): cDNA_ID_1818587_gDNA_ID_2926128_Annot_ID_138684 3000 nt of promoter + ATG

SEQ ID NO: 15312 - DNA, 3000 bp, Unknown; identical to SEQ ID NO: 9190
  misc_feature (1)..( 3000): cDNA_ID_1818591_gDNA_ID_2926128_Annot_ID_138685 3000 nt of promoter + ATG

SEQ ID NO: 15313 - DNA, 3000 bp, Unknown
  misc_feature (1)..( 3000): cDNA_ID_1818595_gDNA_ID_2926128_Annot_ID_138686 3000 nt of promoter + ATG
aggtactcacctattggaccttgagattgaaagtcgtctgcacgtgcacaccaaccataagcctttgactctgaatctccactcctctcagtccactcttttttgcaggacccttgggtctcaaattccttttcaagctctgtggcagcagcaaacccactccagtcactgtcaaacttagcaataaccccaacaatcgaatcttgttcgacccaaaaggcattcacttcaacaggcttgaatttggaaagggtctgcagccaatatactgaatcaagtagaagctccttgtcatccgtttctttcaaagggttaacaacaatccccatccatggccagacatagacgttatgaggatttggttcagtctcgtctaacagaggaggaacaaccggagggcgtggaagaggttctgcataaccagcaagatcattctctaaaaacttagctaaagcaagatgattagacttctgtaaagcacttctggtggcagaacctttggaaacaccagtagcatgtgcatgcaactccttgtacttgtaatcttgcttcttcttgcctacacaaaaggggcatctgagccgtccattcaccttcaccttgtagtaagtctcactgcgtaaaaggtggtagggtgttttagaatactcctcaatctctgactcgctgatctcagactcttcatcagaaatgtccatcgtacctgctttacctggagaaaaagaatgttacaaaaacagagaagaagaacaaaataaggcccaaaagagactcaatttctaggcaatcccacgagcaagagaaaccctaggcaacaacttaacaaacaaaacaaaattgacactggataaagcaaaagagacgaaagtgatacagcatttacaaaattgagctaagagagtgacgcatgcatgataaggaacctagcgaaatcaaaaatatatttttaagtaacaagtgagtaaaggcgttaaatcacgaaatgcataggggaatcgaaaaaattcattaaacgagagatttcactgtgaaaacagagaatagaagaaatctggagcttacgctagagagggaaggaaaaggaacaacacggcgatgactcaacgcttgatgaagagtggagtagagagagagtgagtgaggaagatgaagagttattttattttggaaaatatatcagaaaaattagagggtgatttgcaagaataacacatttttatacaagaattaagaatatagcactattaattaacaaagtaatttaaaaatagataaaagagaaattttcacaaatagcataattttaagtttttttgacaaaacctattttatactatagttttttgacaaaattttaagtttttttttggacaaaattgatgaataaaacctatgatccaaattgtgaatgatttatactataagcaatatagtggccacaaaattggtcaagaatttttagtggctttatcaaatagccactgactggagatttttttttaaaaaatatgtgtctggtcaaagtatgtaattatatatctatgtgtaaaattgtatcataaaacattaaggtttccaggattatttttcttctcaaaatttaatatagtgactttgttttactctaagagcttatagtcaccaaagttgttatatatattaatatatgtctcattttttttttttataaaaagaatcaattatgagaaagccacttttgaaagtgacatttgttgattttgcaattttccatatagtttgtgaatttgccatttttagttaataatagataccagttaatacgtggatatagtcggttagatttgtttttaaaatttagtatttggtttaaagtacatattttgcaaaaacattttatatatacatacagttttaagtgttcaaaatgacaaatcctcaagattttagtaaaaactaatgacattgttgtacaattttagtgcttaattttagtattttagttattttatgggctgcactttagcaataaatgtctctttgttttcacttttcagcagttggaactttgaacaaatggaaacaaaaaaatgtagaagacaattttatttttaagcccatcaaaaatacaaatgagattgtaagcccaatatattaaccaacctacctttttcttttgtcagctctctctatttctctaaaggtgacgtcatcttcggcggtaacggctcagatattttccacaataacttccaataatacccctgccattaaccaatagtacccatgtttcctctttgcaacgtgggggtagattcatgaaatgagaacagaacggaggttccaacgagtagaagatgatgtgccacgtgtcactatatcgacccccctttcctcttccttccttccccaatagagagggattttcccgcttcagcgtctctcagtctctctctcggctttatccaaaggttccttcgtttactccgcttctatggaagaagcttgaatccttctctcttcttcttctccttcttcccttgacatttttgttctgagaagcaacatggccctcggtggcttgatttcaaatcggaacttcggttccttcatcggctcaggtatatctatccccctcctctttttgaatctgttagggctttttagttgtttatcggattatgttagtgattaggcttgagcgtagcttgcttctgtgtagcgaacgatatcactaatgtgtgcattgcttccaaatttgctaagattgctttactttgtaggcaatggttgtcagagacttggaaaaagtggtgcagaggtttccaagctttttccaaatggtatatatcggtatcttttatacctctctacctagctatattatgcaatttgtgcttaagcattttcttaatctttgtagcattgttgtgccgtaatcatcaacctctgcaagctagtttacatcatgaatcgggacacatgagaagaagttttggatgtttccttcaaccaagaatg

SEQ ID NO: 15314 - DNA, 3000 bp, Unknown; identical to SEQ ID NO: 9191
  misc_feature (1)..( 3000): cDNA_ID_1818599_gDNA_ID_2926128_Annot_ID_138687 3000 nt of promoter + ATG

SEQ ID NO: 15315 - DNA, 3000 bp, Unknown; identical to SEQ ID NO: 9190
  misc_feature (1)..( 3000): cDNA_ID_1818591_gDNA_ID_2926128_Annot_ID_196768 3000 nt of promoter + ATG

SEQ ID NO: 15316 - DNA, 3000 bp, Unknown; identical to SEQ ID NO: 9197
  misc_feature (1)..( 3000): cDNA_ID_3087810_gDNA_ID_2926128_Annot_ID_196766 3000 nt of promoter + ATG

SEQ ID NO: 15317 - DNA, 3000 bp, Unknown; identical to SEQ ID NO: 9189
  misc_feature (1)..( 3000): cDNA_ID_3087818_gDNA_ID_2926128_Annot_ID_196763 3000 nt of promoter + ATG

SEQ ID NO: 15318 - DNA, 3000 bp, Unknown; identical to SEQ ID NO: 9188
  misc_feature (1)..( 3000): cDNA_ID_1808340_gDNA_ID_2926128_Annot_ID_196760 3000 nt of promoter + ATG

SEQ ID NO: 15319 - DNA, 3000 bp, Unknown; identical to SEQ ID NO: 9200
  misc_feature (1)..( 3000): cDNA_ID_1818559_gDNA_ID_2926128_Annot_ID_196753 3000 nt of promoter + ATG

SEQ ID NO: 15320 - DNA, 3000 bp, Unknown; identical to SEQ ID NO: 9199
  misc_feature (1)..( 3000): cDNA_ID_2038555_gDNA_ID_2926128_Annot_ID_196752 3000 nt of promoter + ATG

SEQ ID NO: 15321 - DNA, 3000 bp, Unknown; identical to SEQ ID NO: 9186
  misc_feature (1)..( 3000): cDNA_ID_3087836_gDNA_ID_2926128_Annot_ID_196749 3000 nt of promoter + ATG

SEQ ID NO: 15322 - DNA, 3000 bp, Unknown; identical to SEQ ID NO: 7473
  misc_feature (1)..( 3000): cDNA_ID_2044354_gDNA_ID_2926128_Annot_ID_196742 3000 nt of promoter + ATG

SEQ ID NO: 15323 - DNA, 3000 bp, Unknown; identical to SEQ ID NO: 9194
  misc_feature (1)..( 3000): cDNA_ID_2038467_gDNA_ID_2926128_Annot_ID_196777 3000 nt of promoter + ATG

SEQ ID NO: 15324 - DNA, 3000 bp, Unknown; identical to SEQ ID NO: 9192
  misc_feature (1)..( 3000): cDNA_ID_2996391_gDNA_ID_2926128_Annot_ID_196775 3000 nt of promoter + ATG

SEQ ID NO: 15325 - DNA, 3000 bp, Unknown; identical to SEQ ID NO: 9191
  misc_feature (1)..( 3000): cDNA_ID_2038493_gDNA_ID_2926128_Annot_ID_196770 3000 nt of promoter + ATG

SEQ ID NO: 15326 - DNA, 3000 bp, Unknown; identical to SEQ ID NO: 7475
  misc_feature (1)..( 3000): cDNA_ID_3087872_gDNA_ID_2926128_Annot_ID_196728 3000 nt of promoter + ATG

SEQ ID NO: 15327 - DNA, 3000 bp, Unknown; identical to SEQ ID NO: 9192
  misc_feature (1)..( 3000): cDNA_ID_2996391_gDNA_ID_2926128_Annot_ID_138692 3000 nt of promoter + ATG

SEQ ID NO: 15328 - DNA, 3000 bp, Unknown; identical to SEQ ID NO: 9194
  misc_feature (1)..( 3000): cDNA_ID_1818610_gDNA_ID_2926128_Annot_ID_138693 3000 nt of promoter + ATG

SEQ ID NO: 15329 - DNA, 3000 bp, Unknown; identical to SEQ ID NO: 8085
  misc_feature (1)..( 3000): cDNA_ID_1809065_gDNA_ID_2926129_Annot_ID_138698 3000 nt of promoter + ATG

SEQ ID NO: 15330 - DNA, 3000 bp, Unknown
  misc_feature (1)..( 3000): cDNA_ID_2996407_gDNA_ID_2926129_Annot_ID_138700 3000 nt of promoter + ATG
gactgggtctcacagaaatcatgcgggctaagctaggatcgtaaagaaatcagctgggtcagctcgcccaaagctcaagctcagctggaaggagtgacggttactcaggttaagtgacagtccagctcgggcagctggacgagtgacggttgagcttgaggtagctggacgagtgacggttgagctcgaggtagctggacgagtgacagactagatgggcggttatgggcgaagagatacaactcttcggaaaggtgcaactcttcggaagggcgcaactcttcggaaaggtgcaaggaacggatgtgttgattcgggaagcatccattcgccccctatataaggaagggcgcccaggaccattccactcaccacaacacaccgaaaacacaagaaactcaccattaaaactctctccctcttgggagaataaatagtcttaggattcggtagtcgggctgtggccggcaataaagaaggagggtcggatcgacctaacctcgagaaggaaggtaagggatcctagactttgagtctaagggttctaggatgtgagttagtagtcggatccttgaaaggatcaactagagggctgggtagtatccgggtcatgtgcatcctacacaagactcggtccgggtagggatcggctgaggcggggacgcggctcggcggaggaccggcgggtcttaactgatctgccgagaatcggccggactgatgtgcgatcttcccctctctgaattctctccacggatccgagtagtgtatggcatatagagcattgcatggacttgcatatgattaagtaaatgagattacttatggctctatgactttcaggaacgaatggtgatcgtgggaaggacttggcttaggcgcgagagactcaagaccgggatgatgggtggtgatagttcggatagtctagggatcgattatatgacttgtaatagcttatatgcaaactcataggttgtatcgaatcctttgcttaatcaataaagtatccgattgtttgtttactctattcgtctcatatattgaatcacggaatcatatggaacggattagactaggaaagaacctcataaacggttagggccgagtcacttagtggcttgggtcgagagaactcgtccggaatttaggcagtccggatcggggcctttcaaaaaccaaggtcctgctgctcccgatgctgaaatgaaacaaatggtacaacagctgctacagggacaagcatctagctctacagaaattgctaagaagttacctgaattgcaccataagctggactgcagctttaatgacctgaatgccaaagtggaggcattgaataccaaagtcagatacttggaaggacaatcagcatctacctctgcacctaaagttacaggacttcctgggaagtcaatacagaatccaaaggagtacgcaactgctcacgcaatcactatctgctaggatcgagagctgccaactcgacttgttctgatttaatcactgggacagtgatgttcaagagggggacgcttctactcagattgaagtctctgttgttgaattcaaccattatgctggttctcgccatctcattcaatccacctcggaagagaaggccgccataatcgagaaaatggtaaaacgattcaaacctactccattaccctcccgtgctcttccatggaaattcaggaaagcatagatggagagatacaagtctgttgcagcgaaacagctagacgagattgaagcagtgatgccactaatagaagttctcaacctgattcatgatcctcacaaaaatgtgagaaatctgatattggaaaggatcaagatgtatcacgattcaaatgatgatagtgacgctactccatctcgagctgctgataaaaggattgttcaagaaaagtttggagatcctggatcttttactctaccatgttccattggggaattagcttttagtgattgcctgtgcgatctcggagcctctgtcagcttaatgccactctctatggcaagaaggttggaatttattcagtacaggccttgtgacctgactttgatccttgcggatagagcttcaagaaaaccctttggcatgctgaaagatctaccagtcatgattaatggagtggaagtgcctatagacttcgtggtgctggacatggaagtagagcataaggatcccctaatcctgggaagacccttcttagcctcagtgggagcagtgatagatgtcagggaagggaaaataagtctcaaccttggaaagcacatcatgttgcagttcgacatcaacaaaactccacaagagtcaaaagaagatgaaaaaacctctggagatgatagagtgatcccaggagaaaaatatgagactgagaaagtaaaagagcttaaaaagaggtctgataagcaagaagaaactatagagaggctagctcactctgttgaggaacttagaagtaagctgaatcagttgcagaaggaagctcaacctaaaggcgagattgacactatcctgagaaagaagttcacttcaagatggtttgaagagatagattaccctccagaagagaaagaagcatattttgaagagaggggaatcgagtattctgctgcagacctctccagggaggacgctgaatatgatgatgatacaagagaggactatgcagaccctctctatcattcattttcttcttgataagtgtgaggattcaagctagggactttaaacaagctcacttgggaggaagtcccatgactatcactgtaaataaatttttattttcttgtaatttttgatatgttttagttgtgtttgtggttctcaggaatggaggaataacgtgaaggtagagtaaaaattcaaaacttttactttagagatggcctagagatcgagtatatagggtagcggagtgcaaaacttttaaaactttttgttgcacctcgagaccttgcactcgagacattagtcgagtatgagtg

SEQ ID NO: 15331 - DNA, 3000 bp, Unknown
  misc_feature (1)..( 3000): cDNA_ID_1809975_gDNA_ID_2926129_Annot_ID_138707 3000 nt of promoter + ATG
cccttttaaaatcccttgtaaatatttttaaacccttttaaaatcccttgtaaatctttcagaacacttttaaaccctttaaaaatctttaaaaaatctttaaaaaacctttctaaatcttttaaaatcctttaaaatctcttgtaaatcttttaaaatccttttaaaacaattttaaaccctttaaaaatcttttaaaaacctttgcaaatcttttaaaacccttaaaaatcccttgtaaatcttttaaaacctttttaaaatcccttgtaaatctttttaaaacgttttcaaatgccttgtaaatcttttaaaagccttttaaaatcctttgtaaattttttaaaacccttttaaaatctcttgtaaatcttttaaaaccttttaaaatcccttgtaaatcttttaaaaccttttaaaattccttgtaaatcttttaaaacccttttaaaatcccttgtacaacttgtaattcattaacgaccgtggaagttgtactcaagaacagtgatcattttgtctttcattgacaaccacattgacccggctggttggttcccatgggatggcgagtttgcgctctccacattgtattatggagagtatgcgaatactggtcctggagcggatacgagcaagagagtgaattgcaagggatttaaagttattaaagactcaaaagaggccgaacaattcactgtggcgaagcttattcaaggaggattatggttgaaacccataggagttactttccaagagtggctttgattttaatgtctacttgttcttgtactttgtgttgtgtcacctctgttttagtttaatgtattttctgttttgttttgtatgacttacccaataaataacatgctctgtttcgcaagtattaggttaatgcatataatattttgaataactttaacactaactaattgaatattttcaatatataatcatactcgcactcatcagtcataacaccatcaatttaatttttttttatggggttattatatgtactagatgactaaaactttgagaatattttcatgaataatatgaattttgtttaagttgattacattatttatcaggaacagtagttaccaaaaataatagtttcatattaaattttacacgttggtcatataggggatccttgcttattgcattctgcatggcatgtcagcacagtgtatcagcatgtgatataattttactataagtagagcattcatcggtcgtaaattttcggaatattcagtgtatttattttctatttttttccgttttctattatttctgtatttctcaatacaataaaaattcaaactaaccaaaaattcagaaaagatcactatattatatataaaatcaattgccgcccaaaaagaaatctgttttacaatgaatataactgaacaattatacatatatctagcaaatctatcttttggcatttctaaattaataatctccattgaagagctgcaactttgtgcttgctaaaactttttcacctgcaacaaaatgagtattatgggagatttaaaaatcaacataggcatacaaaaatattccagaaagaagagagagacaataaggacaacaaattttgagtcatatcatatttgttgtgatgggctccatcccattgataaataccttaatcaaccgattgtcagctgaattcctcatgctaatacctaactatacaatattataattgccatatactggaaaactagcagattgcacaacaatatagaaaagacacaagcataagaaagaagcctacgcgacaattactacaacatctccatattgaatggtcttctgatatacaataccattccatgcgcgcagactgagactttgtaagtatgtgaagcatctcacgagagttctcagtcaaatgcaactcaacaaagaaatcataagaaagcattaaatattgaaagcattgagaagcaaattagttcatgaaccacatcacatcagcatcctggagaccaaaaaaggaagacaatgaatcactcaatagaagaactgataagtttttgctttcactgccaagagtgtaagaaacataccgcaaaaacagactactaaacccttttcaagaacaatccgaaggaaattgattcttctccacatcatttagcatccaaagcaatgaccaccatctttagttgcagctctacgcagcacatctaaagctttcttgttcttttaccaattctaaaaatctcaaagaagagatcgattccagatacaatagctgcataagattcattcaaagttgtcaaaattacagtaccatttttttacggaggaatgacaagttatgagagtgcttttattatatcttttcgggtaaacattgtaacgtagtgaaagttgagagtgaattgcctaacaaccgatagaatcaaccaaaaagaaaaaaagaacatcttttctaacgaccaaaaaaaaaacctaggggttttctatttattaggtgtatattgtcttttctagtactaaaacaataatggctaagtctcatcctcacacgtaagagattaaggttgagaatatattgtattgttgttagcataacctaaaatggatgaaaccaatttctaccaaattcatttttttttagccatttagagtacagtggaaaacaagtatttcaactaaagtactctaagacaattcttcttctatcttttatgagctgaaaattttggaccacttttcttttctgttctttgtggataataaaaccaaacttcactgaattatagcttcaattcacattgcactgaatttttagattgatctcaaaataaagtttttttcctaaatattgtcatttattgaatacaattaattaaatgtaaattgattaagttgctttgctttgtatataagaccaccatcgctccctcctctttcatcagttaagataatataaattcagtaattaagagagaagaaataaacacaaaa

SEQ ID NO: 15332 - DNA, 3000 bp, Unknown
  misc_feature (1)..( 3000): cDNA_ID_1809983_gDNA_ID_2926129_Annot_ID_138709 3000 nt of promoter + ATG
gctttatgagaagaagagaagaatagagaagaagcttcaagcgtaaaagaagagcaaggaacaaagtcaacaaaagagatgttgggctttgtgttttgttaaaatgggctgcagatgaattaggcccaagtatgtttagttaattagtgttgtgttatagaatcaaagatgttatgtagagtgaattaaggagttgggagttccaacatagtagagtagctgatgtaagtcttaagacaatgatgtggtctagggtctaagcaagtggagtaaagccactatatgtatgtgtgtcttgtgtaagattatccaagtttattatcaatgtagacatgcaagtgtttaaacgtgttcttgtattttctgttttaacaagaacaaaaacagagatcgtgagaaaagcagagaacttgtggtgaaaattagaacaaatgcacaatcatcataagttataaaagactaaacaactgcacgcagataaagcaaagaagccgtgtaatctttgtttccaattataaacgtcatgtttctcctctctataatgttagaaacataagaatctcctccagatctttctcctgatttctccattcccttctcaagaccctatcgaaagcacaaacatgcccaacaataagtaaaaaaaaacacacacagaatcaattagtatctgcaattcacgcaacaaatttgtatgcatcttgattcaatatattatcatatttataaaaaaaaataatataaaactcgtaaatttttaaaaatatcaagtttttgtgttatttattttcgtttataaatttaataaaatagaaatttacattttgataagttttatattatttggttacaaaatatttagaaaactttccatattttcttattttggttttttccattttacaaaaataaaattaaaaaaatagaaaatatgaataatttcataaatgttaattaatgagatgacttataatgattggttgtataaaatcctatgtagacgtactaaaaaaaaatagttttgacttttttataatatagattagttgtttttgatttatttaatttctcctagatccattaaaagagatgcccttagatcttagtcaaatagtaacatcatgtatttcaaatctaaggaaggaaatttatcttatgggttgtcatattgctgttaaatcaaaatcaaatatttttcttacctaaataaatggtcaaattatcaaaaaaagaaaacaatgaattgtttgacaaattgctaataaattaaatcatttattatggtacataatctgtaagtatttatttttgaaaaacttttcagcatatataaatctcacgtaaattccaaaacacacaaaacaagaaaaatggttgcttacgtcgataaaaacttttcattggcttgttttttggttttacttctttttgttgactcatcgtatgcaaggtttaatacgttggttacaaaagatcagatccacaccatatgcaccaaacaagatatcaattcttcatattgttttcaagttctaaacgcaaatcctgaaattgctagattagattttcctagtctcttcaaatttgtgcttaattatcaggctcaaaatatttcagataagctgaagcaatttaaattatcaggaggctacacgccgggtgttgaatctaaatataacttatgtatagaattttatgaaaattctttcgaccggcgtgatgaagccctcagatatttggctgccaaagactatggcagcgtaaacactatggtcggtggaacggcgataaatatgttcaactgtgctgatgatttgtcaacaatgaagccagtaccacaattttttgtgacggaaagtaatttgattaaagaattgtctaagattctcttagtgattctagaatgtttcataagtaagaaaaaagaatattgtaatagagatctataataataataatattagtatgattgttgccattatccttttttaatatataaaaaataagaaaaatagaaaacatttctccactccctctgcctaagaatctctcgtttaaagctacattcttttttttttttgtcatccaagctaaattcttctctaaatcgttttaatcaacttgttgactcgtgagttgactcgtgggctgtttctctaattgctaatagaatttttatacgatgatggaagaaactagaggaaactgacaacagataagaatccatttcttctacgcagattggtggttgtttggtagaatttgttctctatgttatgctaaggttataaattctcatattgtttttgcttaggatttgggattaatagttgaaataaatgattgatcgcatcacttttggatttaggaccgaggccttacattctattgtattcatacagaggtatgatatcagaaatggatttttgtttcatttgtgtgatggaccttaacatgatggaccttaaaattgctacatataacaaaaacacaattttatttatatgatgatttatatatccatcattctgtgaacggattagattttctttgccttgtagatcaattgtgtgtccagtatagtatagacaagttcaaacttgcttagctttgcttaaccaatcattaattcgtattttaatttcaatctcacttatcaaaatcactgatacttaacttagctcatggacagtctctacggccaacaagacgtaaatactaaaaagacccatatctagagctctctaatagacacaatcaaaaatcatttacgtaatcaaacataatctcaatttttcttatgttgtcaacctctaatgacccatatttttcctcctctctgccctcacctccttcctaaccctataaaactttctctttgttcctttgtctcttccattttcccaagaaacaaatggatcgttatcttttcttatcaaatcttcaatcaaacccacttagagatcaattgcttacaccaaattctcaaattaagaaccg

SEQ ID NO: 15333 - DNA, 3000 bp, Unknown
  misc_feature (1)..( 3000): cDNA_ID_1809987_gDNA_ID_2926129_Annot_ID_138710 3000 nt of promoter + ATG
atgaaattataatttaggcttgtattgttcatttacttacatgtgttataattttaccttttatgtaataaaacttgatttttattacttagttaaactgaaaccatctcttccaaaatgaacacaatttatgatcattcttacaaaatttatgtaagaatttatgatcattcttataattgacatgtggtacactacgggtttataattgtattcaatagtttttttattttgtttttagcatgttttataaatatatgttaatatattttttaatttaaatatattatacattttggaaggatactttataactaaaaaatgaaaattttaagttgtattagttttgttaatattgtttatttttagtactttaaaattgtataactgtaatttgattgttaatataaataatcaagttatattttgaatttatcatattattttttatatctatttacttttgatattatattagtattttctgtaaatttaatttcacaatcaataaatgtaagatcaatatgattattattggttctcaacaaaatatctttaagaatccaaacatgaattttttcacatctaagacatctgtgaaaatagtcggatagatgatatcttttttactgtgtctattgcttttagtaagacagaagccatatttctgaatcttttgattagccaggtcacgatcatatatgttctcctcttctgccaaaatccaaacaacacaaactttagacgtggcagaaatcagcatttatttctaacaataattggaaaaactaaaaaaatagaaaaatatttcgagttttagctagagaatgaaacaaataatcaaaacgaaaactaaaagaaataaggtgtctgtaaacgctaaaatatttcatacctttgtgttgggtgatggtaaatggcgtggtggtgcatagtatttatagggacaactaataggttactaacccgcatctattaaatagaaaatattccctgaagcaagatatttggaagaaaatctatgaattcgatagattttgaggaatatactattgttatgcgtttttaattttttatgcggcattattatgtttctttaaatggtttttgtgtagattatgtagaggataaaatatgaaatccgaattggtgagttattacttgattttagtaaaaaacggaattgatttttatggagaagaaacattagttagtttcttaaaatctgttttgtagggatatattgcaatgtatgaatttcaaaaatggatatgatttgtttggaagaaatcgtggagttaatatggagagattttaggaaataattttgatagagacgattaagatggcaagacgttaaggaaatcataaattgtgattagcaaaagaattaattacgtttattaaagattgactaagattgcctattgttgttggaattaattaagaaaaatataggagaatatatgtgataccaaaaacatattaaaacaaatgaatgttaaatctggcagattttgaatcaaatcatattttatcctctacatagtcccaatcgtaatttctttgaaaacagaatgattctgaatggtttagaataggaatatgcttgagtatcataagtgcaaaataataatcaaaatgccgtatttagattttgatttgattctgaatcaaactgtcgagatatggtaaatgtatttacccttatttttacgcttgtacatgtaaaacagaaagatttgggtggtttataagatggaatattgcgggatttagattatatcttgactggcaagcaaatagtaaaagattttgtagttaaggtgatatacgtaaatcaggatacataattgctatgaatgaggagtggagagaatatatgattcgatcggataaattttttggaaggcaataatcaataacaatttgaataatattatagttggcgaaatttaatttgcgaggtgatatattggaattttgaattgatgatgatttgtagaatgtgtaaaaatatattgactataccatatgtaagattatatgataaatagagggttcttttaaggtttatggaattaatgcatgattaataatcgtttaacttatagaaatgtgatatcgaaatacgaatatttggtaagagtgtagtaaatatttagagattttggaatgaagtaagtaaagatatggttagttatttggttgttcggatttttaagaaatattatttcgtgtaatattgaattagtagagatttaagggattaatgtgtgcaatttatgagggtagtgcaaaataatatttttgtttaggtaattaattagtgcaaaacgtgaatagttcatcaaaaatttggtcattgtcctaacgcagacaatcttgtctgattgattttatagggactaaacatacaatatcgaaattgaaaaagaatttttcgacacaaatctttcccaaaattgtatatgtagataatttataaatttgttatcactatcttctaagaaatctgtcaaccaaaaaagtatgatataaaaaatctgtcgtatttaaaaaattctactgaataagaataaatctggtataactaaatgatagacttttgtaaaatcgctagaaatttttttaaagaatattttgtatttattttatttttaacacatgaaaaaaatattttaaacaaaaaaaacaatttaattccaatattttagaaaatattctaataattaatctcattacttaagttaacccctaaatatgttacgttttaaaactatctaagcacgttctaatacacatcatacatcatacagaaacacatatattcctccgtgctgtaacacgggtctgatcttagtaaaatagtggagagaagaatattcttctggataccttttaatattccccaaaacttctgaatcttcttctcaatttttctcgacattttctcatcgaaagctctcttcctttccctttttggcgctcaatacaatc

SEQ ID NO: 15334 - DNA, 3000 bp, Unknown; identical to SEQ ID NO: 15333
  misc_feature (1)..( 3000): cDNA_ID_1022613_gDNA_ID_2926129_Annot_ID_196835 3000 nt of promoter + ATG

SEQ ID NO: 15335 - DNA, 3000 bp, Unknown
  misc_feature (1)..( 3000): cDNA_ID_3088000_gDNA_ID_2926129_Annot_ID_196830 3000 nt of promoter + ATG
atcccttgtaaatctttcagaacacttttaaaccctttaaaaatctttaaaaaatctttaaaaaacctttctaaatcttttaaaatcctttaaaatctcttgtaaatcttttaaaatccttttaaaacaattttaaaccctttaaaaatcttttaaaaacctttgcaaatcttttaaaacccttaaaaatcccttgtaaatcttttaaaacctttttaaaatcccttgtaaatctttttaaaacgttttcaaatgccttgtaaatcttttaaaagccttttaaaatcctttgtaaattttttaaaacccttttaaaatctcttgtaaatcttttaaaaccttttaaaatcccttgtaaatcttttaaaaccttttaaaattccttgtaaatcttttaaaacccttttaaaatcccttgtacaacttgtaattcattaacgaccgtggaagttgtactcaagaacagtgatcattttgtctttcattgacaaccacattgacccggctggttggttcccatgggatggcgagtttgcgctctccacattgtattatggagagtatgcgaatactggtcctggagcggatacgagcaagagagtgaattgcaagggatttaaagttattaaagactcaaaagaggccgaacaattcactgtggcgaagcttattcaaggaggattatggttgaaacccataggagttactttccaagagtggctttgattttaatgtctacttgttcttgtactttgtgttgtgtcacctctgttttagtttaatgtattttctgttttgttttgtatgacttacccaataaataacatgctctgtttcgcaagtattaggttaatgcatataatattttgaataactttaacactaactaattgaatattttcaatatataatcatactcgcactcatcagtcataacaccatcaatttaatttttttttatggggttattatatgtactagatgactaaaactttgagaatattttcatgaataatatgaattttgtttaagttgattacattatttatcaggaacagtagttaccaaaaataatagtttcatattaaattttacacgttggtcatataggggatccttgcttattgcattctgcatggcatgtcagcacagtgtatcagcatgtgatataattttactataagtagagcattcatcggtcgtaaattttcggaatattcagtgtatttattttctatttttttccgttttctattatttctgtatttctcaatacaataaaaattcaaactaaccaaaaattcagaaaagatcactatattatatataaaatcaattgccgcccaaaaagaaatctgttttacaatgaatataactgaacaattatacatatatctagcaaatctatcttttggcatttctaaattaataatctccattgaagagctgcaactttgtgcttgctaaaactttttcacctgcaacaaaatgagtattatgggagatttaaaaatcaacataggcatacaaaaatattccagaaagaagagagagacaataaggacaacaaattttgagtcatatcatatttgttgtgatgggctccatcccattgataaataccttaatcaaccgattgtcagctgaattcctcatgctaatacctaactatacaatattataattgccatatactggaaaactagcagattgcacaacaatatagaaaagacacaagcataagaaagaagcctacgcgacaattactacaacatctccatattgaatggtcttctgatatacaataccattccatgcgcgcagactgagactttgtaagtatgtgaagcatctcacgagagttctcagtcaaatgcaactcaacaaagaaatcataagaaagcattaaatattgaaagcattgagaagcaaattagttcatgaaccacatcacatcagcatcctggagaccaaaaaaggaagacaatgaatcactcaatagaagaactgataagtttttgctttcactgccaagagtgtaagaaacataccgcaaaaacagactactaaacccttttcaagaacaatccgaaggaaattgattcttctccacatcatttagcatccaaagcaatgaccaccatctttagttgcagctctacgcagcacatctaaagctttcttgttcttttaccaattctaaaaatctcaaagaagagatcgattccagatacaatagctgcataagattcattcaaagttgtcaaaattacagtaccatttttttacggaggaatgacaagttatgagagtgcttttattatatcttttcgggtaaacattgtaacgtagtgaaagttgagagtgaattgcctaacaaccgatagaatcaaccaaaaagaaaaaaagaacatcttttctaacgaccaaaaaaaaaacctaggggttttctatttattaggtgtatattgtcttttctagtactaaaacaataatggctaagtctcatcctcacacgtaagagattaaggttgagaatatattgtattgttgttagcataacctaaaatggatgaaaccaatttctaccaaattcatttttttttagccatttagagtacagtggaaaacaagtatttcaactaaagtactctaagacaattcttcttctatcttttatgagctgaaaattttggaccacttttcttttctgttctttgtggataataaaaccaaacttcactgaattatagcttcaattcacattgcactgaatttttagattgatctcaaaataaagtttttttcctaaatattgtcatttattgaatacaattaattaaatgtaaattgattaagttgctttgctttgtatataagaccaccatcgctccctcctctttcatcagttaagataatataaattcagtaattaagagagaagaaataaacacaaaaatgttggttaaagttttctcttttttcatccttatgataaca

SEQ ID NO: 15336 - DNA, 3000 bp, Unknown
  misc_feature (1)..( 3000): cDNA_ID_2139877_gDNA_ID_2926129_Annot_ID_196829 3000 nt of promoter + ATG
cagtgaaacaatttgatgggagagaaaaaagaagaacaaaaaatcaaataattatattttagcactaatttctcatgccggtaaaccttaaagtaatcaaagtaatcaatcttggtatataaatgtttgtgccatacataatcaaagttatcaatcttgtaccccaatttatggttgtaaaaactcttataacatgctaaaatcttatcatacagaactaaaagctcctaacattaggagattgaagcaaatgaataattgaagagagaatcagaaaatgtaaagtgtggaaagacgagagagattctacgagcaccacatattcgtattattattctaccatcgtttcaagacatgaaagaaagcaaaaaaacaaaagagaaaaaaacaaaaaaaatcagacaatatattggaggaccctagaaaacaatataccaccaaaacaacgactcttgaaataaggtttatataaaataagttactaactcaaactcaggagatcatgatatttatataaaataaagttttgaaagttacttaagatacggttttgaaaattactcactaacaagatcataatatgtgacaagtctaacaataagatgtttatatgtgtcattaaagacttaatatttttattctcttaaaaaaatagaaaacctaaaaaactaaacaaatttacatatactaatttttatgtctatatacatatatataattatttttattaatcaaaaagaaaattaacgaatttgattttacatgtgttattggtcaattaaataaatctaacatctactctattatttgagacgtacgttaagtgattctcggttaaaaaaatttttacctttaaatcatatgtttaaaatgttaatgtcatgaaaaagtttaccttttactaagaatcacttaagttacgttataatcttggccattcgattgaattgtttgtgaccgtccgatctctcgccttcacttaaaaaacacgtggatccttatgacccgggtttacaattattgggtcatacgttataatcttggccattcgattgaattaattgtagccattaatgttttttgaataaattctatagcaagatttttggagagagaatttttatttatttccaattaatatattcccttattcaatactattcataattacgtgggtttaaaattggaaaactaattatactcatatatcaacaatatttattatattctaagagatcattaatccaatcaatatttataaaacatttcataatcaaagctgctttatttatagatataacattataaatatcgaattaatatgtttgaattcgaaattgggttaaatattctaaatttatttaaataactggaaaaataattttaactaaacttttttttatgtttgataattaaaatagaaaaaatatttttaaacatttaaaaataaaattaattacatttttggtttatattaatttttgttaattaaattaatcgaattcctttttcagcaactgaatcatattaatttaaaatatccaatgcgtatattcctttcttaaatttgaatatatcacttctccataattataggtaatcaaatatttagttggatattcatttttgaattaacataaagtttccgaacaatttccataattaaataactacttataagataattgctaaacattctcctataattatgggattcatcataatcattaaacttgacttccacgatttaatattttatgcatattttaaacctaaaaatttatatcttataaatattgtacgtcccatttcaagaacttactcagcagttcctatcttcttttactctctcgtttcttttttattctagcagaagaaaacgagaccatgaagaaattaaaactgaggttgtggatcgacgagaccatggagaaaacaatatatcgaggtatcctctcacactctctgtttttctctatttttttcatgtttttctcacatctgttttttaaaatatttatgcaggtaatgtgggagattaaaatgtagacgcacacatgattttgttaaagtatgtcttgctttctaattatttatcttttatgcaaagtaatatgttaagctttttttacctctctatatatttataagatgagtaattctgattgaattttttttattgggattacggtctttttcctgttaatttgcagaaacatgatgatgatttataatttgactactatcttccaatgaacaacaaaattataaggtatgcaataattttcttaaatctgatcgatagattctctttcactaatatattgagattgtgtaaatatttttgactgtagtttagattttaatatattggtattgttaattaaattaattgaattttaatataagtttaattttgataaaatttatttttgtcttattaatttgtcaaatttgataattaatatatgtattaataaaatacactaaaccccaacacaccatgtatataagtacatatactaaatatacaattatatattcaaagggatacatcaattttgtaatacattcaatagtatccatgtttaaatatgagaatatttaatgaaaacaccaaaaattaggagaataggagaatagggcttagagagattaggagaatagggcttagagagattgattatttgatgaaatgttaatataaaatttgaatgttttatttttaaattttaagtcatttaatgtgaatttggtattatgtaaaactaatttatgagctgactatagtaaaaaaaaaaaaatgtgttcgccctaattattctctcccaagcacggaaaccaaggagccgcttcccttagaaatatgagcttctttctccgacgttcctcttctggtatcttccttgtctgatcggtgctagctgctaaggcgagatctctcaggcggacctcttttttggcggcgttgctgtttttcggtgagactttccacatgag

SEQ ID NO: 15337 - DNA, 3000 bp, Unknown
  misc_feature (1)..( 3000): cDNA_ID_3087914_gDNA_ID_2926129_Annot_ID_196824 3000 nt of promoter + ATG
tactggtcttggtaaataaagaccgatttctttcaaagattgtccttgactcttattaatagtcattgcgaaagcaacaactataggaaattgttttctacgcatgttgaatggtagtttagtatcagatggggtaatgagaatctttgaaatcaacactttatcaccaatcctacctcctgtaataataacagcctgtaaaataggcggagtcatctgtatcatctgaagccttgtgccattgcataatccaccttttgggtctaaattccttaacaacataattggggcaccaatattcaaacgtaaacaatgatttggtagacctgatatcttgatagagtttaagaaatctggagtgaacactggattgtactctgaagtagtgtcggaaagatctattgaatcaatacttaggtactgaatttcttcacctgatatgaaaaagttaaaattaaacattaaatttaacatgcaactaataatacagataatatagtattctaatacatacctggtagcttctctaacagacgctgattaatagtattaacatcctcattggtaggagacaatatagctctctcttggatgaatttgagatctttattttcgagtaaaagagttggatctccacaaatctctaaacttatagctttaataggatcttctccctctgtaattaaaaactcttctggaataccaattaacacttctccatcgtttggtttggcgaagtgatggatttcattaaccatgacttgtaagttagtgaccatttgtttaattctccttttcactaattgtcatcttttaaaaacatttggttttacaaagttctggtgtcgtgtgtttgcgcacggaaaatccacttgaaagcacaaactcagaaggagatttctacttttgtattatgactccaaaggagatgtggccaaaaagtaattcaaaatacggctagctaatggacatggtaaataacttcccattgttagacacatatatgcatggttatgctaaaatctaagttattaagttttggttcatttcagcatatgtgcccaatcatgcatttgctaaggcgaaggtcgttgcagaccccatgtccctatttgagtgataggattgcctttctcgatctgtggtttgtcaaacagttgtgtgatgaagacaagaaatttgattcaattatgaattggtttttctctgaaacctatatcaagggggtaaatggcgagtatccaataactgggaagacatgaaaaacatgggttaaagatgttgacatagtctacttggttcacaacatcaacaacaatcattgacttgggaggtagacttgttaaagcggaggatcaatgttttcgacagcattttaagttgcaacaaggataaggaggtaagtaaagcatgcaagcctttcataagaatgttttctgccttactacaagcggtagcgtcaccagagaagaaaaaagaaatcagtgttgttgcattcagtttctatagggttaaaactgcaccgcaaaacattcaagaaggtgattgtggtgtgtatgctatgaaatacattgagtatttagccataggaattaatttcgttggtctaggtgaccgtgcaatgcgtgatcagaggctaaaactggcagcagagttatttgacgaggttccagaatcagattattggatacaaatgtctgatccaaatccctgaggtgaagaaagatggggagttgagttcctatctgagactaaaaaagctgtctgaaaaatagtggtgtgtcattcctttttgttgaagttttttgccatctaatttttgtaaaacttaatattcgatagttattcggtttggtaaaaacaaaatattgatgtatccttgtttattgaggtttattaatgaagtaaaggctaaagatgaattaatagtcggtaatagagttaaatattacagcttgtgactcataattaaacatcgatgcatcaggtttttaaaatgctcccctaacacaactccttgaaacgacatgaataagtaaatgcaaagcaatcctcacatatgtctacattaagaagtagttaaaatggcaatctggtatatcaaagaaatgccaaaaccctttgaatactttccgaccacctacaccgatatctttgatctgcctttcaaccacattggcaatatctactctttcttgaagagtttcaactcttctaaagaaagctttggtgacgtaaacaccttggtcataagcaccacatcatatcagcatcatagctaaagcaaacgtcgcataaatggaagatgtacacacctctacaagcatgtcaagccgtgcttgcgttggacctaattgagtcaattggcagagagcttcgaggtaccatgctgtcaggtgtccttcagtcgcgcattataacaggaaatgacggtagatggatgtctctcttccaagccgagagttgaaaatgaattcgtctagatcaacatcggctaaaacttcaaatgtgtagacttgaatttgaagccaagggcaatctacaatgaatgggccaaggtaccgaaagccctgtcagccgacgcgacggattatgccagttactagtgcatctagaatgaagttcatattttgtttactaaattatgtccgtcgctacgtatatttatactaatttgaaatatttggttgacctaatcgacagaattgtacacatcggtgacgcataacaatatgcaatcatacaaaactagtgggccacaaattattgaccaaatatcaaactaacctcatataaaagcccacttaatgaaataggcccatttgcaaaataaaagacagttattctattataacgtaacccccgaggagggaaagtgaagggttgcgtctttattcaattatatatatattagagtctaggttaaccctaaaatcggtgagtctctcaactcttctgtttaaccctagcattttatctgcaacttttcaacttctgatg

SEQ ID NO: 15338 - DNA, 3000 bp, Unknown; identical to SEQ ID NO: 7990
  misc_feature (1)..( 3000): cDNA_ID_3047176_gDNA_ID_2926129_Annot_ID_196819 3000 nt of promoter + ATG

SEQ ID NO: 15339 - DNA, 3000 bp, Unknown; identical to SEQ ID NO: 7989
  misc_feature (1)..( 3000): cDNA_ID_3087925_gDNA_ID_2926129_Annot_ID_196817 3000 nt of promoter + ATG

SEQ ID NO: 15340 - DNA, 3000 bp, Unknown; identical to SEQ ID NO: 8086
  misc_feature (1)..( 3000): cDNA_ID_2139789_gDNA_ID_2926129_Annot_ID_196811 3000 nt of promoter + ATG

SEQ ID NO: 15341 - DNA, 3000 bp, Unknown; identical to SEQ ID NO: 8088
  misc_feature (1)..( 3000): cDNA_ID_3087961_gDNA_ID_2926129_Annot_ID_196804 3000 nt of promoter + ATG

SEQ ID NO: 15342 - DNA, 3000 bp, Unknown
  misc_feature (1)..( 3000): cDNA_ID_1809991_gDNA_ID_2926130_Annot_ID_138711 3000 nt of promoter + ATG
gtacccgaaaccgaccccaaaccaaaaaacccaataaataacggaaccaaagccaaatctgaatttttaaattatccattatcctaaaccacactatccaaaaaaattcgaaccgaacctaaaccaaacctaaactgaatctaatattcctcagtatccgaatacaaatctaaacttaaaaatattagttaagatatattttcgtaataccttaaatatccaaaattaaaattagagaatattgcatactcagacacttttcataactttagacgtgtttcgacactttaaaatcatcaggcactttgccttggcaaagttactctattaccctaaccggttgttttcaaaccaaatccgcattaaccaaagagatcccttaaccaacccactcgtcgaatttgcagttaccttaccctatttgacttttgaagactttttcagtagcgtaaaaacctaatccagtaaaaaactgcaaattactgtttgttgtagaagacgaatccggcgacatcatcctcttcagtttttccggtgactctgttcgctcagacgacgacgcagacgattttccggtgaccctgttcgctcagacgaagacgcagacgacgacgacttctaatttcgctcacaaaccctaaattctctccaacttctccgtcactgtccaccaccattgttgcacacgactttctctcttctgaagactccaccggtatttcccccaaatttctctttgttcttatatcgaattggatttatgtttcatgtaaaatttgaattgtcgaaactctaaaacagttatacttggctgtttgattattattttctagtttctatcttcggttttcgcttctcgtttttcgtatttaagttacaaactcatttgattgacaaaaccatatactctgtttatgaattttgctcactcttgttgcgattactcgtaaagccttaacctttttgggtttctttcacttactagtatttgttaggttattccacttcaccttgatcctatgattattctcccatgtttagctttttacttatagtggttgtgtctgtctgttgtttttttggattttaggttcatttacgggcctaaatactcaccagagtgttctccaagttcaggtaagctaccaccaatatgactcagtgtgttatgatcttacagttaataattagcactcgccctttttgtggacagggcactgaatcaattcacattgtgttatgattttacagtaactaatcttggtttactcactgattgtttggcattttcaactttggcagttatcttaaacatgttggatatggtctgatggtcaactatatttggataacatcaattcacattgtgttttgatttttcagtaactaatctttagttggtttgttaactttgttttgtttactctctgatattttggcatttttaggtacctttctgacttactcgcagagcgtcactagcttactccatatttgactgtgctagacgtgagccatactgttataattagagtttctttctttcatcataagattttataattagagtttctttcgtttcttgcttcagaactaaaatctttattcatttgatatgcattttagtggtgcttctaagttatatgttagcaaaaaacaataatagagtaattgtacaatcccataagtaagatatctttatgtgaattgtttcattgtttagttttcttttcgtatttcagttataaacaagagaatttcttgtttgggaaacgtaattcatttgtaacaaactcatttgattgacaaaaccatatgacctgttgatgaattttgctaactcttgttctcatttctgaagtagccttaattatttttggtttctttcacttactaggctttgttaggttcttagagttgtccttctgctggttcttcagagtgatccttttctaatccgttctattttattttagctgtagtttagtggttacacctaatcttctgctggtttgtgaactttgttttgttcactttgtggtattttgtcagtttcatttgcaacttgattttcttttgtggagatgaaaaagatacttcagattttgacttgtttaaaaaaaataatatctgcatatagttataatttccttttcctatatctattgctgccatatctaagatgagtttatctgtttgtgttacaggatttggaagacagttaaacatctaaatcgatagcattggcagataagtttattctgttacactatggaaggtactcttacactgttaatctaatctaagcaagcaatagagagacgtttgtgaactcgttttcatttggtcatattatctgttaatctaatcttaatcttctgaacttgtttcttgctaatgacagggtcaacgtctcaggaaccatcttctcagtgtgattcaaatcttcctaatagacttttcgccactgatcaatatccgaggggaaagctaaatatatactcaagaccagatattctatcctttctccggaaggtttttcaggggacaaaggaattggatttcattctgcaatcttgctttggacctctattcatttgccggttagtaagtgtgcgatgtctggtaagcttatgcatgccttgctatgtaggcagctggtaacgaagaaaaagtatgagctgtggacagtatttggtggatacccctgagatttgcattacctgaatttgcttgcgtgactggattgccctgtggggagttttctgaggattatgatccagatgatgatccggtttatgttgttggcatgaagagttactgggacgagttaattggtccagataagactgttaccttaggggatgtttcagacatgctaaccaacaaacacaagacattgtcatctgccacagacttaagctcgcgtttctacttattatagatggtgtactcatagcatcgaaccaaatcggtaggcctacatttaaatatgtagag

SEQ ID NO: 15343 - DNA, 3000 bp, Unknown
  misc_feature (1)..( 3000): cDNA_ID_1809911_gDNA_ID_2926130_Annot_ID_138714 3000 nt of promoter + ATG
ttatccaccacttttctttcttctttctcttcacatttggactgcttcctgatgcatcatccattggaagtcctgttgttatgataaactctctcagggagaatcgcataggttgatcagcaaatacaaaccacaattcgtcattgttggttagtattcttctctggagtaaatgatgaacgatatggcttgaaaatgctaagtccatttcagcgaattccactataggacccaagaatgtgtccattaatgtgttgaactctatcggctctaaagctttcctgacagtcgagacaattttgaaggatgaatgctttgatacccttgtaatattatctacttcgctgcctggttggaacagtcttttagggaagaacagtttttttgtactcatatttctcaaaacctgattaaatacattaacacagtcattaaattaacatagttttgaaatggttttaaaaaccatttttgtaaatctattatgcatttgtagttttcgaaacataaacatagtcattacaagtcgtttaaagaactttaaaaacccttgtaaaaccatttttcaaagtcattacaagtcgttttaagactttaataacccttgtaaaacacagtcattactccataatcctttttaaagaccgttttgaaacaattccaaaaacaaaattttaatccttttcaaagaacacagccgctgaaaatagaaacaaaaaacccttttccaaaccaactccaatcaactggtaacccataaattaagtgaggatctataaattaaaacacaaacccaaacatcaatctatttactgttaaagtttcaaaacgaaaaaactttgaaattgctacaacagagaagttaatcggcattcgaaatcttctttgaaggtttttggaacccaaatatcaaactttaaaacataaatctatcaaaattatataacaatttccaacactccttcaaaatctcaaatatcaatctattttacttgtttcgttttcaaccgaaaaacctagaaatgctagaacaaaaaagagattcggtaaaaatcgaacaaacccaaatgttaaacttcagtttcgtaaattaattaccttcaattgcttcctttttgctggataatcggattttcttcagattgttgaaaggaagaagacgaagacgacagtttctattcttctttttcttttgttgtcttttcacggttcccttccgtttttgtttttgggttatagtgaatttttgggctttagtgttttttgggcttttagtgtttttttactaaaacagtttgtttttctaaataacaggcgtaggcccaattagtaacagatacagtgtttaacattactgtaactttttcaacggttgatattctcttttaaaaacggttgtaaatcattttaaaaacggttgtaaatcttttcaaagtgactgaccctaattcggtaaaaatgtcagcagtcaatccctgtttaatttgtttttaggttatagtgaatttttgggctttagtgtttttgggcttttactgtttttttactaaaacaatttgtttttctaaataacaggtctaggcccaattagtaacagatacagtgtttaccattactgtaactttttcaacggttgatattctcttttaaaaacggttgtaaatcattttaaaaacggttgtaaatcttttcataatagcagctactgcagctttttcaacacatttaaaacgcttttaaaacagcttataaatcgtttaaaacccctgtttaaaagcatgtttaaagttcttttccattcaaatcaaagcacctgttaacccaaacaaccattatacagtaattttgtaaaacaggagttgaactaaataaacttcataaatcttgttccatacagatgttcataaaatattcaaatgacaaagtttataaatctatcttgtactccactactttttgattagaagtctgctacttctacaaagtaactaaccctaattcggtgaagatgtcagcagccaatccctgtttaatttgtttttagattatagtgaatttttgggctttagtgttttttgggcttttagtgtttttttattacctctttgtccatgatacatatttagagtatacaccagagagagatttcgctcccaggcacgacttccgaggaggacaaaagaagaatgttcctttcttttaaccagaactcacccacttttggcctctaaaagtagtaacttccaacggttaatagactggttcggtatgttccggcaagtttcctggttctccggtggttttcccctgctcagaagctttacacctctcgctgctggacatactcactcacgtctcccttaatgaagacccctcccaggtagccttctgctctcccccatcttgcttccaactgaaaaccctgaagaaaactttgtaaccctgttaaacctttgtaaccctggtaaacctgtttcaaaccctaaacaagtctcagcgcatttattgtttctcaaagaaatctcttccaacttaaccccacagctattactcacccacctgaagtaatagagaagagaatcccctatcaccttaaaggcaaagaagtagctagaggttactcccccccccccacctcgtaaaagaatcagagccccggatctggatacatctgagctaatcaaagagaactccctcactcttatgggaagactaactaacccctccgtccaacgcctctggtctatgtttccctttttatcaaacagatgtaatctaagaggcaaagccttaggctcagacttgggaaaaggctgtttccagttcaagttcgactatgaagaggatctactgaaagtcttggataacagaccttaccattatgaccagtggatggttattttgcagcgttgggaacctattatctctgagtcattcccttgtaagatccccttctggatagagcttcaaggacttcccaaacacttttggcaacctgaa

SEQ ID NO: 15344 - DNA, 3000 bp, Unknown
  misc_feature (1)..( 3000): cDNA_ID_1809919_gDNA_ID_2926130_Annot_ID_138717 3000 nt of promoter + ATG
gctctgaaaaccgaataggaaaccaaacattaaaacacaaaacagagagaagtgagtctcattaatcttaaacaatttcaaaaaattacctaaagtgttcagcaaggagacaagcattagtattggagtcatctccaccaattaccacaagaccatctaaatccatctttgtaacagtctcttcagcttgcttaaactacaaaatgtaccaaactgaatataactaagtccatcgataaaagcatcaatgcgcgccatacaaaacattaagaaaaacatttctacctgctctggagtttcaatcttgtctcttccactacatatcatatcaaatccaccctgcaaagagactcacaacaaaaactactaagaataaacacaaaatgcatatctttaagtaacaaagcttttagttccaactcttcatgatgaaaatttgattactccaacaatacattcttcaattgatccaaacaagcttctatctaatccggttaaagcaatccgaaccaaaccaaaactgaagtgaaagatgaaataaaccgatttggttctttttctatatctgaaatctgaagaaaccgaaaggctaagacaataaactaggcctgggagatcggtttaatcgggttaaacggttcggtttgatcggttttctggttttttcggtttctaaaaatcctgccgaattgaaccgaataaaaattcggttcggatcggttcggtactcgggtttttcggttcggttattaagatatataattcgccgagattaaaccaaatgatggtcatttccattcactttctatctatgttttcatgaacctaaacatctaaaaccgaaaccaaaccaaaccggaacaataaaccgacaaaaatctaaaagacagaacatctcatacctggtttctataagggtacacaaactcagaagtaagctcaatatatttccccttcatgattccagctggaccgccacgaaaaccaaacagactacttcctcttgcatattcttgcaagtaatctatcaaaccaacaacaaaaatacaatcacaaatcaagtttttaaagcctgaaaatgaaaaatttgcacaaaggaacaaatgtctactaaccaaagattccacaaataacattgtgtcctccaggtgcttgaccaccagacaacacaacaccaatcttaagcttttgatccgatgaaacttcattagattggttaggaaccaataaagctgatggttgtccaaataaattagggaataatttctcaatttcctctgcaacaacatccaaaaccaaaattgacccaatcaacaaaaattttaaccggttaagtgaatccggtttagtaagattgtgattgaaccatagaaatcggacctggatgtccggcggaggagcttggaggaccatcgatgatcttgaaaggggttttaaagacggaaggaagaggaagtgtgtggtcgatacgactagcttggacttcgctgtatacagaagtcacacggctattcgtcggaggattgatcgaaattccggcgatgtagtctcctccgatcaaatctaattgtgatgccatttgtgagtattaggattattttgttcctacaaaaatctgtgaatgtcagaagtgtgtgtcagaaagtgtttggataagtcttcttcaagtggataatgaacttgcaagtttccgaatattctaatatgccaaatttggtcatttattgttttatatggttattggaatttcaataactgcaattttcgttctaatttgtaaacattgaaatttaaaacctttttttatgattattattgtattgtagtattgatgttgtatcacacaattggaataaatcgtacttcacatcaacagtcaaaatcctctttctcgtagcgagtattatagcgacaaaaccgctcttaaccattaacatcggtcaagttcttttacttaacgcagcggcagcggcaaaaaaaaagaaaaatatttaagcagagagaagaatgtacagtgatgagagaaaaactgtcgtacatgatgaacgccaatgaagattaaggtgcttctattaaatttgagcgactcatccgatgctgttgcaactcatcgtctgtcatctacgaatcatctaaatctgttattttcaattttggtgtcgttttacttaaatgttacttttcataatacgtcgttttactccgtagttgccactgccgcagcgttaactaaaaaaacatgctaatcataactaaaaataactataggtttagaaacgaacactacaatttggttggatctcaagttacaagatattttggtccactatgcgaaaagcaggatagtcaaataaatctatatctttttatgttaacgatctgattaaccgtatatccaaatagtgaaaatttgaccgctttaatattttgattgatctagtgggtatctctctgattctagtataagggcaacctaatcatatttggatgatggaaatattggaaggatacaaaattggactattattttgttagagtactggaccatgcgagatctttctcgcttaacttgcgactgtacccttttcagagaccggggatcaatctccttttgatgcaaattttgaagctgacaacaatgactaaatcatgtttgttttatttatcgataacaacaatgactaaatcatgtttgtttggtagccgttggtgataataataacgagcaaatttcaaaagcaatctagcaatgaaaattgttaggcgttgcatcaatctttgtcaaaaactgagtgaatgtaaatcgagcaaaaaaatgttaaatatatattgttaataactatgaaaagggacatcgtcaatccaaaacccctttttctctctcaacttgacgactagggtttcttcttctccttgccgccgttggtgtggcctctcgcccaccggcgagaatcttcctctttctccctcctcttcctttcttctatggctttagtgatg

SEQ ID NO: 15345 - DNA, 3000 bp, Unknown
  misc_feature (1)..( 3000): cDNA_ID_1809923_gDNA_ID_2926130_Annot_ID_138718 3000 nt of promoter + ATG
agtatccatataacttttcattttggttatggatttttaattaagctgttaaactaaaaagtgaactattaaaacgaaagactaaataaaaaattgattaaagttgatctaaatacagtcagtaagtaccttatcaacttgttaagctgacagttaaaccacatgttgccattatggtccatactttctagggtttatgattgtctattacatcttccttaccattttatcattaggtctaaacttgttctttcgattaactaagaaaattataatcactttttagtctaacaactccggtccttcaacacaaaaaaaacaagaaaaagtgatgttcgtttcgcagttagtaacgacactaacacaatgtttttccttttcatagttttttttttttttttttggtcaaactagctttttataaatgattctactctccaacaatggagaaatggttcaacaagtacatcaaagaggctacaaaggccaaagaaaccactgctacaaatggcatacggaaagcacgaaagaaaaagatagaagcatacataacagttaagcaactaaagttgaagataccaatagtgctgaaacatgagatgagctttcggaaataagagagcacacatggtgatctgctgtccggagatgcaacatcctctagtggataaaacgcatcatgaaatacggctacgatagcataggcgacaaagcaccaacttcttgagcctacgagatgtgagaaaaacctcaatttcggagaggtgtggggttgcgaaaaccaccacttctcgatgaacaaatctggagtccaagacccaagatcatttcttgttaagacgtcatatgtcttttcctttatcctgcgtgaaatttcaagaaaccaaaccaaagaaacaataacatgaattgctcttaaccaaagtttttgaataacatcctcataatgaggtaagagaagcctaagcttatacagaatcaaaccaacctcatactgaggtaaaagaagctgaattcgaagtccaatcgaaaacaacacatcctcataatgaggtaagaacagcttgagcttaagcaagatcataacagcctcatactgaggtaaaaccagcctaaaactagtagaaatcatcacatcctcatggtgagggaactgaagtataaacgaaggcatgttccaaaagaaggtaaaaaattcaaagaaattactacctttcagagagacaaaaccttttgatagagtgactagaggatgagagaggtgtggaatagagaaccaaagctccaaacaagcgagaggaaatacttggtaccacgaactgcacacagcagtaatagatcgtaaagcaaaacccagatctagagggctcaaagcctgaacaagatctgatcctagatctgaagacctcaacagcaaaatcgagagaaaggagttggaagctccaacgagatagtctggtgggtctggagggtcgggaggttcagaaggagagaccaaactggtcaaatcttgcggtagagcacacggcggcggattcggagaagggaggagcaaaggtggagcaggagcccgagcaagcatcactaaagccatagaagaaaggaagaggagggagaaagaggaagattctcgccggtgggcgagaggccacaccaacggcggcaaggagaagaagaaaccctagtcgtcaagttgagagagaaaaaggggttttggattgacgatgtcccttttcatagttattaacaatatatatttaacatttttttgctcgatttacattcactcagtttttgacaaagattgatgcaacgcctaacaattttcattgctagattgcttttgaaatttgctcgttattattatcaccaacggctaccaaacaaacatgatttagtcattgttgttatcgataaataaaacaaacatgatttagtcattgttgtcagcttcaaaatttgcatcaaaaggagattgatccccggtctctgaaaagggtacagtcgcaagttaagcgagaaagatctcgcatggtccagtactctaacaaaataatagtccaattttgtatccttccaatatttccatcatccaaatatgattaggttgcccttatactagaatcagagagatacccactagatcaatcaaaatattaaagcggtcaaattttcactatttggatatacggttaatcagatcgttaacataaaaagatatagatttatttgactatcctgcttttcgcatagtggaccaaaatatcttgtaacttgagatccaaccaaattgtagtgttcgtttctaaacctatagttatttttagttatgattagcatgtttttttagttaacgctgcggcagtggcaactacggagtaaaacgacgtattatgaaaagtaacatttaagtaaaacgacaccaaaattgaaaataacagatttagatgattcgtagatgacagacgatgagttgcaacagcatcggatgagtcgctcaaatttaatagaagcaccttaatcttcattggcgttcatcatgtacgacagtttttctctcatcactgtacattcttctctctgcttaaatatttttctttttttttgccgctgccgctgcgttaagtaaaagaacttgaccgatgttaatggttaagagcggttttgtcgctataatactcgctacgagaaagaggattttgactgttgatgtgaagtacgatttattccaattgtgtgatacaacatcaatactacaatacaataataatcataaaaaaaggttttaaatttcaatgtttacaaattagaacgaaaattgcagttattgaaattccaataaccatataaaacaataaatgaccaaatttggcatattagaatattcggaaacttgcaagttcattatccacttgaagaagacttatccaaacactttctgacacacacttctgacattcacagatttttgtaggaacaaaataatcctaatactcacaa

SEQ ID NO: 15346 - DNA, 3000 bp, Unknown
  misc_feature (1)..( 3000): cDNA_ID_1809927_gDNA_ID_2926130_Annot_ID_138719 3000 nt of promoter + ATG
ataacattgttgatgtgatctataaacgagcagaaaatggttataactacggtgtcattcttgttcctgaaggtctaattgattttatccctgaggtatatggttactctcaaatctataatggtcaattcgagtctagtccctatatttgtgttcttcaacgttcatctattatgatccattggcaggtccaacagcttatttccgaactgaatgaagtcttagccgaaggaaacgtcgatgaagaaggccaatggaagaagaatcttaaaaaagagactttagagatttttgagtttcttcctcaaactattcaagaacaactaatgcttgagagagatccacatggaaatgtgcaggtctgcttctatccaccactaactgattcaaacaaattaaaaggctaaaacctcaagcaaactcgaactgaaaacctgtttattttgaacctttatatgaattttctcttcaggttgctaaaatagagacagagaaaatgttgattcaaatggttgaaaccgagctagagaaaaagaagacagagggtacatatgaacgcgagttcatggggaaatcacacttctttgggtaatgaattagcctaaaacatttgttaataactaattagcgtcaacataatcatattctcattctcattgtgttttaggtatgaaggaagatgcggcttacctacaaatttcgatgcaacttactgctacgcattaggttacggtgctggatcacttctccagagcggaaagaccggattaatttcatcggtttagaatttttcttcctttcttgataatatcacaaactgtttctttatttcaagattatttatattcccctttgtgatgttttgcaggttggaaacttggctgctcctgttgaagagtggacagttggtggtactgcactgacttcgttgatggatgttgagagaagacatggtaatataagtcgatactatcgtgaagtgtttgataagattatattcttttccaacattctcttttttttatgttgcaggtaaattcaagcctgttatcaagaaagctatggttgaacttgaaggtaattagtctttagctcaaaacatatattattcttcggtttcttttcttgctaacactataaatttcaggtgcaccgtttaagaaatttgcatcacagcgagaagaatgggctttgaagaatcgatacattagtcctggttagttcacatacacatgtctctgcataaagtagtaaatgatttcgttctttagtgtttttcatgctaactcttattctttctcttgttgccaggtccaattcagtttaagggaccgggatctgatgcgagaaatcacacattaatgctcgaactcggggctcaagcctaaagaattttggtactgtgagattcactcactgactcactttctttgttgttgttcgtttttgctgtaaaatctagttactgtgagtcaagtgaaccaacaagtggtcatcaatgtgtaagtcctgtattgtggtgtcacttgaatatagatgactcatgtgttaataataaagtttcgcaatttcatacactctacatgatgtttttccggaaacttaatttttcgataatcatatacttagtccattgttgaaaatctcttcgtctataagtcgattgatcatttatttttttatttttttaacaatatgcattaagtggatatgaagtggagttgaatttgggatggtaaccttttgatcacattaaaccaggttggtagttcagattttaacgtagtcatgtaactcatgttggtggttcatacttttcatgacctcatttttctccttgttgacctctacacattttcaggagatttagtgttcaaacacattgtcatttttcatagcagaatgaaggtctggacaaataaatcgaaccgaatgtaccaaaccaaaaccgaagcaaaagaaataaaccgaaccgaatatttaaaaataaccaaatggatacaatattttataaccgaaagattagaaaccaaatcaataccgaaccgaaatatttcgggtaaccaaaaaaccgaaatataataatattttcaaaaatattagttatttttagactaattaatttaaaacaagggtgaattaaatttttatgctcagacgaatgcgaaattaggaatgtatgaatgatgatttcatatttagttctctttcctcccgacaataaattctgacatatttgctcctattgagcagagatattgttggatacgtaatgattgtgcagcatttaattctaacacaagtatgaagataattaggttagtcgataatatgttatttgatatggtatcataggttatattagaagatacttgatagaagataagaataaataagactatgcccaatagtagaagactgttggagctggattcctggaatccacctgcgaaaataccaagccagcccacaaaagcccaccaagcccaccaagtagaggacctacgcagctgacgagcccacatacgcgaatgggtatttggaccagataagcccagtcacctgatgcagggagataagcgaataatgacctaggaactgaagaggagatattcgcggagcggacctgatatctcggaactgacctgccgaatatccaggaggatctccgcagatcccggacggagctaccacgtgcgtagatctatataagggagcaaggacgacttgtaagacacattcaatctagttcacattggcacacacacactttacacttgtaatctcatttcacattgtaaaagctctgtcataattaaagtccattcgttcttagcaatataactctcaaggtttcagtgaagatctagcactcctttctcataatcttaaatacaaatctctagtgtggatttcagaacccacatttggcgccgtctgtggggacggaaatagatcattccaacaccgaagctaacacatcaattgtgaccaacgatc

SEQ ID NO: 15347 - DNA, 3000 bp, Unknown
  misc_feature (1)..( 3000): cDNA_ID_1809935_gDNA_ID_2926130_Annot_ID_138721 3000 nt of promoter + ATG
tttgtattttataaatatataatcctaatttctatatattgtacaatctcttgattttatcatggcgtacaccgtaagtcgatttttaagactttaatttaaaattatatatgttttttttgttaaaattgtttgttttgttatatattttaaattatataactgtatttaaattgttagttatagagtttcacccgttgtatactgtttcgtattactatagactcaaacccgtcttaccatctaattccgttctgtggaattaaacatatttaatggatttcatccgtggtatactgtctcatattactatcgatccaaatccgtcctaccatctaaccccgttcaataaaattaaatattattttattgtgtttgttttaatagtactttaatttaaaatatatatataattcaaatcaatttcaaattttttattttaaatggttatttaatttttataaagttcatatattataatattctaaacccgtcataccatctaatcccgttcggtgaaattaaacattattttttattttttgtttaaataatatttttattaaaagatttataactcaaatcaatttaaaaggtgactttcaaatggttatttaatttttatagatttcacatttcaaatatttatctatatgtaacatatagttatgtattttataaatattataaacgtttttccgttaaatattataaacgtttaataaacattaaataattacaatatttaccttttaataaagtataatattaataatgttgtaaataattatgtgtacctaattttaagggatttgatttaaagtttgttgtttggattaaatttgaatgataacgtgattgatatattaaatcaagaattaaaatcaaatcaaatattaaggaaaaaagatttaatgtcaatggcatgccattgtaaataagtgtcaagtagaagatttatttgctaaagtggctgcaaaaatgtatatgtagatttaaattttttttgccattctgctagtcttggatgttatgttattcattcggttttggttggtatccatttggttatcggttctttttgttttaaagtttagtatctattcggttattttgaaatttcggttctttctttttaaaaatttcgtatgtattcggttattttgctttgaatattttcgaattttttgattatttttgagtattttactattttatatatattttcaattgttttaagggaaattgcactgggtatgctcagtggatacaatatttatgtcctaattttccaaaagtttcgacgctactgttgcataaataaagacgcatgtacccctatgtccattagaaatctaaatgtagctcttatatctctctgtgtcaggcggatagtagaagatcttgctttggatattttagtgggtgaattaaatttttatattattttgatagttttcaatcaaggcgtcgtttcggtccaatctatatttacctcatgttttttcttcgtctctttcatcctaattggtttgttatcagataatttgttaccgtacacgagtttttgcggttcagaattcgtctcacgtgtggcgagtggtgaatatattaactctattatgaatatattaactctattatctgctatcttgttatctcgatatttcatattgtttcactctttgtaatatctcgacacttcattgcgcgtgttgaaatttattgcgcgtgttgaagttttaacctctaacggatttataatcagatactttattatcgacattgcgcttcagaattctacattttatttactctccctacgtgtaataagtcgacatttcattgcgagaggacctatatctatattaactctattatctgctatctcgttatctcgacatttcattgcctgttttgaagttttaactcctaattggtttgttatcagataatttattaccgtacacgagtttttgcggttcagaattcgtctcacgtgttgcgagtggtgaatatattaactctattatgaatatattaactctattatctgctatctcattatctcgacatttcatattgtttattctgtataatctctcgacattttattgctcgtgttgaagttttaacccctaacgaatttattatcggatactttttaccgtatacgaatttttgcggtactctcactacacgtgtaataactcgacattttattgcgagtggtgaagccctacaactatattaactttattatctgctatctggttatcgtctttgtgggttctgaaatccacactagagatttgtatttaagattatgagaaaggagggttagatcttcactgaaacctttagagttatattgctaagaacgaatggactttaattatgacagagcttttacaatatgaaatgagattacaagtgtaaagtgtgtgtgtgccaatgtgaactagattgaatgtgtcttccaagtcgtccttgctcccttatatagatctacgcacgtggtagctccgtccggaatctgcggcgatcctcctggatattcggcaggtcagttccgagatatcaggtccgctccgcgaatatctcctcatcaattcctaggtcattattcgcttatctccctgcatcaggtgactgggcttatctggcccaaatacccattcgcgtatgtgggctcgtcagctgcgtaggtcctctacttggtgggcttggtgggcttttgtgggctggcttggtattttcgcaggtggattcctggaggggaatacagctccaacatttgccccccagcccattgagtgagtaggcgaactcgatgagcggacatataggtcaggtaagattgcaaaaatattcttgatgagaagataaatgtgattagatcagtcggttttgaggataaactcaacaatttcgttttaatttcagattcccttaaccgaaagattttgaggagatacgcgagataagtcgctgctgatg

SEQ ID NO: 15348 - DNA, 3000 bp, Unknown
  misc_feature (1)..( 3000): cDNA_ID_1809956_gDNA_ID_2926130_Annot_ID_138728 3000 nt of promoter + ATG
tcgctttgaagaccaagatatcaagttgttaccgtgaaaaatgcagtaaccggaagtggaacgccttgttgttgggcagcctgcccaatctgcatctgtgtatgcgattaacccggaagtatctgatggataaagctgcaaaccataattgagtgtaccttttagataacgaaggatatgtttgagggcattaaggtgaggttctcttgggtcgtgcatgaatagacagacttgttgaacagcgaacgagatatctggccgtgtaaatgtcaagtattgaagtgcgccggcaaggctgcggtagagtattggatcttcgactgctggtccatcgttagctgctagcttgactcgtgaatcagctggtgtggtggatggcttacagtttgtcatattggcccggtgtagtatatcggcggcgtagttatgttgattgagaaataatccagaggagtttcttttgatggcgattccgaggaagtagtgaagttctcctgaatctgtcattccaaattcttggcttagagatgaaatgatatcttggagaagcttagttgaagatgcggtgaggccaatgttgtccacatataggagaagataggctgttccattggcgcgatggtagacaaaaagcgatgggtcagccttgctttgcacaaaaccgattcgacacgcgtattgggtaaatcgttgattccaggctcgtggtgactgcttaagaccgtaaagtgaccgtttgagtaagcatgcgtggtcgggtttggtgggatcacggaatcccgaaggttgatgcatatacacgggttcttcgagtgtgccattgaggaaggcattttttacgttgagttggtgaattggccatttgcgagagagggatagttccaatacgaggcggatcgtggccggcttgactacagggctgaaagtctcgtcgcaatcaatgcctatttcttgtgatttcccatttgcaacaagtcgcgccttgtacctatatagtttgccatcgggaccaaacttatgcctaaataaccacatggaacgcacaatgttagtatctcggggccgtggtactaagtcccacgttccctttttaatttgagctgcatattcctcattcatggctgcgttccagttaggatcttctaaggcttttaggtgagaggtaggaagaggagaaataatgtcagtgtgaagagataatggttgtttgggtttggtaataccgtttttacttcgcgttctcatagagtgcgcaacgacggttggaggctgcggaggagctacttgtggagttggttcattgggaattgtttgaggtggatcaatttggcgaaggagaggagaaatagacaccggaagttgtggttcatctatgattgaaggagattctgagatagatttagagaaaggaaatttagattcatcgaaggtaacatgacgtgaaatgattaccttacgggttgcgagttctagacaccgatatcctttatggttagatgggtatccaagaaaaacgcacgcagtggagcgaggatcgagtttatgagacgaaaccggaagaagattggggtaacaaagacatccaaatactcgaagatgattgtatatggccggtttgtggaaaagtttggtgaaaggtacctcgttttgaatggtagatgaggggagaatgttgaagagatgagttgccatcataagtgcctcaacccaataggtggtgggcatgtttgcttggatgagtaaggaacggacagaattattcagtgtccgaagagtgcgttcggctttgccgttttgctgcgaggtgtatgggcaagagaagcgagggataattccatgagtggctaagtgattaaggaattgtctgttttggtattcaccaccattatcacattgtaatgatttaatgctgcagccaaattacacgtaagccataaactttaagaaagtggaaaacacttcagattttttacgaagaggaaaaacccagagaaagtgagtgaaatgatcaagatatataacgtaatattttattccactgatgctaggaaccggtgaggtccatacatcggaatgaataatttcaaaaggtgcagaaatagaagaaataactgaatcaaatggtaatctagtgtgtttccccaattgacatgcatgacaaagagacatgtcaattttagaacaattaattaagggaataagttgagatttagtacgtttatgaaacaaaattatggaagtagtacactcactatttataattaaggaaataatcgggtccactatcgactgtaatacgcgtcgcttgtaatacagaaaaacatgggccatgattcgtttgaggaaattacgtttaggggtcgccgtttgttttgttcgtttgcaggaaaccctttgactgagttcgggggtttgctttacaagatacaacaaacgtcatgggcctagcgtatttctagatgggccttaatcaaagtctgtttacagatttataattcgtagcgaaggcgttgaagtcaacttctttatcgtcggcttattcaatgccggagtgcgagctgagagaaacaactgcatttatgaatgtttcaaatcaacggaattagttaacaagtcggtgaataaaattttataataatcaaattctctttaggtttttctcgaaagtagctaaatttttggggggaatttgagctcgtttttttgaggattaggttatttttaagtaacaaaaggagatgatgattgtcagtttcggttgtgtttctttgttaccgggaaaattcatctttgcgtttctaccatggaaggtggaattctgatcagaaaattgttttgtaaacttgtcctcataatgtttaaaagccttcagactgataaaaagtgaattccttttttgcagtggatgatattgtcgttgtacaggcaggtagatggattttgtatagcactggtgaatgggaattcaagcttgattcttgtcgtcacggtagggcgatg

SEQ ID NO: 15349 - DNA, 3000 bp, Unknown
  misc_feature (1)..( 3000): cDNA_ID_1810033_gDNA_ID_2926130_Annot_ID_138734 3000 nt of promoter + ATG
ttattactatgcatttaaactatagatatgtttggatacccgttcggatatcggtttggatctgattcggtttcagattttagggttttgaagtataaacctgttcggatattttaaaatttcagattcaaattccgatcgggagctcggattcgaatattatggccagccctaaacgacgtcgtgtttgaagatttagacttgaaagcgaagaaacaaaatatacctcttttaaacaacactatatgtaagaaacccaactggaacatggtgggacctactagagacaatactcgtgttactaccgtcagatgcttttagatattgtcgtctatcctgcggtcgagatttcgtgtaatttcaaagctaataccgtgatccatgatctagtagtaacactgagaagagggactgtgtttttaatcggctgcgtcggatcatttcctgttgttatcaaatttttctaatccgtattcgctagttgctttctgcttgttcacgcgttgaatctcctcgtactttgcggaattcagatttctcgaacgggtatgtacttgttatgcctagaaactgttcgatgaaatgcctaactgagaatgtttttacaatttctctctgtttgatgtatctttttttataaatgaatgttcagggtttacaagtttggtttgttcttcagttcttgaagtgatttgatacggagcagtcatggatggtgagtgaatgattcttgtgcaattgtgattttgtttttgcttcaaggaaggccctttcttcacttatctttgggaattggtgaattagatgtagaaacttaggaaaatgctataaagctttgttctttgctattgttttgtatgatgtaaaacttcttagtataacttgttaaaatcccaatctgcattaccatcaatgcgtagaaattgcttggaaaatttaaattgaggttgcatggtttttgaatcctaagaccattttttgagaactgtaacattggtgatttcaaaatattcagttgattcacaaccaatgatggaggagactatactggtcggtgatgacctaatgacgggtcctccatctcctgttatccctcctgaaattgcttcacatgtgcttgaaggtgttgatttgtgcgatgggattttgaggaatctattcctgtgtatgtctatgtatcctcggtttggtttataattctacccttacttctgtcagtgagtagaattgttttttttttttttcttgttttaggtttgcaaatcaatgatattgaaccattttgccaagatgagcttgcattgtatcgacaatgtgctgaaaagagggtaattgttgtttagccatcggctcggattatagttatataaagcttttcattctcatatcatatccacatccatttccttgacttttcttgttcttctatcctttttgtaggacaaaatattgagagttagacttcaagagagcgaacacaagttaggattgtctatgcccattgaactcgctaaggaaaggattacgcagcttgaagctgaagccacatcttttgagaggtactctttcttaacaatgcagttatattttgttttggattttctttacatgaagagtttgtgctaccatgtaatcatgtatatctacagatgttcacaaatcgaaactatgttcttaaatccaaatgttcactaaaacagttcatttgttttataatcaggcacttgattctagcaagtggagctgaaggaatagaaggatttcgccggagatggagtttacacggtcggatgacggataccaagtactgtaacaaaacctaaccttataaaacaaccaatgctcataatataatatcatggaattaatatgctgcatgatagtagatgaacccatcatagtccttcccaaatgctgcgtacataaatctgatttttagcattatcgaaagtgaagcctataaaccctttgtgctacagtctgtattactttggtttgtttcttagcttaaagctaattgtttttattgtgtgtggatgtcacagaaaaagactggagtcactgaagcagggaatggagaacaggaacaaggttgaacatgaacataaccaacaccatgatcagtccccaaaaccttctgctccaaaaagatggttcttttggtgatttccatattgaatcatgttttggatcataaaaggttcataatcattacacttatggtgcagcaatgtaaccacttttagctattaaaagtaacattaaaaatctaaaaagttttatcttctccattaaattcgctcttagtctttacaaatgtcaaattgagtaatcaatttctttcggtaataatagggatgtgcattttaactaaaccaaaccgatccaaaccaaacccaagtttagattcaaaccattcggttatgtttcttctcaacccaaatggttcggttcggtttggtattaaacaaaccgaattgacaacccaatatatttatttaattaattaattaataatattgtatattactaaatatgaaatagtttgcacttttaatttcttttcatggtttttttgaattattaaaacttttgcttaagttaactattatcaaattcaaagttcaaacaataatgtacggttacaatgattagttttttaaaaccgaattaaaaccaaaccgaagaagccaaacggaaccaaacccgaacatagattgatccaaacccaaaccaaaccatactaacctcggttgagtttgattagaattttacaaaacccaaataaatcgaaccgaatcgaacacaaacgggaccagaaattaaacagaaatgccgaaccgaacttaataatttcttgttttttctgaagcccatttgaggcccaatatctccctctacgaaacgacatcgttcttaccgaaaacgtctgctatatctgacagtatctagcactctgcaagagaaacttcgaagattttgatattgtaacgatccgcc

SEQ ID NO: 15350 - DNA, 3000 bp, Unknown
  misc_feature (1)..( 3000): cDNA_ID_1030333_gDNA_ID_2926130_Annot_ID_196882 3000 nt of promoter + ATG
aaatttctgttaggagggattataatcgtggttgctcttgttgctcaattctacaacaagaagtttcctgagaacagagactttttgatctgctgcatcggattatatccttttgattcccatttgatttgctagggttaagatgaaattgaattgaatttgataattgtttccttgtgtatggcttgattggtttgtgttgtgtgcattagattttgagatactataatgtctattaggtatgaatgttatgtataatcagagaaatttctcaaagtctttatcttttggatataatttttgaataagatgtgggatttgtttgcttcttgactttggcaagtatgtggtgttgactgcggtaatgcagctgattctgtacattaaggagaagaacgctatcttgttcacctatcctcttgaggtttgttctcttgactgcttagaaaatgtggttaggttgtgtgcttttgggctacattcttgtttttgcttgtatcataaccagggactgttgtttctgtgattcggtgcatattttctcttcataactagaactatattttgatgtccttctgttttgtaaccacttagaattgttcttctgctagcttcacatgtgttgtagagttctcatatcttaggtgatcttggtgtttggcatttgagctatagcaggtgctacatctccctttcactccactcattctaaaccaactttttctcaatgtgttacttgattcgtcgatatcttgattattcggggtgtggaagttcgtgtaactcttggtatttgtgattctggcgatgtcttgttatatgagacacacttgttcaaaatgattctggaatttaatgttggtgtttgtggcttttgttatttgtctcatcagctggaaaaagtttcccatctcaattaatttgtatacgaaaaaatgcgatctttcaaaacatttgattagttctcattatggttaaggtcagaataggcaacaaagctagagaactccatttgttttgccatttcagtttctatgataatttggtttgcagattattcatatattttgctactgttaggacatgtatatttggttgttttgctgacttgaaattcggatggttaataatatgcagggatcattcaccagcactggtttggtggtatcttccaagttacctagattctctgatcagtacactctaaccatcgacagtgctgatccgcaatcaatctcagctgggaagtcggttcagttcaccaaaagtgtcactcaatggtctctttctttctgcatttttcatacacgtgctcacaccatatcctttgcattgcgtaagctgttgattttgtttttgtatgtgtattctaggctcacaaaagatggagttcttgtcgagggtttattctggaaagatgttgaagccctagtcaaagagtacacagaagcaggagaaccaaagaagaagagatgatcatctataatgggaaaagtatgttgctccttattagttctaaatgttacattttttttatgactaaaatcgatggtgacttggtttaaaagacgacagagtttttgcctcctaacagaagattcattcttataaattggaaccaaattttcaaatcattccgagatttttacaaccatcgatcttatcatgttctcttatttggaaatgttgccgtaagctagacttgttcggtcttgtctggcctaattcagttattttgttgttattgatcacttaagaaaatgttatgttgggctggtctggtccaacccaatcagtaataaacaacttaaaatattagttttcaaaaaatccgatctgaactgaatttgtgtctgtccgacattagcttttaaccagagtaacacttctactctaactaggtatgaccaaaatttaaccataaacatattttgaaccataattgtattgtttttaaactggaaccgaatcgtaacctgtcaattatgattaaaaccgaatcgtaacctgtcaatcgtaatcgtaaaatggttaaaaaccataatcgttaaccgtaaaaaatagaataattaccgttaaaatatatattaattgtaactgtcaattaaccataatcgtattaaaaccatagttaaccgtacggttaaccgcatagttaaaaccttaaaaatacaattttaactatttataatgcaaagataaatatcaaatgttcgaataaagattttcaaaaagtaactaaagttgcttataaaaaaatctacaacatacttttcattttcttaaaagcaattaaaaaaaagtcggatgatacgtaagattttgccttcagtattaaatgtatcgtaaccatcaaataaccataagcatatttaaccataattgtattcattcgtaattttatataatcgtaaccgttttaaccgtatatataataattaaagttatgtttacaaaaaatttgtaactataattattagttaataaatcgtaaccgtaataaccgtaaccttagtgatgcctaaattctctcattaaagcgtagataaaccggtgttaaaccatgaaaccatgagattttttccccctctcatttgtgaagttgattctaaaatttaatgaaaaaataatactacagtaaggtattaatgggggtggaatatgaagatattataagcttaggaatattaaaatagaacaagaacaaaacgtcactccacaaggaaagttactaaaattgacaaaaccacaagtaccaacaaatctaagttttgtattcctcctttttaagttacataattccccaattcctccaccatatcacgcgcccacgtgaattaaccagacaccacaaaccacacacattagttataacctccacgcgcttaatcagcgcgtataacaaatgaacgtctctctagcgttgttcgttttgatatcttctcgacttctccacttctttagatttgattcttcttctctgatctctgaaaaaacaca

SEQ ID NO: 15351 - DNA, 3000 bp, Unknown
  misc_feature (1)..( 3000): cDNA_ID_3088050_gDNA_ID_2926130_Annot_ID_196876 3000 nt of promoter + ATG
aatcgccaaattcgtctgattgttcttcttcttcggaaccgtcagtgatgatgtcttataattctctgttttgtaggtcaatgtggataacatcttctgtggttatgtctcgtatgaaaacttctctaacactttcttgttgcatcacaacatcatcaactagaccgactatacggcctctgggattaactttaataaccgataacgacacttcacgtttaggcctcacacgcggataagatagaaatcttacttgccctgcttgtgatgttaggatatatggttcaaactttgaataagtcttgtttgcattgacatcgaccacgcctaagttatttacccgtacccctcgaccacacctaagttatttacccgtacccctcgtccgataacaagatcaaaccaatcacacttgaaaaggacgcatttctaattcaaaagtctcggatattcgacttcaagaatttgttgcagaatctcattaaactctgtttcaccttcgacatggattccataatctgcagttgcccttcgactttcatttggatatgtatgaaaggtatagccgcgagtgaagtacatcggtgtggttgtgatcttagatcttggtttttgaacgatctcatgcaaccaaagtggtaaagcttcacttccacatccgttagtaacctacataaagtaaatattatgtaagtttatcatttcaacataagtaattaagatatcaaattttcgaaatattacttacatagaattttaaccatctggcaaaatcatgatctttgtaaatttcatattctttatcttctaatccaggatatgcttcacggatttgtgaatcaaacaacctacaaattaaaatgtagatgcttagcttctttaattagtccttaattagtatcacactaattattaaatataaaaaattatgaataaaatttgtctggctttgtacctctcaaattttttaatgtaatcaacatttcggagtatgtaattgtgagctgctctagaaatcgcatggtcatcccaccaaacttctttcgacttctctgcaagtctacctatttgggcaaagctatctggaacatcaggaacgttatatgtaggtgcaacacctccatcgtcatatcgtcgaggatgagtctttttggttctaacgtttggactaaagtaatacgatgtgaagtgagacgtttcctcggttaaacttcctgcgactatcgacccctcaactctcgcaagattttttgccttttctttaagagatttcatgaatctttcaaaaggatacatccatcggaattgcattggcccaccaagagcagtttcatgtagaagatgaatcggcaaatgttctatcacgtcaaaaaaggcaggagggaataatttctccaagttacagagtaacactgggatattcttgtctaattgttctatgacatcagttgtcaatgttcttgtacataggtccctgaaaaatgatctgatgcctatcatatatcgaattaatgtaagttaatagtcgtctattaataactgagttaaagaatagaaatagaatctatatatatatttattacctgcaattgcttcatgaatatttgcaggtagcaactctattaacacaaatggcaataatcgttgcatgaatacatgacaatcatgactcttcatacaagaaaacgtttgaccttgctctacgcattgtgagagtcgaaactcgcacaagagaaattgtattaagggtttcttcaaagaacggatctttttgagtttctcaaagaacaacagaattgttgattaccgcggacggtgttcttggttatattattgaaataatgaggattcgatcgtacaagtgtttagaaatatgaaaataagtgttttgccttcaaaatcagagcgtttttgatatcctgaaattaagagcgtttttgtgcgtgtctttttctttgtcctcagaagttctttatatagggctttatcagatcgcttctcgcgatattctcggaagatttctccttatcttagagctagcgaaggagatttgtctttatcttccgaagattctggaaactcctatatttggtgatatcgtcggagattctctaatatctcttccgggtttttcggaaatggtatgttcgatctcatattggttaagtcatttcttgaaggttctgtcccgacctgatgttcctccgagccgggttgagttgaccctcaggttgtggttgagcggctcggaccttgttagtcaaatgatgcgctcccgaggcgtcttaagacccacctcgggatgactttccgggttgccatccgaggcgcttcaagaccgggtcggggaatcctttgtggtgatgctctgaggcgttcttgatgtcgcctcgagatggttccttgacatgatccccgaggtgttttgagtcccggctcaggatggttcttcgacaagatctccgaggcgttaatcagggtcggctcggttacctaggtggaatccgaccccaacagtttgccccccagctcattgtcttgacggaaagccgatgagtttcacggatgggttcccgagccgactgttcatcttcttagatctaactttgtcgcttcatcttcccggacggtcaaacttccgttgcgtgccgacgactatttttgagaagtggaaaacgtttctcgcttattcccgaggatcacgcgggtgtttccttctgtcgagcccacgcgcttaaacgcgttttaattgtttgttgcggacccgacgcgcctccaaaaactctatatatacgacgagccattccttcgggagttcatttgaagttttcgaagaaaataaacgaggtttgcttccttctctctgatcttgatatttctatcgttctttcttttccggtgaagctccgccgttcttttgttatttttgattttttcggtttagaaattcttgttttctggtcgtttctcatctcatcgatcgtccctgagccaaaaatg

SEQ ID NO: 15352 - DNA, 3000 bp, Unknown
  misc_feature (1)..( 3000): cDNA_ID_3047095_gDNA_ID_2926130_Annot_ID_196861 3000 nt of promoter + ATG
aattgtgggtcaggagagacgcgattccactcgcatggcacatgaggtagagcgcgatatcgcgggtaaggaggtttccccccgcgaaactgggattcctgcccaggtccccatagatctgacaggtaccgtctccccgaccgatcctactccgagaactcgtctggatttcgcctttttacaggcacctgcgaacgctctcgtcgaaaacctggcaacagaaaacgaaacaagcacaacgcctgccttcccaaggctaccggccccacctttattaccgatgggctgttcgccccctaggtacacgtgtactagaaaccaaacaaccgcatccagtttccgcattcccgggaactcaacgcaacaacggacctctatcgctaatccgccatctgttcctcagataccaggaagcgacttccttaacagtccccaagcaccggtcgatccgcgtaacgtcgtggatatggaaacattccgcaattacgcagctcaaacaaacgcgaacatggctcaaatgcattctcgaatgcacctagctgtgagcgatgctcccgacatagatcgcgtgatcgaagaaaccaggcgcaccccgttcacggataggatcgcttgttttcgcctccgagatgtcgagagactccgtttcccagaatacgacggaacgagcgacccaaaggctcatctgagatccttccgtttcgctataacacgagcgtacctaacagacgaagaaaacgaagcaggtcattgccgtttcttcgcagaaaacctcgtaggtcacgccctcgaatggtttgctagcctcgaagggaactccattgataccttcgaccagctcgccgccgctttcttaaaacaatattcggtacttatcgaacacaggacgtctgaagccgacctctggagtctcactcaacttcagaacgaatccctgcgatcttacgtcaaaaaattcaaagcaatcaaatcgaaaattgcaaatcgaaaactgcaaacctaaacgaagaggtagccattgcagcccttcgtaacggcctttagttctcctctaggttccgtgaggaactcactgttaggcaaccagtctctttagacgatgcccttcacaaagctctccacttcgccaaagccgaagaggagcttagtgtgctggccttacgattcaaagaatctaaaacgcaaaacgctccccttgcaattaagaagcccttcaaaaaggaaaaccaaacgcaggggtagcataccttattcgcaatagacgaggcagctgagaacgagagtccagaacttgacctcggaaaatattgcaagtaccacaagaaaagaggatattccaccgaggagtgtcgcgccgttaaaaaattaatcgcagctgggggaaagactaaaaaaggttcaaaccccaaagttgaaacccctcctcccgacgaacaggaggaggagcaaactcccaagcaaaagaaacgggaacgaacaccggagggaagtgactctcccccaccttctagaggagaacgcatagacctagtctttgcagaactcgatctaggtggtcagtcaccacacctccccccgccccgcataagaaaaacatgaggtttccattacggctcttgaaattctgcagaagcgcaaccgagcacctctccccgaaacgcatcgatttcatcatgggagggtctcagctctgcaacgactcaatcaattcgatcaaaactcatcagaggaaggcagattcttacacaaaaggcaagagcccgatgatgggacctaaccaccagatcacattctgggaaagcgaaaccaccgacctcaataaacctcacgatgacgctctcgttattcgaatcgatgtaggcaactacgaactctcccatataatgatcgacacgggaagctcagttgacgtactcttttacgacgccttcaaaagaatggggcacctcgattccgagctgcaaggcaggaaaacgccacttaccgggttcgccggagatacgaccttttctctaggaaccatccagctcccaaccatcgcacgaggagtgaggcgactcacgagtttcctcgtagtcaacaagaaagctcctttcaacgcaattctgggaagaccatggctacacgccatgaaagccgtcccatcaacctaccaccaatgcattaaattcccctcggacaagggaatagcagtcgtatcggcagccaacgcagctcccgaaaatgctatatgggcagttacgatcttatcaaaaaggctgaccccgtagtactaatgatagaagacaaactcgcggaaatgaaaacagtcagatcctctgatccttctcaacgcggacctcgaaagtcattgataacacaggtctgcatagacgaatcagatcccaaacgatgcgatgggataggtcaagacctcgacctagcgatacaagaggatctcataacctttctcaaagaaaacaaagacagctttgcctggtcaagtgcgaacctccgaggaataagcctcgaagtaacctcacacgaactcaacgtcgatccgatctaccgacctataaagcagaaacgtcgcaagctaggtcccgagagggctaaagctgtgcacgatgaggtcgatcaattgctcaagatcggatcgataagagaagtaaaataccctgactggctcgctaacccggtcgtcgttaaaaagaaaaacgggaagtggagagtatgtatcgactttacggacctgaataaggcatgtcctaaagacagtttcccactcccacatatcgaccgactggttgaagccactgcgggacacgaactattgtccttcatggatgcattctccgggtacaaccaaatacttatgcacccagatgaccaagaaaaacagcttttataactgaccgaggcacctacttttataaagtaatgccctttggtttaaaaaacggtggagctacttaccaaagattggtgaatagaatgtccgccgaccagctaggtaaaacg

SEQ ID NO: 15353 - DNA, 3000 bp, Unknown; identical to SEQ ID NO: 15345
  misc_feature (1)..( 3000): cDNA_ID_2139126_gDNA_ID_2926130_Annot_ID_196859 3000 nt of promoter + ATG

SEQ ID NO: 15354 - DNA, 3000 bp, Unknown
  misc_feature (1)..( 3000): cDNA_ID_3088102_gDNA_ID_2926130_Annot_ID_196852 3000 nt of promoter + ATG
acccttgacgccaaactcctgcagaattgcttcgttcaacgcaaccaatattattccctcatgaattggtacaacccttgagaaaagttggttacatatctccaatttccactctccagtcgaagaacaaaaccactctccacatataaccatgatatagtcgtccatcgatccctgtacagataaacgaaaaaaataaatttggttatattctgattcccgtaacaaatagaatgcacgaaatttcgttttaatatcatgatatcagttttctacaatcgtacctccttggacacgacagttggccaaagatcgatgattgaaacccagaatcttatgtgtttcaatggatctcgtgtttcagtttgaataaagtcgaaaagcaagggaagttacaatgattaatctcggccgtttaatttactgaaatccgacgatcgtcgtcacgcccaaactgttttttctaaaccgaccataataaccgtatattttagaccaataccaaacgaaaccataaaccggtttgtagaaatatctcaaacgaattagtgggggtatatatgtcttatttcactccaaaagcaaggcaaagtgcctctagtttttaaagtgtctaaagtgaattaagtttctccgaaagtgcctcatagtgtaacaaacccttaaaattataaatccaaatatactagacttatttagtaattcatatatatttggaataaaagtaactaatgttatagttttgggtaatatgattatctatacccagaagaactgataattaactgacaaaaaaaaaacattgttgtcttctactgttttaattttatgacacttatacccctaaattaattaaactaaaaataaaaagttggatgaaacattagtaccttaactaaaacattagtacgttcaaataaatattatccatatatcgattatcttaccgtgttaagacaaatattattttgatttttagtatgttaccatgttattattcatatatcgattatcttaccgtgttgagacaaatattatttcgatatttagtatgttagcatgttattattctatgtaaaatgttgttataatcgttatcatgttaattatgtaacatgatgtattttattttgttgatatatatataaataaaaatatttattcataattttaagtagataaacatttatttaacatataatatgtaaatttaccacgttattatatatgttagcttgctaaacaaacagttatatacttatttttaagaataattcactgtaatgcccttttctcaatgcccttttgcaactctaccctttttcccattttcatttctaccctttctaatacttttctctccaaattacctttaatgagctacccacagacctaattcatttcttcactctctctcttcttcctccatcggaaattgtgaatgccgttgaatcccatgccgtcggaaatagtgagtttactcgccgtgaaaacccatcttcgccgtcggaagtagagctgtgtgtcgccgtcgaatctcttgcgtttccccggtttgattttataatgttagcttaaatcttcgatttcgaattgatttattcgatttttgttgttgattatgtgaattcgttatttgaatcctgattcaatcgacagtttgacatttgcttcagcttcgaatttgaattttgtttgagatttgatgattgaatttgtttataaaatccttgtaaattcgttaataccttttgaattcgttatactgtttcgtgatagatttgcttatgtgaattcgttatactatttcgtaatagattttggttctgatttagtgtttacctcttttacatatgctttcgtgatagatctatgccacttacgctttaaaacgatttgtaaaccatgttaaccacttttcaaagctttttaaatcccttgtaaattattttatgctacttacttacgctttaaaacgatttgtaaaccatgttaaccacttttcaaagcttttaaaatcccttgtaaatgattctatgctacttacttacgctttaaaacgatttgtaaaccatgttaaccacttttcaaagcttttaaaatcccttgtaaattattctatgctacttacttacgctttaaaacgatttgtaaaccatgcttctctctgtagtgacagtgtttttatgggtgttgatattgttgttatttatcttatcaggttataatgctagaattgtatcctgtttgtggcttgtggaagttgacaaacaatatgacttgggaatttgaattagacattgaattgggagcttctttaatggtcattgatgagcacattacctatcacgcgttggtggatattcttgtagaggattttcaaatagatagttcaaccaattctttgaagcttagttacaagttagtctccacatctacaaccatacaatctcatcctctttatattagaaacgatagacagcttgcaacttttatgcacaaattctcacagagtggaggattgcttcagttatgtttgactgtagagcaaatttctgtgacagttgagcagatttttcaataaccttcttgtgttataattttaaaaatccttgtaaaatcattattaagtcagtgattgtgcttattacaggctgagactacttcaaatccttttgtttctcattctctccctactgctcatgtactaatcgttttaaaaatccttgtaaaatcattattaacgtttttaaaccccttttaaaaatccttgtaaattcattattaacgtttttaaaccccttttaaaaatccttgtaaaatcattattaagtcagtgattgtgtttattacaggcttagacgacttcaaatcattttgcttctcattctacatctactactcaggtactaatccttttaaaaaatcttgtaaaatcattattaacgtttttaaaccccttttaaaaatccttgtaaaatcattattaaagatagattg

SEQ ID NO: 15355 - DNA, 2470 bp, Unknown
  misc_feature (1)..( 2470): cDNA_ID_1022613_gDNA_ID_2926130_Annot_ID_196843 3000 nt of promoter + ATG
attggttctcaacaaaatatctttaagaatccaaacatgaattttttcacatctaagacatctgtgaaaatagtcggatagatgatatcttttttactgtgtctattgcttttagtaagacagaagccatatttctgaatcttttgattagccaggtcacgatcatatatgttctcctcttctgccaaaatccaaacaacacaaactttagacgtggcagaaatcagcatttatttctaacaataattggaaaaactaaaaaaatagaaaaatatttcgagttttagctagagaatgaaacaaataatcaaaacgaaaactaaaagaaataaggtgtctgtaaacgctaaaatatttcatacctttgtgttgggtgatggtaaatggcgtggtggtgcatagtatttatagggacaactaataggttactaacccgcatctattaaatagaaaatattccctgaagcaagatatttggaagaaaatctatgaattcgatagattttgaggaatatactattgttatgcgtttttaattttttatgcggcattattatgtttctttaaatggtttttgtgtagattatgtagaggataaaatatgaaatccgaattggtgagttattacttgattttagtaaaaaacggaattgatttttatggagaagaaacattagttagtttcttaaaatctgttttgtagggatatattgcaatgtatgaatttcaaaaatggatatgatttgtttggaagaaatcgtggagttaatatggagagattttaggaaataattttgatagagacgattaagatggcaagacgttaaggaaatcataaattgtgattagcaaaagaattaattacgtttattaaagattgactaagattgcctattgttgttggaattaattaagaaaaatataggagaatatatgtgataccaaaaacatattaaaacaaatgaatgttaaatctggcagattttgaatcaaatcatattttatcctctacatagtcccaatcgtaatttctttgaaaacagaatgattctgaatggtttagaataggaatatgcttgagtatcataagtgcaaaataataatcaaaatgccgtatttagattttgatttgattctgaatcaaactgtcgagatatggtaaatgtatttacccttatttttacgcttgtacatgtaaaacagaaagatttgggtggtttataagatggaatattgcgggatttagattatatcttgactggcaagcaaatagtaaaagattttgtagttaaggtgatatacgtaaatcaggatacataattgctatgaatgaggagtggagagaatatatgattcgatcggataaattttttggaaggcaataatcaataacaatttgaataatattatagttggcgaaatttaatttgcgaggtgatatattggaattttgaattgatgatgatttgtagaatgtgtaaaaatatattgactataccatatgtaagattatatgataaatagagggttcttttaaggtttatggaattaatgcatgattaataatcgtttaacttatagaaatgtgatatcgaaatacgaatatttggtaagagtgtagtaaatatttagagattttggaatgaagtaagtaaagatatggttagttatttggttgttcggatttttaagaaatattatttcgtgtaatattgaattagtagagatttaagggattaatgtgtgcaatttatgagggtagtgcaaaataatatttttgtttaggtaattaattagtgcaaaacgtgaatagttcatcaaaaatttggtcattgtcctaacgcagacaatcttgtctgattgattttatagggactaaacatacaatatcgaaattgaaaaagaatttttcgacacaaatctttcccaaaattgtatatgtagataatttataaatttgttatcactatcttctaagaaatctgtcaaccaaaaaagtatgatataaaaaatctgtcgtatttaaaaaattctactgaataagaataaatctggtataactaaatgatagacttttgtaaaatcgctagaaatttttttaaagaatattttgtatttattttatttttaacacatgaaaaaaatattttaaacaaaaaaaacaatttaattccaatattttagaaaatattctaataattaatctcattacttaagttaacccctaaatatgttacgttttaaaactatctaagcacgttctaatacacatcatacatcatacagaaacacatatattcctccgtgctgtaacacgggtctgatcttagtaaaatagtggagagaagaatattcttctggataccttttaatattccccaaaacttctgaatcttcttctcaatttttctcgacattttctcatcgaaagctctcttcctttccctttttggcgctcaatacaatcatg

SEQ ID NO: 15356 - DNA, 3000 bp, Unknown
  misc_feature (1)..( 3000): cDNA_ID_1810038_gDNA_ID_2926130_Annot_ID_138736 3000 nt of promoter + ATG
agtagtcgtggtggaatccgaactctttccgatcttaaccgtaggtctggtcctgactccgacagtgattccgatggtccacaagaatactacacaggtggtgagaaaaggtcagtcttgtttctatttcgcaagtgatactaatggtgatgtggatcgtcttttgctatgattggatctagatattaattgtgaggtttagggtttcatgtctaaataatgtttttattggtcttgtgttgcagtggtatgttagttcaagatccatcgaaaaaagatgatgttgatgagatatttaatcaagctagacaactaggagctgtagaaggacctcttgagccacctccgagttccaggagtttcactggaactggtagattgctttctggtgaaaatgtgcctactggtaatcaacagcctgagcctgttgttcacaacattgttttctggtctaatggtttcactattgatgatggtcctttgaggaaattggatgatcctgagaatgcatcgtttctcgaggtgaatgactttcatgtgaaactgttttgatcttttgtttttggttattgatttagttattgtgttcttatagagcattcgaaagtctgagtgcccgaaagagcttgagcctgccgatagaagagctccggttcatgtcaacttgatgcgaaaggaagagaaatgccctgtgagtcccctctctgctttatccatattgggttactagtctctcaaagttgtgttagcaaaactagcattttggtcatacattacaaaaatcttggtagattttatatgcgataaccggtcttatttaatcgacttaccggtcttgtttgttattgtaggaaagacagaaacgtagggtttcatttcagggtgttggaagaactctaggtggtagcaatgaaggtagcggaagtagctcacctgtggctccagactccgctcccattcccatccaaaccgaaccagcaccatctcaaagtcttgtaatagatgaaaccgttccaaccacatcgatacagcttagactagcggatgggacacgtctggtggctaagttcaatcaccatcacacggtcaacgacattcgcggtttcattgactcatctcgacctggagcctcgttgaactaccagcttcagacaatggggttcccacctaagcctttgactgatctcactcagaccattgaagaagctggtctcgccaactctgttgttcttcagaaattctagaaaattctacaaggtgtggttctttttgtctatctatatgcattataatgagattttcataactgttgtagtaaccaggtctttaaaatgtaagttacttcttcactctgtatactcagcataagccggcggggacttgtggtatagtttttcttaatttattgaaattttatagtttcattatgcgtttatgggttaaatacagtgtttcaagaacaactatatatagttatatattattagtttggtaagagtataatcaagtgtcatatatgcatgtatatcattgttgtgttattcatcaaccaatagttactgggaagagtattaataagcttattgagaatttgaaatgtatatgactagttttcatgaaattacaacattttgaaactaatgtttgtgaaaggaagaactagaatcttttcatattattttcagtagggaaaatgtcataaaagtcatcagttaaacaaagcaccaactttgcttatggtgaacgggtcaagacccatttttatcttttatttgtgatttttttaaaaacataaaacgacgtcgttttgcagtttaacgaaagatgggaatgttgacttaacaccgttaattttttcaattagttgacatcacgatatgctttttttggcaaagttaatacaagttaatgatttaattgaaaaatcaattgaaattagtgatttaattcactagaagcaaagtttgtgctttgtttcaccatttttcgtaaagtgatcatttttatgacatttttcctatttttaataactttacttcttcctttttttttggtagggtctataactttacttcttacaatgatgttatgttcaaaataaaaaggttcaaacttcttatgtatattttcaattaagaaaaaaaaaacactttcaaatttattaaaatctaaaagaaagattaattcttcgttaaaatatttttataagaaaattacaaagtaattaagatacataacacaaatgtgtaatcaatgctttcaattttcaagtcaacatgatgaaatttcaacaatttattcgagaatggagacatgtagacatgtgttgtttcaacaattcaatatgactaactttgttaaaggacaacatttaagtttgttgaaatgaagaatgagcattcttgcaactatttacaacaagtttattttttacaataaggctaggttcaaaataacaaggtttctaaatcattgcacttaaagcatgtacaatggttgggactgtcaaagtccctaaaaaagtaaaaagtaataatattttattattttaattatattttagttttttaatataaattggacattgataagattacacttgcaaatatgtttgtgggaacgtcctttaaatgaggactttcagagactctctttcatccctcttttactttttaaatatttttgttatttttaagtggatgagcctgtataaagagacccacgttggacgtgctcttagagttcgaacactttcaaatttacgaaaatctaatacaaaattaatactccgatttttttagctagtattaaatacttccggacttgtaaagtagttggagtcaatggtttcaagtcaacaatgatgaaatttcaacaatttacttaaacgctacgagagtgagagaccctaccagagtcaactttgttgatttgttcggatttggtttttaaccaaaaacttggatgacaaaagaagaacagtaaggggcaaaaagcaaa

SEQ ID NO: 15357 - DNA, 3000 bp, Unknown
  misc_feature (1)..( 3000): cDNA_ID_1810046_gDNA_ID_2926130_Annot_ID_138738 3000 nt of promoter + ATG
aattacgagatagactcggttttagtgttagccggaaaataactaagtggaggcttggtcgccggaactttggttgtcgctggtgctcatggtgatttaaccgaagctatgaagtaaaagatttaatctctcctccttttagcactaaattgtggatgtcagaatccgcaattaggaatttgtggatgttacgaggacctttaaccttgttagccgagctaagattaaatcggacaatatttcagttaattggaattctattgtatagtaattttttctgtcccccttataaatgatgatcgagttctatttatacaatcaaatcgaatatctacgaagtaactgaacgcttgaattacgccacaaatcatgcctcattaatgtttacgtttcaaactgccacttcccatattaacgcatcctcatttagtccggtgattttctgttacgtaacacgcagatactcttacgcgtactgggcctcaaatgggccctcgatgcccacttcgtcacgggtggtttcaggcccaccgttttgagcccactgattgatgatgatggatcttgggtcggggcaaactgacgagatccgacatccacaacactaaggaacattggtcttaggtatgccgaactccagcacatctgtgtgctctatacaaagaatccgccaagggaaaaggaaaggaagtgaacctcgcagaacatattgaggaaatggatcacattacaaatggaacaatatccaaggcaaaccttggagatatttgcataccagatagtagaacaacgcacactattctaaaacataaaaaatatttctctgatttgaaatcaacaaaagttggagttaacatatcaggtcccacagacttaattgaagggacgagtaaagcaaattttggattacctgttaagacaaagttctcgataaataatgcattattttctccaaattcaaaaaaacttttgttgagtttcaaaaatatataccttcatggatatccttcgtggatatgacactcagtctgcaactgagaatggaagaagtacatgtgtatcacttctgaaaaatttggggaaaaaaacacattttggagaaattaacaagactcccatcaggattgcatcatacatagaatcacatcatgttatcaaaagagatcatgacgatttcacattgtggcacgatcagcttggtcacccaggcaccacgatgatgcaaacaattatagagagctcatatggacattcaatgaaatcccaagagatttatcaagggaataaaagaacatgtgttgtgtgttctctaggaaaattgattataaggctatcgccaagtaaaattactaaacaattaccagaattccttgaacgagcccaagacgacatttgtggacctatacacccaccatgtggaccattctattatttcatggttgatgcggacatcaaccttacttcacaaaccgttgaactacatcctgtaccacatcttatactacatcctgtaccagaagtcccggagggtatcatgacacgttcaaaggctaaacaattgaagaaaaggttcaacttagttgtgcaagatattttgagctccctagagctaggagtaaactggttcgtagcaccccataccggatatgatctaataggcgaacaagagcttgttgaagcattcacccaaatgagtcttgaacgaactactcccccaagtatgaaatatcatttgacaggttcaaggacctctagaaaccaagagaagactttggagcttcaagagacgaacgattcaagtgtcacatctgcaagtgatcgagagagtcaagatcaagaacaagacataaaggacatggaagagctcgaagacgttgattaagctactcaagaggaactccagaaagacccctacttcaaggaaccaaccaacaaacgagcacaagacttgactccagaagtacctcaagaagtactacaggaagtgactcaggcgacatgggcctaaaacgcatctaggtaaggtttattcagtttatattatctttgcaggtccacacagcccagacaacggctagaatcgttctcaatcgtgctcctcaagagaacttaattagtttccttattttagcttatttctttcttaaaacaatggtttttgtgttttgatttaaatttgtttccttttgcgtttttacatttaattttggccttagggatagctgatagactcttataaagtccccctgcaacagttgaacgatttttcacctttgattatcaataaagaaccgcattttctcacttcttctctttaaatgttcttaagagaataagcttgttctttgtcttgtgtgtgcaattcaccaaggccaagttcgtgtactgtatcagagacttatcacatctctgtggtgtacttcaatccgccagcacttcccctctaatagatcccacacaagagaaccgatcgccatcatgttagatctccatcttcgaccatctttccttcacaagagagaagcgaccgccagcttgtgaagccaccatctctatcagatacaagctcaccaccgagtcttgtatcatcttggtatcagagcgcagttgcacttcctttgccaggtttcatcgtttcttatagcctggcttactttctgaatcagtttctacattagtctagtttctgttttatttaaattaaaaaaacaaaaaacaagtatttcagtttcattttatttcgtgttaagtatttgtttttgagtttcgtaatattaatcaaaaaaaaatatatatatatatattgttaactttgtactacatcagcaagtgtgtcagaaagtgattcaacaagttttaggtttcttggttttgatctttcttttctattgttgtggtacgttgatttctttgttgtttttgtctaagcacatgtcagttttaggtaatactatgggagaggcagcagaaattccccaaaacaccgtaatgcaaatgatg

SEQ ID NO: 15358 - DNA, 3000 bp, Unknown
  misc_feature (1)..( 3000): cDNA_ID_1810061_gDNA_ID_2926130_Annot_ID_138742 3000 nt of promoter + ATG
tagagggttatgatttgttctgccgcttttgatatagccttctttgatttgagcaacacacgcatcattatcttcatataatcttgttgctcctttttgatgatgaatctacttgctttttgaatatggttagtcatggatctaagccaaacagattctctacacgcttcatgaagagcaataatttatgggtggtttgatgaagtggcgactaaaatctgcttttgagaacgccacaagttgcagttcctccaatggtaaaaacatatctggtatgtgatctagacttatgagggttcgataaatacactgcatctgcaaaaccaactttccaaaactcaaagtttctaagataatataatcctaaatcaatagtactttgaagataattgaagatgtgttttattgtaagaatatggagctttaggttgcaagaatgggactcttgattaagagggttgagagtgagaaatgaacataaggaagagatagtattgcggaaatagaagagagattgtgagaaaagagattttctctatttctttattaaaaacatacataagatacaagctatatatggacattaggtaagtaaagatctcctaagaatatgctaaacacgtcgcactctatacaagtccacatcgtgtagacaagtcactatcgtactaagaaagagacatgacctaacgttcagtttgctttaaacacatgcgatcttcttttgacttgggcgcttaagcttcaacggctacatgaggagtcttctaggtcttctagaagagcttaaggtgaagaagagtttatatgggcttctctcattgtgatgttgtacggatgggcttctcttcctccgtatggtcgtctagtttaacttgcggaaggggtttccttcattaggttcaatactccccctcaagcttaaccggagatgagtcgagattaagcttggaaccaaattcaaccacctcattaaaaaccttggtgtagaaaaacctctttggataaaactacacacaagggaaaaagagtatgggatatttgataagaggatcatggcctggttagatcaactacgccaagtttgttgtgaatatattcacacaccttggtgctcgctcctttggtgaagacgtcgactaattgttcctcactctcagtgtaatgtggtaggatcactccgagttgtacttgttctcgtactttgtggcagtctacttcaatatgctttgttctctcgtgaaacaccgagttagaggcaatgtgaattgcagcttgattgtcgcaatgcattggaatggggtttggtgtatcaatgccaaagtctttaaggagagctttcaaccacatgagttcagtagtgagctttctcatggctctatattcggcttcagcacttgagagagacactactttttgtttcttgcttctccatgttactaggtttcctccaatgaaggtgcaatagcccgttgtagaacgcctatcttgttgatctccggcataatccgcatcacaatatccaacaatctccgtgtttctattcatcccatccaaatgccttgacccggagctcctttgagatatttgagaatgtgattcaccatgttccaatgatgtattgtgggagcttgcatgtgttaacttactacattaacagcaaacaaatgtcaggtcaggttatggttaagtagataagtttaccaacaagtcttctatatctcgtagcatcttcaaatggtttgttatcatgctccccctttcgtttggccttgtaatcgtcctctagtggagtcttggccggttttaccccgagtttacctacttgggcaagaagatcaagtgtatatttcctttgggataagaagagaccttcctttgatctacaaacttctatcccaaggaaatattttaactcaccaaggtctttaatatcaaaaacacttttaagaaaagtttttgtatcttgaatacctaccttgtcattcccggagatgataatatcatctacatatacgagaatgactactatacctttttggcttggtaaagtgaagagagtgttatcggcttcagacgttttgaaccctcttcccatcaatgtggtgctgagtttgtggtaccacgctctcggagattgctttaaaccgtagatggctttcttaagcttaaagactttattgggagcattaatgacttctagacccggtggtggcttcatgtacacttcttcttcgagttctccttgaagaaacgcattcttaacatccatttgccaaagatcccactcgagattggtcgccaaggagagtactactcggaatgtatgtaactttgcgaccggagcaaacgtatctagatagtcctccccatacgtttgagtaaatcctcttgccacaagtcttgccttgtatctttcaatctccccatcactcttatatttaatggtgaagacccacttcgaggtgacagttttcttacctctaggaagctcatctcggctgcaatagcgtccctccatacttgatgagttatagcttcttcataagtgtgagggatccaatgttggtctacttttccaagaaagacttgatgttcttcgggtagatgagctagggtgcacacagcttgaattgggtgttccacggcattgtcaacgtagaattgggtctacttttccaagaaagacttgatgttcttcttcttcttcttcttcttcttcttcttcttcttcttcttcaagctctttgagcagattcttcttctttgtgttagtggattaccggatcgaatctggtcccagacgtaggcttaatcatatcgattagctgaactgggtaacaaatttacgtttttcgtttattgcttttgattttgttcttgagttgagattcaacgagtttaaagagagaattgaatcagagtgattgtgagcacgaaccgtaacaaagtggtatcggaacgttggttcgaaagattcgctcgatggtaatgacgatg

SEQ ID NO: 15359 - DNA, 3000 bp, Unknown
  misc_feature (1)..( 3000): cDNA_ID_1829882_gDNA_ID_2926131_Annot_ID_138746 3000 nt of promoter + ATG
ctcagaaatgcttatatatgttcgggttagttcggatggggttcgattatcgggtaataaccgattgggtacgggtaaccaaagacatgaaatctataaaccgatcgggttattaatagaatccatacccgtactgaaccccttaattcgggtcgggttcgggttcggggatcgggtatgggtaatgtgcccagtcctattctcaattatagatgtggagaaaccttattggaattatcctcataatatatttttggagtcccagtcaagaatgtcactgaaccagaaatttgaatccggcatgccactttttgatctgtatgccactttatatgtgttattcctattttacccttaatgaataattttttatttaatttcaaaaataaaataaaaataagaaaaacataaatattctatatataaaccctacaaaaacgttggatttaatttagtgactgtatttactcaacatatggaccccactaaaaaatattttatctttttgcggtagaagatactcgtagttataccgttgtaccatcgtattcatagttgaactttccacaattttcataatttacagttgaattagaaggtaaataattaattataagttgaacgcacactttttctctattattttgtatttccaaagttttcataatatgacatcggtgaaaacttggttttttacctattttacttcatataaggtgctcatagactaaatgtttcttatattagaaggggtgttttatatgaaaacaaaattggattttagaaaatattaaattttattgcattgatctaaaattatttatttataatttgggatattcgtatataattttacatgtataataaattatcaattttacaaatttaatcattttaacgttatttagttgaactagttgaactaattatattaaatgttaccacgaaaaccaaagaaagacatttgaactagctcaactaaataaattaaaaagtaccacgaacacaaatacatatatgtttttaatctaatccaataagttgaactagttgaattgttcatacaaatccgagaaatacaaattcaaaatacatgaattaattttttcatgtgcaacaaattgttcaagtgtatcccaggcatagtcttgttcttcctcttacgacgcttttctctggttgatggaaaccagtttttttttttttttaaccattttttggtgtataaattcaattggctctgtcgactcgggaaaaaccatctctggtcggctcatccatttcggcagccgtcgattctcaggtgatgtgtcttcctccatcgatattgttggatcgaaatctagatcgatatctcgatatttactttgtccactctggaaacgttcctcctttagagataccatctccggtcgactcatatatttcatcggtcgctttttcttccgtcgcaacgtcttcttttctttacaagcgctttgtttgttctactctgtctatagatctcgattgaagaaagtgaatgaacgaaacaaaaatggctgtttagatatttgcaatggtagtcagtacaatgtagtaactgaatcgcgttgctccccaaaccaatccattgttgcataataaaatggtataactgaaattggttcaattgatctagttcaaatggttcaactgatctagttcaaatagttcaactgatctagttcatctggttcaatcgaacgagttcaacttatatagttcaaattgttcaattgaataagttccaatcgatttttcgggcgtatgatatgagtaaatttggaaaatgccttttttatgagtttttatttgaaaaatactatatcctactttatatataaaattaataaaataacctcattataatttaatataattaaaactttaaacagaaaaaatccataagttaatatttgatttaactataatttaaaagataattcttatcttaaatattttaaacaaaattttgtccaaaataatatatataaactatatttatttcaaaactatatttatttcaaactatatgtattaagtgataaactttaaaataatatatataaactatatttattaagtgataaactttaaaatatatttagatattaaattgttaaattttaatataaatagataaataaactatatttatttcaaaaataattaaaaatgttatcaacaactaaaacatatttcgaataatacatacatttcgaatttatcaatagagatttttaaaaaaaaatctattacttatatttcaaaatttatttaattttaatttttttcttctaaatatgaatcctgtttttatttattaagaataatgcttttaaatttggataaaactgttactttacatattaaaaatatagtattatttgggccaagttaattattttattgtacttgggtcggattattttagttggatctgtatattttaattttttaaaaagttatttggatatttacatcagttttaattataaaaaaaaataaaattataaagaataagtggcattcgtgattattattttggagaaagtgacattcctgccatttattcaaatttttgtggcaagtgaagcgacaggtaaagtaaaaccgacgccgttttaaaagccagtgcctttacgctatccgttgaaaagggaatacaaagtctcgatttttttttccgatacttgaacggccagattttaaggttcctgtcatgtctgattgcgaaatcgcttttttcttcttcctgagttcctttttttctccgatgaaattttaaccgtgatgatgatgatcataatgaaacagatatgagcaagaaaaatctagcgattctgttgcgtgctagaatgagatccaacaatccctccaaattttccctctctcaatttcctgtaagcttttctttttctctgtttgaattttttggataattttgcgattctgtccaaattcacacaatttgtaatc

SEQ ID NO: 15360 - DNA, 3000 bp, Unknown
  misc_feature (1)..( 3000): cDNA_ID_1841673_gDNA_ID_2926131_Annot_ID_138747 3000 nt of promoter + ATG
ttaaatatctgtattttgcctccttttcattctattttgtttgatacaaacgattgtggtttgtaatgttaaaattaggaatgttattgaatgatatgtatatttcataaaaataataataataaaagtaggatgaatagtaaaattccaaggcatttcataatttacccattacatggtcaaaatttatcaatattttaaaataataataatcatccaatcaagattttgggaatagaatatcttaagaacttagtataattacatatatatatatatattcccttttaaatgtatcaaaaacaaactaagaacatacaaggaatttgatgtagtactatacaatttacatgcaaacagatgtagtactatttgatgacaaaaaaaaaaaaaaagatgtagtactattttatcttttcatcggaataattcggtcatgaagctattaattggttttaatgagaatttattataacagttgttgccacactgtcgaaatactaacgcctaacggctagttaaataattaacacgcggtgagaagtgagtgagttacacgaaccactaagaatctaatataggaagataagataagcatttcacacgtgtggtgtggacaatttaacagtgttaacacgcgcatggcatgtgatctagaaattagaacattaattttagcgttttgactttgacctttgaatcactaggcgtaggtatttacacgtgtaacaatataatttttttcaatatgtgatgatcatgggccaacgtttgtgggtaaaggtgtggtgttcgatcatgatccacttaaatttactgaattttagaattataacagcagaaggatataagtaatataccaaacttaactataatctacctctccttgtctatgtatactaaatgtctaacatgtaacacaaagctgtacaaaatttttaactctcaaattttttgaaataatgcaaagctgtaaaaatagctgtacgagaaaactgtacaataaaactgaaaataaaaaaatttgtaacgtttttgataaaagttttgtaaatgtataaccatcaaaactgtacaacttccagctttgataatgaattaccattcaaagctagagtttcgaattttttcattgtatacaaccatttgaacacaactcttttcaattatgccatacatacatttagttaataaattttaccgattaactagtactgacaaaagaaacaaagagtaattatatttttttgataaattgttttattagaaaaatacttaaaattgataaaaataaataaacccaattgatatatttgatattacaataccagatattgaaacaaataagacatgttttgtctatatacttccaactagaagatatttatttatccatatcctagatattttaatgtgtgaatctaatacattctcttatatacgaccaaatagtaaaacaatatgcctctcctgcaatttttcttcatccaatatttctatggagtcatcttcttcactccttcatcactcttacctctcttaccttaatccaaaatttggaaaaagacctttggtttcttatccattaatgcagagttcgcgaaaatgcaaacaaactcgcatttgttctaacaagatgtatgttcccggtatgtaacaatatgacatattcatcacaaaatgtggtttttattcatacagaattgttctatatagattaatgcctatttttctaatgttttttttgttatataattgaattaggctttggagaagcttcaccggaggctaaggcagcgaagcatcttcatgacttctttacttacgttgcagtgaggatagtgtctgctcagcttgaggttgatttgacgatttatttgattttttaatttaggtgttttgattaataataagtatgatctatatattaattaatgacagagttataatcctgaggcttatatggagttgagagaatttttagatacaaactctgtaagtgacggtgataaattctgcgccactctcatgcgtcgctcttcacgtcacatgaacttaggtaccaaaaataacacctttatatcaataatttggttataaaattctagtatgcgttttctttttgtgaaacttgttagttggaattttaattctaggttcttaaagttatacattatacttttttaacaaatttggttttcttctagtaatttagacgaaatctctttactttttccaaacattcttttcgtacattggaagttgaaacttctcactaaaataactagttatgggagttcggtttatatattcggtttcagttatatccattcgcttatcgtttttttttttgttttaaagtttagtatcccttcggttaatttgaaagttcggttcggtttcgattatttcggttttaaaatttagtatccatccggttattttgctttaaatatttttggatatttcggttattttcggatatttttggatattttcggatattttgagatattttttttattatttttgaatatttttactattttatatatattctcaagtatttttaattatctagtctagaaataactaatacttttgtaaatatatatttatattttagatatttttggttactcaaaatatttcggttggtatccattcggtttcagttatttcgattataaaattttgtatccattcaattagtttctggttatcggttctgtttacttcggttttggtttggtacatctggttcgggtaatttgctcaggcacaaaactaacagtataacacaactaatctgtgcaattcttgtaaagaaaaactacttcaaaaattgcgtgacgaaatacaattccaccaatttgcggattactaacgaaatcactttgtagatccataagtttcgtatatcttttaggtatacatatacttgatatgagataagtaaactaaaaactttgctttttttttttggtatcatggccaatg

SEQ ID NO: 15361 - DNA, 3000 bp, Unknown
  misc_feature (1)..( 3000): cDNA_ID_1829886_gDNA_ID_2926131_Annot_ID_138748 3000 nt of promoter + ATG
atttacaagaaatgttattgacatttattattatcaaataattaatattcttaattattagcatttacttatctaatatatatccatcaattctaattacttttaaaaaggaaaaatgttaggattttattaacattataatttattaaagataaataatatagttatttaaaatttataaaatatttaggatatttaccgaaaaatgtttagaatatatataatatatgaaatgtattaaattaaataaccatttcaaaagaaaactttaaattgaattgaattataaatcttttaataaaaatattattagaacaaaaaaaaaaaaataatgtttaatttaccgaactagattagatggagagacggatgtagaatattataatgtatgacttttacaacaattaaataaccatttgaaagaagatttttaaattaatttgaattatatatcttttaaattaaagtattattaaaataaaataacaaaaacaaaatgtttaatttcagtgaacgagtttagatggtaggacagatttgggtcgattgtaatacgagatgatataccaagagtgaaatctattagatatgtttagtttcagtgaacgagattacatggtaggacgagtttgagttgatagtaatacgagacgttataccatgggtgaaatcctagatataacaatcaaaatataattatattatcttaaaaacttaacaaaataaatattattaataaaataaacataattaaaatttaaattatttaataataatctagattttaacttaatgaactgtacattattgttcctatatttttaaacagtaaaaatcaaacatagtaagagttatacattcagaaaatacaaaacattaaaggcaaaaatgcttaaaaaatcccaaacaaattttaatttggaagtttaatactcaatacttttggattgaaataaaaatacatcacttaataaattgttgccaaataaaacactgtattttaattattggtcgaatcggacatataagttaacagccgttaacaggcttaacaaattaaatttttatttgtaaaaaaccaaaatagtcccgcgatattcagcggattaaaatctagtttcttgtaaatattcaattcaaacccccaaaaaatacttaatttctttcaaaaatgatttttcaacatcttaaatgtgtttccactctcaaaaactatcgctgatccactaaatttcatatccatccaaatccaagttttacttttacttaaaagcgtaatttactaaaattggtgactcccactcccacatttgatcttaaacagctttatattctcaactttcccctttccataatttaaaaatagatcttcttttacattgagaatcagcatgattggagatggctagtgggcataaaatgttaggaatagaccacataaataaagcataaatcatataattataacaataccttttattggtaattggcatacactttcaagtttatatttggattatttcattagcttttttaaaattaaaatgtagaaaaccacttcctacaattagaagaattttattttaaaatctacgacaaaagaaaatatgttccttttcaatcattctacttaaatctttaggaccaggtttaaacaaacttcatgtcggtatgtctctcattgtcaagatctgaagatttgttttttttttttttgaaagaaagaaagaaagagacaaaacttcaataatttacattttttattctagatgaataaggagtgaaaattcgggtaagcgggtcgggttcagataaaatttgatcggatacggattcttcggttaaaaatgtttaggacccaataggataaatctaaaatattggttcgattttggttcaggtccaattggatttgggttggttcgatatagattttcaggtctttttttaaaccgatactcgaattttcgggtaaataccagaactttcggataaaatttcggatttttgattaaatttaaattttcgaataaaaattcgggtatatttggattcggatcggattcgaattcgattttttggataaagaaatttagaagtcaataaaataaaccttccggttgatttaagttcagataattagattttttggataaagaaatttagaagtcaataaaataaaccttccggttgatttaggttcagataatcagttccggttttttttggccaggcctactgatgaactgttattttggtaacttctaaatatcaaaacggtcctgaatcaggactgataaaacgttaaaaaagaaaaaaaaaagatctactcgtcttctttgtttgttcgttacagtttttacaaaaaccgacagacactttatctcaagagactgggtcaggcctctgttcaatctctatcaaaatccctttcgacatcattcataaacactgacgaatcagtgaaacaatatctcaaacccagaaaccaacaataattcatagattactactatacaaaattctatataactataatctgttctcttgtgtgtttctcgcgtggcttgcgtgttacttcattcatcactgctttagcttctcctcatatgaatctcgaggcaatccagtcactgacttttctcactccccatctctagggtttctctctttcccttattttataatttatttcattgaatctctgaatttcattctcttttgtggagtacatttgtgtaaagcttagatttttatttgggtttcaagcaaaccgagaaaagaaacgattagatctcctttttctgggtttgttctcaaagatttgttctgtttcagttcttccaatttggggggattttatgttggatccagtctctaaaggttcgattttgatgtgtttccttgatatgtaatcagatttgaatcttaaagtttctatctttatgactcctttcaggttaaaactgtgagcatttggagtagcaaaagtaacaaagc

SEQ ID NO: 15362 - DNA, 3000 bp, Unknown
  misc_feature (1)..( 3000): cDNA_ID_1829890_gDNA_ID_2926131_Annot_ID_138749 3000 nt of promoter + ATG
accattgaaggaattgagaaagttgcaccgttcttgaaagtcattatcgaaaagtgagttctcttgttctctaaaattgttccattcttcatgacattaaatatgaggaacattttgactaacagtggacctttttgttcacagagatttcataaaatcgctgatacaaggtttgctagccggtattgcgttgaagcttttcctcatctttctgccagccatactgatgaccatgtccaaatttgaaggctttacttcagtttcattcttagaaagacgatccgcgtctagatattacatctttaacttagtgaacgtctttcttggaagtgttatcgctggagctgcgtttgagcagcttaactctttcctcaatcaatcgcctaatcagtacgtgactctctatctctgttaatctttcgttctttttgggttacaggcttttctaaggactcttctttttaaaaatctgtgcagaatccctaagactattggcatggcgataccgatgaaagcaaccttctttatcacatatataatggttgatggttgggcaggagttgcaggagagattcttatgttgaaacctctcattatataccacctcaaaaacgcattcttggtgaaaacagagaaagacagagaggaagcaatgaacccgggaagcatcggtttcaacactggagagcctcagatacagctttacttccttcttggtcttgtctatgctcctgtgacaccaatgcttcttccttttatcttagtctttttcgctcttgcttatgtcgtataccgccatcaggtaaatgtagtttctttctctcctaaatttgatgaaactggctagtttgataacttgaaccttctgtttatttgttttcttattctcagatcataaatgtgtataatcaagagtatgagagcgctgctgcgttttggccggatgttcatggacgggttataacggcattgatcatatctcagttgcttctgatgggtttgttaggtacaaaacatgccgcttcagctgctccgtttctcattgctcttcctgtgattactatcggtttccaccgcttctgtaaaggccgtttcgaacctgcctttgtccgttaccccttacaggtcagtttcttctacgttatctagatttattatttctgtttagttcgatttttgtcactgtttggatcggttttacgagccccagaaatggcaaaatgttgattattttacaggaagctatgatgaaagatacattggaaagagcaagagagccaaatctgaacctgaaaggttacttgcaagacgcttatattcatccggtttttaaaggcggtgataatgatgacgacggtgacatgatcggaaaattggagaatgaagtcatcatagtgccaacaaaacgccaatcgcggaggaacactcctgcaccgagcagaatcagcggtgaatcgtctccatctttggccgttattaacggtaaagaagtctagtttaacggtttcaattcagtaaaagcatctgcatacgatttaagtatgaatatagttcgtgtatgtatgtacttttatgtgtacatagagaggtttgtgtttttgcttagacgttgttgatgggttttaattgttgaagtattgaagtttcagggtatttttagaataatatcattttaattgggtgtttttcaaacaatgaatttgtggcaatcttgccaaacaaaaatatacgaaatggtcgaatagttgaggcggttagggcggacaaattcatttgcgatttaaaccatttttgtgtacctttcataaactatataagccatgctagtgtaggttgaaaaagatagaacaagttgaactacagaccggttttacttaaagttagtccgtggtggtttattgtccgattcaaaaatagagtggtttagtcgattaacggattagtctgttttctcatgtcatccattgaaagccgaagagtttgtagaagtaaacaaaaagatataaacaataataaaacaagaattgcataattttgtattcaacagaaattataaaaaaacttatagaaagccacattacagtacaagaaatcattcttatatctaataataggagaagtacatgatttttcatcccaaaaaaaaaaaagaggtacatgatttacacctcgtcgatatcctaacgattaaaaaactgtaactactgattttactacagtatatatgtatcgacaacataacaatgtcgtgacttatatactgttgagctcctaagaaaaaaataacgctattattgatttcacaatagtagcaatctcaactccatagcgaatgacgtagagaaatgtaaccaagacattttttcagaaactatgatcgatatatttcaagaaaggtagacaaaaagtgagaggctattatgtgaatgaagtaaaaaagtagaactattgaggctaatttatagagaatgaattgtaaataagcaatgcgatgggctgcaaactcttctcgtaaatctgcaaatttattaagacagtgcacctaaatattaatgaagagagttaatgaatcaataaatttgaacatcgtgacttgttaagtttggtgagaggggaataaggaacgttctatatgtaaagcaatgataattaagagttaaggagttcatagttcatgtttttctctagtttggacttgagtccaaaatccaaattaatccaaaacaatgttgagcctaaactgtcccaagactcccaacaactcaggaagctcttgctgttttccttttaatcattgtgatattacattcttgatcgtcccacagggaaaatattttagccgttagaccaaatgataaaaaactgtaactgttgatgggaacggcgtcgtttcgctaaccttcgttttaactgatctcaattctcaaggttcaaaagagtacacacacacttatctcaattatccactgaaacattcgtctccggcgaaacaaaaccaga

SEQ ID NO: 15363 - DNA, 3000 bp, Unknown; identical to SEQ ID NO: 6120
  misc_feature (1)..( 3000): cDNA_ID_3079603_gDNA_ID_2926131_Annot_ID_196954 3000 nt of

SEQ ID NO: 15364 - DNA, 3000 bp, Unknown; identical to SEQ ID NO: 6121
  misc_feature (1)..( 3000): cDNA_ID_1830072_gDNA_ID_2926131_Annot_ID_196953 3000 nt of promoter + ATG

SEQ ID NO: 15365 - DNA, 3000 bp, Unknown; identical to SEQ ID NO: 6132
  misc_feature (1)..( 3000): cDNA_ID_2139509_gDNA_ID_2926131_Annot_ID_196950 3000 nt of promoter + ATG

SEQ ID NO: 15366 - DNA, 3000 bp, Unknown; identical to SEQ ID NO: 6127
  misc_feature (1)..( 3000): cDNA_ID_1830092_gDNA_ID_2926131_Annot_ID_196947 3000 nt of promoter + ATG

SEQ ID NO: 15367 - DNA, 3000 bp, Unknown; identical to SEQ ID NO: 6126
  misc_feature (1)..( 3000): cDNA_ID_1009437_gDNA_ID_2926131_Annot_ID_196945 3000 nt of promoter + ATG

SEQ ID NO: 15368 - DNA, 3000 bp, Unknown; identical to SEQ ID NO: 6125
  misc_feature (1)..( 3000): cDNA_ID_1830100_gDNA_ID_2926131_Annot_ID_196944 3000 nt of promoter + ATG

SEQ ID NO: 15369 - DNA, 3000 bp, Unknown
  misc_feature (1)..( 3000): cDNA_ID_2138640_gDNA_ID_2926131_Annot_ID_196932 3000 nt of promoter + ATG
attttaaaaattagggatttcgcttaagtttggaatgggttttgggtcgttgggcatggatcttaattggatcggatactttgttgggtcgtctgggtttttggtcttttgccaattatttgaattttctctcatttatttttaattcgataaaaaatgggaattagaagagtggcattcctggttactttttcgcagatagtggcattcctgccatttattcgttcaattccgtgattacaccatttctctctaccaacaggtttcaattctacaaatcttcaaacccaattcattcaaacgtctttctttagctaatatagatcagcgatactagatttactcagattcatgattaaagtgaagaaagtgtgaatctttatgtgtgaaattgttgtggttcttacaagttatgatttctagggatttgaattgtgtaaaggtttgaacttcagattcatgtgtttgttttagtctgttagatcattgttacaagttatcatttttagggatttgaattgtgtaaaggtttgaactttagattcatgtgtttgttttagtcgtttagatcattagtttggtttttgtttttgtgaaggggtttttggatgatcagtttactgaattgaagaagcttcaagatgatggaagtcctgattttgtagctgaggttctgtctcttttctttgaagattgtgttaagcttatcagtaacatggctcgagctttgtaatttcgatctttctcttatctcactcataatttttgttagatcatcattgctttgtgttgtcttaaaacttcttaaaactgtgattgtgtctcaatcacaaagtctggctagaatcatcattgcttgtgtatataactcagggataagtcgacgggaactgtagattttggtcaggtaggtgcgagtgtgcattaattgaagggtagtagctcaaggtatgttttgtgtctcgcttatatcctaataacaatcaagaagtatactctgtagtagcagaagttctgtgttgttgatagatgaagctcttctcttgtactcttgtttttgatagatgaagctcttctcttgtactcttgttttcgatacagtgttggtgcgaagagggtcaaagctttgtgtgttagcttcaaggaatattgcgaagctcagaattacgaagggtaagcttgttcaacaccgcttaaggactcatcggttgagatgtttgcagcaagtggatattgagtataagaccttgacgacaaagcttcaagatatgttcaatgtgagtagtgatgacatagaatccaatttttggttcattttatgaatcattttgttgactaatgaacaaatttattgccattgttgttgttattgcagcttgagaaacaaatcattcaagctggtggtagagttcctcaagtggatattaactaaagagagactaatccataagaaacaagatgatgacttcaaatttggattgttcagtttctccttttttaaatttattttggattttggtgttttgcttaaaaactcaatagaatgtgtggaaaaaaagagacaagtgattgttgttgataaattagtagtgtgtattggttctttgatcttattcgagaaaatttaacatctttggaccaaattaatgtgattgatgatatattggttttgcttctggttttagtttgagtaagatatagcaattaccaagtgagtcttttttggctagtggtgcttctaggactctccaaaggttgtggtttttaagatccttagttcgattctctcttggaataggtaggtatgtccatttttttggatcgcaaatccgtcctgactcgtatccgtcccgaatttttcatcccattcaaatgattatttgtttgggacaattaaatatgttctagcggatacatgaacggattagataagagacaaggtatccgaattatctttaaaattttcaaaatatttgtaacaattttaaaattattcaaaagtttcccaaatttgtccatgatttatcatagttttccgaaattatccatttgaaccttactcaaattagtgaaagtttatgtgaagaaaacttaaaagtaacggttgcttgaaaaagaaacaagcacaaagaaatttgatcaccgagttcacgacttagccgctatgttccggggaagatttcttgctccccactttcactatgagaatgaggttactgacaccacttaaagtgtgatgttgtcttttggtttcagatacaagcgatagaagaaccaagatcaaagacacaaagatgataaagaacaacttgctcaagaagctcgcgtttctctcactcttgttctatatacctaaatttctcgaacctatattgttatctgaatttttcgtcccgtattttatgaagaatattttggaaaaatatgattgattatccaaattagctgctctaattacatgttacttcctatctcgatatccaaaatagacaccctagaaaaaatggtgattcattcacgataaatcacaaacctgattctaatcaatgtagattagaagtccaaaggatactctccaaaaaaaaattaaaaaaaaaatagtgattagagggagcacaaagataaatgtaaacgcgagtgtagaagataactatctctttacaaatagtctttataccttccgcaacaagtaattgttctcatcagtctctctatgagtaaaaagctaagcgaaagcgagactccacactctcagcgattcaggcgataatacctaaactcaagtaagggtttttactctggtaagctaatcaacgctctcatctttaacaaattgcgacctttatatttctctcttcttatgattcgtcctctatgttctcaaaatagcttagaactttttacaaatttcagactttcttgtaatgattcttatgggtttaaacgtatttgatgatgaataggatttgctaaggatttggggatctttgttcggtttca

SEQ ID NO: 15370 - DNA, 3000 bp, Unknown
  misc_feature (1)..( 3000): cDNA_ID_3088139_gDNA_ID_2926131_Annot_ID_196925 3000 nt of promoter + ATG
gtggctactttaggatgctttctcctaaattatgcatacctaatgttgaactcagtcgcagtataaatatgagctaattccataaatttggccatacctgcttctttgtcacctgccagcattttcttaatgttttgagacaaatgccatacacaatgtccatgtgatgcctttgggaacacatccgcgactcccttgatgatgcttccatgtctgtcgcttatgaaaaccaattccgggtcatccggtataatggaattcaactttctgaaaaaccagttccaactagcatgattctcgctatcaattacaccaaacgcaatggggtaatgatgatgactaggatcctgagctgttgctataactaacatccctccatatatggttttcagaaaagttgcatcgatcactataactttcctcattgccttaaacccttcaatgcttgcgcccaaagcgatgaataggaacttaaaatgtgcagataagcaaacaataacttgtagctagtttcagggctcccacgcacatcactaacatgtttttttttcctcttaaagctgtggagtatgaacaatccaaaccaagtcttcctttaacaatactcattatttgtttaggtttcggagtattaagaagacccggatagtcctcatgcaacacatctgctactaatcgcggtgtgcctttttgtttttcatatctagttgcctccggacaccgagagcatttatgtatttgtgtgtttcttcacacaccaaaaatctgtctcagaagtttttgtaactcttaaataccaatcacaacccttagatgcttgactgcattctaacataagacggcccgtgtcagatttaatagttttcacaccaaacacttcctctttcgaagctctattaatcaaatcccatactgcctcctttgaacgaaattcttgacctactaaatcaccaataccatcttcccattctttgacaacggcagccacactttcttgtaccggacgtgcaagatgaacatattcttccctaacataatcattatcagaatcttcattaaccccacactctatcatcaacggttcaataacagttttagaaactccattctctagcatcataggttcactaactgtctcacgttgttcctctagttcaataataggttcattagtactcagaattcctgtatttgcatccgcaaccattacaagcttggcagccaattccccaaaattcacaccgcatgaacttcttcgctctactattggaacttggctattattactttccaaatcactgcataactctacatgcaaaacaggtctaaatccctctttatccaatgacgttaaatatatcaacacatcctcattatctacaatataagactctctacatgctttagatatcttgtaactcaatttcagattccttctctcaacacctagagcaatctttctacagatcttatctattaaatccgcatatgttattctctccaaagatgatgtcttaaacactataccgtatattgaatttttgcaactccactcatggtctgctgtatagtaccctccatagtcaaagtgtaggttcgtctggatcctcttcttcatcgcctcctacaaatataaacaatatattagtaccagttgaaccacgagatggaccagtgtctgattcaatttcagttcgtccatggtttgatgctgcttacacattgattcaattcaattacattgtactaattataatacttacaggagatggaagaactaaagaaggatcgtttccagattagccgcaacaaagatcgataaagaattcgatccaacagtaacgactcacgtagcacgcagcaccggagaaatcgacggccggagaattggattagctgacctagcaaacgctccccagactcgacggagccaatgtcgaaaatcgccgatgtcggaagttaatcggaaatcgcctatctcgtcggaattaaatgtcggctcgaattaaatgaattgggtcggaattaattgggttgggtcgggattgattatttcgatttcgattttgtttttgatttttcttttaaaattaattgatataattcattaagggtaaataggtattatccactacaagagtggcatgcagatcaaaagatggcacgccggattcaaatttccggttcagtggcattgttgatcaggactctcctgtaactgagtaatgagagcgtccatggtaagagagagtgaagcggagatttggagtaggcatgaccacggttaccgttattacggttacggtttattaaccaccggttacggtttattaatcaccggttacggttataaatatattttaaccttaaccttaatcgttatatatacggttatggttaaatacggttacggttaaatacggttatggttaaataccgttacggttatttgataattataatatagttaatatatgagacaaaatattatattttttaatctttataataaaataaataaataaatagtgatatatcaaataatatttattttacgtaattatgtgtttcaaatatttataatgtatcagctatctatttttcttaaataaaccaatgaataaacaaattaatggccataattataatgattgaattaattatattttccaaacaaaaacaatattaaagagaagatgttgtgagcattaagaaatagttttaagagtataaataataataatatgaactatttatgatttgatttatggtaaaaagagtagttgagtaacttcgatcgtagtagtggacatattaaacgatttcagttactattttagtgaaataattatttatttagaattatacacagttacaactatatttttaaggttttaacaatacggttaaccacgcggttaaccgtacggttaaccgacggttttgatacggttacggttaattaacggttatggttagtatattttcttaaccgtaatg

SEQ ID NO: 15371 - DNA, 3000 bp, Unknown; identical to SEQ ID NO: 15361
  misc_feature (1)..( 3000): cDNA_ID_1829886_gDNA_ID_2926131_Annot_ID_196920 3000 nt of promoter + ATG

SEQ ID NO: 15372 - DNA, 3000 bp, Unknown
  misc_feature (1)..( 3000): cDNA_ID_3088151_gDNA_ID_2926131_Annot_ID_196919 3000 nt of promoter + ATG
cccactagccatctccaatcatgctgattctcaatgtaaaagaagatctatttttaaattatggaaaggggaaagttgagaatataaagctgtttaagatcaaatgtgggagtgggagtcaccaattttagtaaattacgcttttaagtaaaagtaaaacttggatttggatggatatgaaatttagtggatcagcgatagtttttgagagtggaaacacatttaagatgttgaaaaatcatttttgaaagaaattaagtattttttgggggtttgaattgaatatttacaagaaactagattttaatccgctgaatatcgcgggactattttggttttttacaaataaaaatttaatttgttaagcctgttaacggctgttaacttatatgtccgattcgaccaataattaaaatacagtgttttatttggcaacaatttattaagtgatgtatttttatttcaatccaaaagtattgagtattaaacttccaaattaaaatttgtttgggattttttaagcatttttgcctttaatgttttgtattttctgaatgtataactcttactatgtttgatttttactgtttaaaaatataggaacaataatgtacagttcattaagttaaaatctagattattattaaataatttaaattttaattatgtttattttattaataatatttattttgttaagtttttaagataatataattatattttgattgttatatctaggatttcacccatggtataacgtctcgtattactatcaactcaaactcgtcctaccatgtaatctcgttcactgaaactaaacatatctaatagatttcactcttggtatatcatctcgtattacaatcgacccaaatctgtcctaccatctaaactcgttcactgaaattaaacattttgtttttgttattttattttaataatactttaatttaaaagatatataattcaaattaatttaaaaatcttctttcaaatggttatttaattgttgtaaaagtcatacattataatattctacatccgtctctccatctaatctagttcggtaaattaaacattatttttttttttttgttctaataatatttttattaaaagatttataattcaattcaatttaaagttttcttttgaaatggttatttaatttaatacatttcatatattatatatattctaaacatttttcggtaaatatcctaaatattttataaattttaaataactatattatttatctttaataaattataatgttaataaaatcctaacatttttcctttttaaaagtaattagaattgatggatatatattagataagtaaatgctaataattaagaatattaattatttgataataataaatgtcaataacatttcttgtaaataagttccaacttgaagatttatttgttaaaatggcagcgaaaatgtatatgtagaagatggagatcatatgttggtggttgctattagatgtaaaacataacgttgtactgtgaactatatgccatgtatttctcctccacaaaatctattctctggaaattaacctaaatttttaaatatctgtattttgcctccttttcattctattttgtttgatacaaacgattgtggtttgtaatgttaaaattaggaatgttattgaatgatatgtatatttcataaaaataataataataaaagtaggatgaatagtaaaattccaaggcatttcataatttacccattacatggtcaaaatttatcaatattttaaaataataataatcatccaatcaagattttgggaatagaatatcttaagaacttagtataattacatatatatatatatattcccttttaaatgtatcaaaaacaaactaagaacatacaaggaatttgatgtagtactatacaatttacatgcaaacagatgtagtactatttgatgacaaaaaaaaaaaaaaagatgtagtactattttatcttttcatcggaataattcggtcatgaagctattaattggttttaatgagaatttattataacagttgttgccacactgtcgaaatactaacgcctaacggctagttaaataattaacacgcggtgagaagtgagtgagttacacgaaccactaagaatctaatataggaagataagataagcatttcacacgtgtggtgtggacaatttaacagtgttaacacgcgcatggcatgtgatctagaaattagaacattaattttagcgttttgactttgacctttgaatcactaggcgtaggtatttacacgtgtaacaatataatttttttcaatatgtgatgatcatgggccaacgtttgtgggtaaaggtgtggtgttcgatcatgatccacttaaatttactgaattttagaattataacagcagaaggatataagtaatataccaaacttaactataatctacctctccttgtctatgtatactaaatgtctaacatgtaacacaaagctgtacaaaatttttaactctcaaattttttgaaataatgcaaagctgtaaaaatagctgtacgagaaaactgtacaataaaactgaaaataaaaaaatttgtaacgtttttgataaaagttttgtaaatgtataaccatcaaaactgtacaacttccagctttgataatgaattaccattcaaagctagagtttcgaattttttcattgtatacaaccatttgaacacaactcttttcaattatgccatacatacatttagttaataaattttaccgattaactagtactgacaaaagaaacaaagagtaattatatttttttgataaattgttttattagaaaaatacttaaaattgataaaaataaataaacccaattgatatatttgatattacaataccagatattgaaacaaataagacatgttttgtctatatacttccaactagaagatatttatttatccatatcctagatattttaatg

SEQ ID NO: 15373 - DNA, 3000 bp, Unknown; identical to SEQ ID NO: 15360
  misc_feature (1)..( 3000): cDNA_ID_1841673_gDNA_ID_2926131_Annot_ID_196918 3000 nt of promoter + ATG

SEQ ID NO: 15374 - DNA, 3000 bp, Unknown
  misc_feature (1)..( 3000): cDNA_ID_3079402_gDNA_ID_2926131_Annot_ID_196917 3000 nt of promoter + ATG
atggaggagacgctgcaaaattgctaataagggtttctagtttgcttagtgggggtatatatatatatataggatttgtgaatcatggctcgcaaatttcggagatcgccgctgagtagtggagaaatcgaagaaaggaaagtgaattagggttctaagtctcagaaatgcttatatatgttcgggttagttcggatggggttcgattatcgggtaataaccgattgggtacgggtaaccaaagacatgaaatctataaaccgatcgggttattaatagaatccatacccgtactgaaccccttaattcgggtcgggttcgggttcggggatcgggtatgggtaatgtgcccagtcctattctcaattatagatgtggagaaaccttattggaattatcctcataatatatttttggagtcccagtcaagaatgtcactgaaccagaaatttgaatccggcatgccactttttgatctgtatgccactttatatgtgttattcctattttacccttaatgaataattttttatttaatttcaaaaataaaataaaaataagaaaaacataaatattctatatataaaccctacaaaaacgttggatttaatttagtgactgtatttactcaacatatggaccccactaaaaaatattttatctttttgcggtagaagatactcgtagttataccgttgtaccatcgtattcatagttgaactttccacaattttcataatttacagttgaattagaaggtaaataattaattataagttgaacgcacactttttctctattattttgtatttccaaagttttcataatatgacatcggtgaaaacttggttttttacctattttacttcatataaggtgctcatagactaaatgtttcttatattagaaggggtgttttatatgaaaacaaaattggattttagaaaatattaaattttattgcattgatctaaaattatttatttataatttgggatattcgtatataattttacatgtataataaattatcaattttacaaatttaatcattttaacgttatttagttgaactagttgaactaattatattaaatgttaccacgaaaaccaaagaaagacatttgaactagctcaactaaataaattaaaaagtaccacgaacacaaatacatatatgtttttaatctaatccaataagttgaactagttgaattgttcatacaaatccgagaaatacaaattcaaaatacatgaattaattttttcatgtgcaacaaattgttcaagtgtatcccaggcatagtcttgttcttcctcttacgacgcttttctctggttgatggaaaccagtttttttttttttttaaccattttttggtgtataaattcaattggctctgtcgactcgggaaaaaccatctctggtcggctcatccatttcggcagccgtcgattctcaggtgatgtgtcttcctccatcgatattgttggatcgaaatctagatcgatatctcgatatttactttgtccactctggaaacgttcctcctttagagataccatctccggtcgactcatatatttcatcggtcgctttttcttccgtcgcaacgtcttcttttctttacaagcgctttgtttgttctactctgtctatagatctcgattgaagaaagtgaatgaacgaaacaaaaatggctgtttagatatttgcaatggtagtcagtacaatgtagtaactgaatcgcgttgctccccaaaccaatccattgttgcataataaaatggtataactgaaattggttcaattgatctagttcaaatggttcaactgatctagttcaaatagttcaactgatctagttcatctggttcaatcgaacgagttcaacttatatagttcaaattgttcaattgaataagttccaatcgatttttcgggcgtatgatatgagtaaatttggaaaatgccttttttatgagtttttatttgaaaaatactatatcctactttatatataaaattaataaaataacctcattataatttaatataattaaaactttaaacagaaaaaatccataagttaatatttgatttaactataatttaaaagataattcttatcttaaatattttaaacaaaattttgtccaaaataatatatataaactatatttatttcaaaactatatttatttcaaactatatgtattaagtgataaactttaaaataatatatataaactatatttattaagtgataaactttaaaatatatttagatattaaattgttaaattttaatataaatagataaataaactatatttatttcaaaaataattaaaaatgttatcaacaactaaaacatatttcgaataatacatacatttcgaatttatcaatagagatttttaaaaaaaaatctattacttatatttcaaaatttatttaattttaatttttttcttctaaatatgaatcctgtttttatttattaagaataatgcttttaaatttggataaaactgttactttacatattaaaaatatagtattatttgggccaagttaattattttattgtacttgggtcggattattttagttggatctgtatattttaattttttaaaaagttatttggatatttacatcagttttaattataaaaaaaaataaaattataaagaataagtggcattcgtgattattattttggagaaagtgacattcctgccatttattcaaatttttgtggcaagtgaagcgacaggtaaagtaaaaccgacgccgttttaaaagccagtgcctttacgctatccgttgaaaagggaatacaaagtctcgatttttttttccgatacttgaacggccagattttaaggttcctgtcatgtctgattgcgaaatcgcttttttcttcttcctgagttcctttttttctccgatgaaattttaaccgtgatgatgatgatcataatgaaacagat

SEQ ID NO: 15375 - DNA, 3000 bp, Unknown
  misc_feature (1)..( 3000): cDNA_ID_3079398_gDNA_ID_2926131_Annot_ID_196916 3000 nt of promoter + ATG
ggctcacctgagagtaacgacatagaatgatcaaagaatgtggtcaacttacaatcaaagagacatgagtccagagaaagtaactaaccaggaacagatggatgaaaatatccaaagcatcgacggcctattcccaatcttcttttaagatccaagaggttgctgattggatgcaccgccttataaataatgcgttattagacaaaacttttaacattctgaaatagctgagattactataatggagactagtactgcatacctcatatgcaacaattttctcaagcaatgaagcaggatcatcccaagtaatttgatgaagctctaaagtggcaggactaagccacataccgagtttctccttcagaaaagaatctaatgttcgcaaagacggcgtgttctcttttctatacattagaaacaaccatcagtgtcagatacaaccggaaatgttttaccaactgattcgaaactatcttcaaatatttgagtttccagtcacataacaagaggacaagaaacattacgagagtatcgacagaagatcagctcggaggatggacaaaaatctcaaccctccaggatgtgtattcaacctctcaaataaaacttcatatgttggcctaagagcatgcctcagattcctctcaatgcgatagaaaacagaagataaagcccccttatcatcatcacctaaagaaaagtactcgcccatcaatggagaatgtaacgaagaatcacacaagaaaaaacaagaatggcacaagaatgactctcactagctggagtttcaagtccaagatattgcttaacaagttctcggacttgctctcggttaacatcatactccttggctaaaacaagcagtaacttctcgcggtcttcaagcgaaaggctaaagtaaccctataagcatttttaaccatatatgtaatcagattgaaaaggttaaacacatcaaagatcagaatcaagaaacaacaatgtgaagatagttttacctcttgaaaatcattaagagtaatgtctaatacaccagttttactagctgagatagctgagtgcattgtctctcgaacaacatcataaaccctaaaacaaaaaccaaactcactactgcaaagatcaatggtgctaaatcaatatctacaatgagaaattaccttccagtggtaccaaaatcattagaattttgcacaatgtgatctctagaatgattctcttgaggattagattgaatttccttctgacaacaaagtcaacaaaccattattatagagtcaaattagccttattatattcttatcttcttaaaaacattcaagctccgattaaagccatagccaatttctcactctctctctctctttttcatcaaaagatgtaaacttttcattgcccatgattacaaattgtgtgaatttggacagaatcgcaaaattatccaaaaaattcaaacagagaaaaagaaaagcttacaggaaattgagagagggaaaatttggagggattgttggatctcattctagcacgcaacagaatcgctagatttttcttgctcatatctgtttcattatgatcatcatcatcacggttaaaatttcatcggagaaaaaaaggaactcaggaagaagaaaaaagcgatttcgcaatcagacatgacaggaaccttaaaatctggccgttcaagtatcggaaaaaaaaatcgagactttgtattcccttttcaacggatagcgtaaaggcactggcttttaaaacggcgtcggttttactttacctgtcgcttcacttgccacaaaaatttgaataaatggcaggaatgtcactttctccaaaataataatcacgaatgccacttattctttataattttatttttttttataattaaaactgatgtaaatatccaaataactttttaaaaaattaaaatatacagatccaactaaaataatccgacccaagtacaataaaataattaacttggcccaaataatactatatttttaatatgtaaagtaacagttttatccaaatttaaaagcattattcttaataaataaaaacaggattcatatttagaagaaaaaaattaaaattaaataaattttgaaatataagtaatagatttttttttaaaaatctctattgataaattcgaaatgtatgtattattcgaaatatgttttagttgttgataacatttttaattatttttgaaataaatatagtttatttatctatttatattaaaatttaacaatttaatatctaaatatattttaaagtttatcacttaataaatatagtttatatatattattttaaagtttatcacttaatacatatagtttgaaataaatatagttttgaaataaatatagtttatatatattattttggacaaaattttgtttaaaatatttaagataagaattatcttttaaattatagttaaatcaaatattaacttatggattttttctgtttaaagttttaattatattaaattataatgaggttattttattaattttatatataaagtaggatatagtatttttcaaataaaaactcataaaaaaggcattttccaaatttactcatatcatacgcccgaaaaatcgattggaacttattcaattgaacaatttgaactatataagttgaactcgttcgattgaaccagatgaactagatcagttgaactatttgaactagatcagttgaaccatttgaactagatcaattgaaccaatttcagttataccattttattatgcaacaatggattggtttggggagcaacgcgattcagttactacattgtactgactaccattgcaaatatctaaacagccatttttgtttcgttcattcactttcttcaatcgagatctatagacagagtagaacaaacaaagcgcttgtaaagaaaagaagacgttgcgacggaagaaaaagcgaccgatgaaatatatgagtcgaccggagatg

SEQ ID NO: 15376 - DNA, 3000 bp, Unknown
  misc_feature (1)..( 3000): cDNA_ID_2138720_gDNA_ID_2926131_Annot_ID_196913 3000 nt of promoter + ATG
ataaaaagatagatgagttctcataagagattacaaggagtttataaagaaagaagtcttggaacacactcacaagactaccttggaaaatacagactagtttgaaagtttaaaaataacccttccacttcttggctccaaaatgactcttgatatgctattttcgtcacttctcttgaccagcaaattatccacttggtttggggtcttcttgagcttgtgatggtcataaaattggttggacttcatatatattacattgggccaacttctgaatgttataccattgtttggattatcaaatgggtgatttgaatgtgaatcatttgcctcattaaaaaccttgtcaagaaaaaccattgggacaaaacttgacaagggaaaaatagtacaaatgagacatatgcccatttgatgatcatgtatcaaaaccaatgaggttaagataacatctttcccatactctttctccgttataagttcattttctgtttcaaaatgctcctcaggttcaagctgctcctctgcttcaagctcttccgcggctacaagctcttgatcaaattccatgtcctttgtgctttccatgatcacatcacataactccaacgaatccactataatacgaccaacatcttcggtctacatgaagtctttcacgaattcgataaagttcttgtcttgtcagagttttaatataaatttaatagagatggaaattaattgatttcaataatttttgatttgactaaattaattgatttgattaagttttgaaaaaaaattcatataatcatattaccatctaatataaatatactaaactataatttaaaaaaactatagtaattttgtatatcttcaaaagtttcctttctcgttttaataaatgtatataaattttgattagtaaatactatcacaaccatttatttttcactaggttaggcccgcctaaataggcgggtttaaaaaaccaattataaatttttactgatgatatttgaattctaaatagtaaatgatacttcctatttttaaatatttaatttagtaaatttgcttaaaatcaaattttaatcttacaattttgattttgctgtacacttaatgactttaacggtattttattgatgaaaattaaattttaaatagtagtcaacacatatttttctgtattttgtttagtaattttctaaaacccaaaattttaatcttacacattctattttgctatcaatttaactatctatttcatcataatattcccgattttgattatgcacatattattttaatgaataagtgttaaattttatatcaaaataatatgtatatcatatcaaatcaatataattacttcatatgaaaataattaataaataacaaaacataatgaaccaaaaaaaagaaaaccacaaaatattttggaaaagaaaaattgtttaagatatagttttgctatattttataatctcataaattagttttacctaatgtcaaactcatattagatgacttcaaatttatgaataaaacattgaaattttatattaacattttcacaaataataaaatatcaatccctctaaaccctattttcctaatttttggtggtttctctaatgactacatgcattaaaattcttatattaaaaaataaatataactatacaaaaattcccagtgggtattcaaataaaatactatattaattgaaaatacaattttatcgaactaaattaatgttaaataaattattttgttattttatacttcagtgggttcttaattagttattatcattactaatggttttgtttaaattaataaatgctagattaatttaattgaccaatatcgcatgtaaaatcaaagtttttaattttatttttgattaataaaaattattatgtatatatatagagataaaaattagtgtatgtaaatttgtttactttttttaggtttctattttcttagagaataaaattttttaaatctttgatgacacatgtaaacatcttatcgttaaactttccatctatcatgatctcgtgagttagtaatttttgaaaccgtactttatataataagatttgtaaaattttctatgatttgattaaaatttaatactgatgttatgaatataaaaattaaaatttccaaatctccactccctcatcaaatctccctcagccttatcaaatctccactccctcatcttcactcccccatatattcacttccattgacattttaagaaaaaggattgtcaaaaggaaatggtatacattgttatattaccaaaatttgataacaaaatatagtactaaaaaaagaatttgttgtctgccttgttaaattttgtttttttgtatatctagtctatatatacatttttacagcacttttttgaagataatgttgaagatttgaggaataattcaacaattaattcaaatgggtgggttttaaccggtttaactctgtttggatcctagattgcataattttaaggaataatgttatcctgatcttggattgcagaagtttaaggaatatgtttcaatgaatattacctacaagatttcgtaaacataattaatattctcgagtgcaaatatattctcttatataatctttcaaaattcttgcaatctctacaattatgcaaataacaacctttgattcctaatatctcgatacaatatatatctcaatgacatcaatatattctcaaaatcttctgtgtaaactaaccaaggtttaaatccgtagcaaacttttcttttccctcccaaatcatcaaacgatctaatatctaatactcctattacaatattttcaatagatcttctcacacttgcagttacggaaaatctcaacaattattctcattaacataactagatcatgaaaattctgaatttaaaacgcaataagatcattttaatttaaaacttactgaattaaaaacattcagagtggatacaaatg

SEQ ID NO: 15377 - DNA, 3000 bp, Unknown; identical to SEQ ID NO: 6123
  misc_feature (1)..( 3000): cDNA_ID_1830120_gDNA_ID_2926131_Annot_ID_138755 3000 nt of promoter + ATG

SEQ ID NO: 15378 - DNA, 3000 bp, Unknown; identical to SEQ ID NO: 6124
  misc_feature (1)..( 3000): cDNA_ID_1830108_gDNA_ID_2926131_Annot_ID_138758 3000 nt of promoter + ATG

SEQ ID NO: 15379 - DNA, 3000 bp, Unknown; identical to SEQ ID NO: 6125
  misc_feature (1)..( 3000): cDNA_ID_1830100_gDNA_ID_2926131_Annot_ID_138760 3000 nt of promoter + ATG

SEQ ID NO: 15380 - DNA, 3000 bp, Unknown; identical to SEQ ID NO: 6126
  misc_feature (1)..( 3000): cDNA_ID_1009437_gDNA_ID_2926131_Annot_ID_138761 3000 nt of promoter + ATG

SEQ ID NO: 15381 - DNA, 3000 bp, Unknown; identical to SEQ ID NO: 6127
  misc_feature (1)..( 3000): cDNA_ID_1830092_gDNA_ID_2926131_Annot_ID_138763 3000 nt of promoter + ATG

SEQ ID NO: 15382 - DNA, 3000 bp, Unknown; identical to SEQ ID NO: 6128
  misc_feature (1)..( 3000): cDNA_ID_1830084_gDNA_ID_2926131_Annot_ID_138765 3000 nt of promoter + ATG

SEQ ID NO: 15383 - DNA, 3000 bp, Unknown; identical to SEQ ID NO: 6129
  misc_feature (1)..( 3000): cDNA_ID_1830080_gDNA_ID_2926131_Annot_ID_138766 3000 nt of promoter + ATG

SEQ ID NO: 15384 - DNA, 3000 bp, Unknown; identical to SEQ ID NO: 6136
  misc_feature (1)..( 3000): cDNA_ID_1830076_gDNA_ID_2926131_Annot_ID_138767 3000 nt of promoter + ATG

SEQ ID NO: 15385 - DNA, 3000 bp, Unknown; identical to SEQ ID NO: 6121
  misc_feature (1)..( 3000): cDNA_ID_1830072_gDNA_ID_2926131_Annot_ID_138768 3000 nt of promoter + ATG

SEQ ID NO: 15386 - DNA, 3000 bp, Unknown; identical to SEQ ID NO: 6111
  misc_feature (1)..( 3000): cDNA_ID_1830057_gDNA_ID_2926132_Annot_ID_138771 3000 nt of promoter + ATG

SEQ ID NO: 15387 - DNA, 3000 bp, Unknown; identical to SEQ ID NO: 6112
  misc_feature (1)..( 3000): cDNA_ID_1830049_gDNA_ID_2926132_Annot_ID_138773 3000 nt of promoter + ATG

SEQ ID NO: 15388 - DNA, 3000 bp, Unknown; identical to SEQ ID NO: 6113
  misc_feature (1)..( 3000): cDNA_ID_2997065_gDNA_ID_2926132_Annot_ID_138775 3000 nt of promoter + ATG

SEQ ID NO: 15389 - DNA, 3000 bp, Unknown; identical to SEQ ID NO: 6114
  misc_feature (1)..( 3000): cDNA_ID_1381119_gDNA_ID_2926132_Annot_ID_138776 3000 nt of promoter + ATG

SEQ ID NO: 15390 - DNA, 3000 bp, Unknown; identical to SEQ ID NO: 7845
  misc_feature (1)..( 3000): cDNA_ID_1989575_gDNA_ID_2926132_Annot_ID_138780 3000 nt of promoter + ATG

SEQ ID NO: 15391 - DNA, 3000 bp, Unknown; identical to SEQ ID NO: 7846
  misc_feature (1)..( 3000): cDNA_ID_1989574_gDNA_ID_2926132_Annot_ID_138781 3000 nt of promoter + ATG

SEQ ID NO: 15392 - DNA, 3000 bp, Unknown; identical to SEQ ID NO: 6111
  misc_feature (1)..( 3000): cDNA_ID_1830057_gDNA_ID_2926132_Annot_ID_196966 3000 nt of promoter + ATG

SEQ ID NO: 15393 - DNA, 3000 bp, Unknown; identical to SEQ ID NO: 7851
  misc_feature (1)..( 3000): cDNA_ID_1989573_gDNA_ID_2926132_Annot_ID_138782 3000 nt of promoter + ATG

SEQ ID NO: 15394 - DNA, 3000 bp, Unknown; identical to SEQ ID NO: 8147
  misc_feature (1)..( 3000): cDNA_ID_2105982_gDNA_ID_2926132_Annot_ID_196993 3000 nt of promoter + ATG

SEQ ID NO: 15395 - DNA, 3000 bp, Unknown; identical to SEQ ID NO: 8148
  misc_feature (1)..( 3000): cDNA_ID_1810562_gDNA_ID_2926132_Annot_ID_196992 3000 nt of promoter + ATG

SEQ ID NO: 15396 - DNA, 3000 bp, Unknown
  misc_feature (1)..( 3000): cDNA_ID_3088190_gDNA_ID_2926132_Annot_ID_196988 3000 nt of promoter + ATG
tctttgtttttatcatgtcatagtttatgatgactatgattaaatagattaaaatgtgcattagtttacacgtactattttagtatttttatagtctaatagttcacttacgcatttttgccaaacttgaatttggcttgcgacacatcaaacaaaattatcagaagtgggtcaaatatttgaatcgacctgaatgtcacattattccaaacggtatatattattgtacagagtaaaccaaaaccctactaaattcgatttcgtgtgttcataagttaatgactttttttttgaatttaacatattaaagatacattaaaactattaacttaaattcattattttaagtaaattttgtctataatcgaagtaaaagtttcaagccgtatcgaaagaaaaacttaatatttctaatctagtaaatctaaaatccgaaattcgaaataaaccaaattttgttttaaccaaaaaatttattttctttttttttgtcttcaacataatttttaaccaaacaatctaaaaattataaactgatctttttgtacaaaacaaataaaagatttatctttctctcatcaatcatgtaaggcccaattaaagcctcgagagcagcccaatctcagacctcaaattatatttttctgatattttaaaaaatccaaaatgctcagaattcacaacttttcgaaatttccaattccatcatattcaattgacaaaagacagtagaaattgatgaaactgaaaattccaattgcagttctagtcaaataaaaccttgtctaagagcatcattaaagggaggatattagggagtttttaggtttataaatcattaaatttatatgttaattgatcaattcagtttagaggtggtttaagctaagagatgctcttaagcaaaatgcggtggtgacatggaataatttggttggttggaagaaaaatattaaacaaaaaaacatttttttgcgtttaattatttttctcccctctttctctctttcctcgcgattgaaggtaggaagcagaagatctccttaaaatcgatatggccgtctcgcgttctccggtcctgtgtttattagacccgggcgtcctcccgatgttagctctcatctcaaccgactctggttgtccacgaccaaatcgacgagaaatcaatagttaaactttatgtttacatgtatgtttaaaaaattattatgtcatctattgatcaaatttaagttcaaaaaaatttaaaaatttaaaaattaattttttaaaaaactccaacttaatatactactattgaggttgctaaaaaattaaaaacttactaaaactcttaacaacaaaatttcaaaatttattcattaaatatgattaatatcctaccattgaggatgatctaatcttttgtacagaagaccgcctaaactcacaaaagacgttgccgtttgtatggtatccattagttagcaccaaccctctttctctaacgtgaattttctggctcaacttcaactacagccacttctgcctcaacttcaactacggcgacttcaacttcaactacaaccacttctacctcaacgtcttcctcttcctatgggcttcctcttcaacaacgtcatgtgaaacctcaacaaaatcctggttctgcacctcaattaaattatgattcccaccacctccgttcccccaccacctccattgatgttgccatccatataaaaaaacaaacataaccaggcaaccacatgcgaacatcttgcacaactgctcctttgttatgatgtcccgtgttcactgaccaagcatttgctaaactaatcagatggttccatctagatgctgataggcggcacaagacaatcaagaactgttcttgttcttaatcagccattctactgaaccaaaaagtcaaaaatcagcatataaaacacggagataaattgatttaactgaaacaaacacaagtccacaatctaattgtcatgactgaaacaataacccgtttagtatacaactgagttttgacaattcccagacgggaagtaaacatataacttcacggcgtcgttgatggttacgtaagagtaatgattcagtgcggtgcatgtgcatggtatgaaagaagagttattgtgttttttttttagattttgaaaattaccttatttttaagtttttatttgaaaaatatacatttctctacttttaataaagattaaaaaatttaatatgtaaatgacaattttgtccaaatttaaaagaaaagccacattctttataaattaaaaacaatattcgaaatttaatattttaaagtctatcacttaatatttttcacgttataaaaaagatcaatctttcatagattgtttttcctttatcttttttgttcttggacaattttgttttaatatttaaaataaaactgttatctttaaaactgttagttatcagatattaattcatgagtttttctgttttaattttatattcttttttattattaccaaatattaattagtctattttagtaattttatattggatcattggcattttgcctaacttgttttaagtttaattatttttctgaaactaatattggaccattgacattttgcctaacttattttcttattttctttttgtcttcaacataatttttaaccaaccaatctaaagaataaagattataaactgatctctttgtaagaaatataaaagagttatctttctcttatgacatcaataattctaaggcccaattaaggcctccagagcagcccaatctgagatctcgatatattttttccggtatatgaaaaaaaagtccaaaatccagctcaaaattcaaatctttcaaaaatttcttacagttcgagtcaaacatatacaataatacaaaccacaaatgtgttctcaatcaaattcctccaagtttatcttcttcttcaatccaagaagaaagtctacgaaaagtctcctcctttactaatg

SEQ ID NO: 15397 - DNA, 3000 bp, Unknown; identical to SEQ ID NO: 7846
  misc_feature (1)..( 3000): cDNA_ID_3088205_gDNA_ID_2926132_Annot_ID_196981 3000 nt of promoter + ATG

SEQ ID NO: 15398 - DNA, 3000 bp, Unknown; identical to SEQ ID NO: 7845
  misc_feature (1)..( 3000): cDNA_ID_1989575_gDNA_ID_2926132_Annot_ID_196980 3000 nt of promoter + ATG

SEQ ID NO: 15399 - DNA, 3000 bp, Unknown; identical to SEQ ID NO: 7850
  misc_feature (1)..( 3000): cDNA_ID_3088209_gDNA_ID_2926132_Annot_ID_196979 3000 nt of promoter + ATG

SEQ ID NO: 15400 - DNA, 3000 bp, Unknown; identical to SEQ ID NO: 6114
  misc_feature (1)..( 3000): cDNA_ID_3088222_gDNA_ID_2926132_Annot_ID_196972 3000 nt of promoter + ATG

SEQ ID NO: 15401 - DNA, 3000 bp, Unknown; identical to SEQ ID NO: 6113
  misc_feature (1)..( 3000): cDNA_ID_2997065_gDNA_ID_2926132_Annot_ID_196971 3000 nt of promoter + ATG

SEQ ID NO: 15402 - DNA, 3000 bp, Unknown; identical to SEQ ID NO: 8144
  misc_feature (1)..( 3000): cDNA_ID_2176125_gDNA_ID_2926132_Annot_ID_197004 3000 nt of promoter + ATG

SEQ ID NO: 15403 - DNA, 3000 bp, Unknown; identical to SEQ ID NO: 8145
  misc_feature (1)..( 3000): cDNA_ID_3088172_gDNA_ID_2926132_Annot_ID_196998 3000 nt of promoter + ATG

SEQ ID NO: 15404 - DNA, 3000 bp, Unknown; identical to SEQ ID NO: 8146
  misc_feature (1)..( 3000): cDNA_ID_3047723_gDNA_ID_2926132_Annot_ID_196997 3000 nt of promoter + ATG

SEQ ID NO: 15405 - DNA, 3000 bp, Unknown; identical to SEQ ID NO: 6117
  misc_feature (1)..( 3000): cDNA_ID_3079590_gDNA_ID_2926132_Annot_ID_196969 3000 nt of promoter + ATG

SEQ ID NO: 15406 - DNA, 3000 bp, Unknown; identical to SEQ ID NO: 8143
  misc_feature (1)..( 3000): cDNA_ID_1810580_gDNA_ID_2926132_Annot_ID_138786 3000 nt of promoter + ATG

SEQ ID NO: 15407 - DNA, 3000 bp, Unknown; identical to SEQ ID NO: 8148
  misc_feature (1)..( 3000): cDNA_ID_1810562_gDNA_ID_2926132_Annot_ID_138791 3000 nt of promoter + ATG

SEQ ID NO: 15408 - DNA, 3000 bp, Unknown; identical to SEQ ID NO: 8147
  misc_feature (1)..( 3000): cDNA_ID_2105982_gDNA_ID_2926132_Annot_ID_138792 3000 nt of promoter + ATG

SEQ ID NO: 15409 - DNA, 3000 bp, Unknown
  misc_feature (1)..( 3000): cDNA_ID_1443214_gDNA_ID_2926132_Annot_ID_138794 3000 nt of promoter + ATG
aaaaaaggcacaaacatatttctcactcataatacacaaagaaagagagtagagatattttgtagtggcgttgacttgacacgactccaagttaagaagaacaagtagacaaaagatctaaagaacagaaaattctgaattttaccttagtaatagcgtcctcctgggtacagttgtttattagataaccaaaagttatggaatcaggtttaacgccagcttccttcatttgcttgacgaccattaacgcactactcacatttttcttcaaaacatacaaaagccatcagctgaaaacgatctaagagacgttgggagctcacagaaacatggacaatctctcaggtcagaatttgcaaacatgaaatgggagcttaagatattacctccctaaaatatccagccaatatacaattgaacatgctagagtttggttccaaattgaagttctttaaattaccaagcatattatatgcaccttcaaactgcacatgaaaccaaaagatatagagaaacattttgtggttagagaaacaagcgaagcagcaactgtaagaaacagcacagacatgtcctcatctgtaacatagggtttgaggaagttacatctttgattcttgtgcacaaacgtataatgctccggaagttctcagtattaggtttcacactctttgtgcacataattgaatggattcttcgcaccttaaacagcaaaagtatgaggaaatccgtttcatatatgagcagagttcaactgtatattgtctggatatagattcaagctaaatgaggatgcacaccaaatcaaactcaagaacttcatcaatggcatgtaacaatgaatgtaggatatctgcggatatcatcaaacctgcttcacccattttttcaactacatcaagagcagtgactacctacggcacagagagaatactcattatatatagcacacgaaatacagccaaatttattataaaacaagcataataggaatacctcattcgagtcacagctatacttaacaagcttttcgtacgatgtagatgaaggcataacatcaagttcttcatgcatcttgttaaattttaagattgtatcctcaacctttaattgtagaaaaccagtaaaacatggacaattaggaggcatcgattatctaaccaaagactttaacaacactaatctgccactaatattcatgagaagtccttaccgttggatttggggtgcaagtagaatagatagagatgagatcagaaacgttcttcactccttcatctacgcatgttaatgagaaacatataaaacatgctataaaaatgatgttctacaggcataaacatgttattggacaatgcagccttaccactttctcttagctcccaaaggaatctactcgcaacagaatccaatgaaaacctcccaagatattcaaatatgtttgccaataggtccgacgaacgaacttttgttatgtctacaatctctaagagcctctcaagatggtacttttggtcttttttacatagtgcaagcagataattttctgtttttttaaggatcaaaaaggttaaatctttcagagtaagagagagccacaaaacaacagagtgcacaaaactgaatattgcttaccttgcaagactgataagctttcaccgttatcaccatcaattgtactgcaaagttcctcaatcttctctccatcaccaagatggatccaaagaagcatttcatagtaaccaagtctctcaacggaaccgggactagcctccctaatcacatccttgaaactatgaaactcatctaccatatccataccaatcaaataaccaagaagaggaccataaactctttcttcaatcaaaaatccacgatctctcatagatttcaaaagctcaaaagccttctcaatatggccaagagcataatctagatcattgcttttctcagcatgctctaagtaaacaccaatcattgcattgtactctgtcacactcatctctttagctactctatcaaaagcaccaaacatagcctcagtgcctaatttctgagcagagtctctaaatatcttagcgaaacgccgtgacagaccgttctgcttgtaaacacgtctctctttcctttcacgagacaactctttcgttcttaacgaaatatcataagggatcttagtggtgaaacttggtatctttaaaaataagttcttctccaaagagcttttatctgatgttgttactgaaatgtgattcaaactatgaatgaatgagagtttgttgaagaaaatagacaaaattggcaacacataccatgtaacaatttcgatactcgatcttgtaatgatgcttcctcaagatctacacacaattttgcatgaaatcaatcgaattctaaacattacccagatacagaaaaatatcaaatttacaacgaattcattctaaagatcacatttttcttatatttgttcatatcagaaaatccgaattacctgaggaagagtttttggaagagagaagatctttgacagcttgagaagttccggcgatgtctttgttgccggaagcaattgaagattcgccggtgggtctaatacgggatttgaagactgaacttaataagcttttgttaacctttgagacaaccatgttcggatttcaagtgagattgagaagatgaagaagagcaagtttataaaaccctgaacaaaaaccccgacagggttgttctatccaattttaaaccttaggggtgataatttaatcaatcatataaattaggggtaatcatgtaaattaacaagattagttgaagaagaatcgtcaaattttgattttgtcttgtggattcttcaattcaaagattataaatttattgatgaacatcgtcaattcaaagattctctttttatcattcacgctacttcttcttcttcaatcgtcaatcgttgaatccgattcgatttgcctctcttccggcgtagcttcgacggtggca

SEQ ID NO: 15410 - DNA, 3000 bp, Unknown; identical to SEQ ID NO: 8146
  misc_feature (1)..( 3000): cDNA_ID_3047723_gDNA_ID_2926132_Annot_ID_138797 3000 nt of promoter + ATG

SEQ ID NO: 15411 - DNA, 3000 bp, Unknown; identical to SEQ ID NO: 8153
  misc_feature (1)..( 3000): cDNA_ID_3088172_gDNA_ID_2926132_Annot_ID_138798 3000 nt of promoter + ATG

SEQ ID NO: 15412 - DNA, 3000 bp, Unknown; identical to SEQ ID NO: 7883
  misc_feature (1)..( 3000): cDNA_ID_2154662_gDNA_ID_2926133_Annot_ID_138805 3000 nt of promoter + ATG

SEQ ID NO: 15413 - DNA, 3000 bp, Unknown
  misc_feature (1)..( 3000): cDNA_ID_3088238_gDNA_ID_2926133_Annot_ID_197066 3000 nt of promoter + ATG
ttggccatgagattttggaattttgcgggaaagtattcattcaatttataaaaagaaaatattttgattggggaataataatgatgattgttgcgttggaatatttggataaggtaaaagcaacataagcgtgaagtaccagctaccaaacgaagatcttgacgcgttgatttccgtatcaacggacgaagatgtagagaacatgatggacgaatacgaccgcgtcgcacagaatcaaaacccacgcgcctctcgtcttcgtctttttctcttcaccaaaaacgtcgccggagaagaagataacgatagtcgagctagcagtatcagctctctcctcgatagctctgttaatcgggagcaatggttcctcgacgctcttaacctcggttcttccgccgccgcaaccgcggtatctaacggtgggtccggtagagtctttgagcgagttagatctgaagtctcgtcgattgtttctgaagttcctgattatctctttggattggataatttcgatgaaactgctccgccgcatgagcttcgtgatcgtgatccgagagctaagatccaacgagaagtctcgacgctttcggatcctggttcgcctcgtcgcgatgttccttcgccgtatggttcgacgtcttcggctcctgtgatgcgaatatctacaccggaacttccaccaccagtttttattaaaccggaaagtccagaaccggtttcgactccgaaatccaatcctcaaccggaacaagtaatgcaacagagtaatctcccggttaactcgcaatggcaatatgcccctggcccaggccaacaggttcattaccagggtcataccattcaccaatcaccggtttattacgttcctggttcggttccgggtaatcatatggtccagcaaggaaatcatatggttcaaccgggtaatcatatggtacaaccggttcaaatgccgggtcagtatcttcaacaataccatcatgtaccaatgggataccaccaacctcagactcatcagatggctggtccgggtcaagtatatggtggaacggttaggccggttatgatggcagttgatggaatgaaccggacgggttattatggaatgaaaacacccggtccggttcaaatgtatcagcatcacactggtatggttgttcctggtgtagaagaacaacaacaatacagaaccgaaacggattcggatacgggtcgggcttcttagctgtttgaagaagaaatatgaaaaattatcacatccggggttttcgtcttttcattggagtcgttcttattcgttactgtgtgaactgtgtattattttttgttttacttttgtaaaatttatttttgtgtgtaataattttgtattacaaaatataatgaacagtaaaacccaataataataacattataatctatcaatagtgaattacatttgctaaacttttttttgtcatcttattactcgatttatcataataatgttaatggaatataatttgtcaatcatatgttcctcttcgtctttgctggtgacttgtgaggaagtagatatgtcttagaaaccacaccgaattcaatctcatatgtttgttggtgatgtcttcatagttgtaacttttaatacaatctaacaaagcataaaatggaagggaggtaaggatattgtgttgcatcattcttctcacaatcacttcttctttaccaagattgtcgaagcatgcattataaccattataaccatgcatcttaaacacatcctcccctttttttccttttttgtcgatacctttttatgttcatttgaactttctctttatgttcatttgttctacaagtactattcttgtaaaacatgttatttgtttaattgtccctactcactagtcactacctattttactaaaatcacaatttctacttttagctaccatactattcataatcgtaacaactaacacacttacatgaccaaaaatagatttttgtaccatttaatcttaactattaatttgtaaacgatctcactactattgtaacgtttagtccgtccttactagtgtgctccacgttctttctcaggtctatggactcatccctgtccgacgatcggtccgccaaatctaagaggttttaaagacttgttaacgatcctacaaatcactatacgatatttcatcatgttttatcctcatttacatggttctgataatcatttctcggaaggtcacctatcttaaaactacttcgactcaaacacgtttaactgtggagttctccgcataaattaattattttattctctataaaagttatagaaatggtctcgtcattgtactgattgacatcatcaactggagagacatcaactttgggagctgccaatctcagaagaagtttatctcctttacatgccgaggtggaagctctcctctgggcgatgaagtgtatgattggtgccgacaaccaagatgtagtttttcttacagactgttcagatctggtggagatggtgtcttccccaaccgaatggccggctttctcatcgtatttggaggagttacagagcgacaaggatgagttcacaaacttttttctatctttaatctctcgtagtactaatgttaaagcggattttttggcacgaaaagttcgtacccaaccgcttcatattacatctgtaaacaacattcctcaggattggctcgtttgagtcctaattaattttcggatgacaaaaaaaaaaggtctcgtcattgttaattattattctaattgactattcccattaaagcaatcatagagttacttaagtttgacattcataaatttatgcgactatgattaattattgactaagaaaaaattaaatactaatagtactaacattaaagacaaatgtaacgttttacgtgaagtaatcagaaaccagaaatagtcttcttcttcttcctcacacacatacttctctcaccttatcctccgagatcggaaaat

SEQ ID NO: 15414 - DNA, 3000 bp, Unknown
  misc_feature (1)..( 3000): cDNA_ID_2035028_gDNA_ID_2926133_Annot_ID_197065 3000 nt of promoter + ATG
aaaaattgtttagtattagtaaagctatttgcaaattaaattctaaacgcaaacgaaaataaacaatcatatccacaatctttattaaggagctatatgatgagaatgcaaacactgagatgtccattagtcaatcccaaaatagaaatgagcataatcatccatccttgatcaccatacttggcagtgaagtagaattccggaatgaggaaaaaacgcgacaaaatcgcaactgtgagtctttttctattctcaattttgagccatttcaccagcggtgtgtatcttccgaccaaatcccatagtacattgctacgaggccaagcgtgtaccatgttcctagtctgtgttgtcccgtgttttcatataaaaacctgggtaccagggataatgtcaaatcgtagaggaggaatagattcactgcataatccttcataagcggatttacttcagtagtacttaacaatgggaagtttcggaaatacataaccatttattgtggaaaacatgtaaccgatcatattacattttcgtgtattgctttttgattcgcggtatgagaaaatcgtgattgttccaagctcaaaaggttcgtataccacaatgagtatccttaaaggatgggtaatcctacggagccaagaaacatagagaattcaactatagttttttataaccaaaacataaaacttcgaaaaccaaaacgaaaacaaattggaaaaacgtggtagtaataatcttcaagtgtgagcatattgttccaagaaatgttgttccaactccaagaatacagcaaaaaacagtgaagactttagatatgtcttatttatgttttcttttggaaaaatgtaataatttgaaattataagttgtgtcattattcgtttatgtatatcatagtacaatatatgatagattacgttgaaagagtaagatagatagataatataatgtttgatatagattttctcgtcatacccaacaagtaaacaaaaaaccttactaactgcaacaccattggaaacttatcctcttttcattggtcaatttcttcttttcgctattgtttagtcgaactaaaacgtcattaaatatcaatcaaactacagagacattatttttgtttaacaatacaataacatggacttcaaattagttttagtggaaataatgattagtactaataaaattcgatcgcctgtcgtaataaccaactcagctcaatgtcacatgctaagaagtaagaactcctgattatattttatttttaattctgttgctagattaattaaataaaataaagtcaggaattttgttttccttctttactcttttttttgtgccgacgtcaagaacctagttgaagattgaaaatatatattagatacaatttttaattatatgttatcttttttttttttcttgtctaaattatatgtatcttaaaatcgttaaatcacaatggtttttgtggagtcaagtcaaatgcatatggtgaatgattaggagcatctaacttctggctgatagctatttgacggctacgatgcatctgtcatataaaatggaataacggccagtagttctcatagaccgctattattttggccaacagattgatcgtaagaaaatataatagttgtatacattagtctttttggacacaaaatttttgatgaaaactttaacgaagttgagacgaaaagaaaaaaaaaaaatgtttctcatgaaaatatagttacattacataaggaatgcgtatggtaaatgtttgttttttgaaagttttattatgataaaattattatattagatttatattttttttatttttttgtcgaccgttattaattatttttttattttttgttcaaagatattaattgttgcattagataacataaaatatatataaaaaaccaagatttgttcacaagataaaaaaccaaaccaaatccaaatttcataagatattttctacactaactaaagtacttcaatcgaacgattctgttacaactttgtaatagtaaataagtaattagatttctgagtaaaacatagattatcaaagtcgcttttattattgttttgtttgcaagactcgtgcttacaaatctcccattgtaatcaactatcgttttctagagtttgtttcagtcattcttacactcttattgactactcttattgattattggaatttttttttctttttttttttcaatctttgcttttattcattgaaacaaagaacaattacaagcataagagttaaagaactcaaaaattaaaacattacaacaaaaggtattctccaataccataaaaaaaaaatctaaaattcatcgatttgaagtccatgagagttttaaggcaaagacaaagaaacacaatgcaacatatgagattatagagaatctaaagatcattgttttattttgttttattttgatcgaaagattacagaaaatcaaggaattgttttattttgttgatatatttttgtggtaatatttttaaaattactttttttctttcatataaataaaattcgatagaaattagtatttatatatatatatatatatatatatatatatatatatatatctgtatctcatttattcaaaattatcatttgtgcaaatcggttaataaatgtcgtttatgacactaacgagtaatgagtggtgataataatcaattcggtaatactctcacatttataaattatattaaaatattcaaacggttaactaattatattactttattttttgtgcaacaaactaattatattacatgagaaaaaataatgctgtgagaatgcggtacatgacagccacgtatctctaacatatcctcttcccgaacattcaccttaataatttatatggtcgttgaatgaaatcgaatcaaaaaaaacaaaaatccccaaattaccaaaatcctcggcgacaaagaggagagatagagagagagaaagaggcgaaaata

SEQ ID NO: 15415 - DNA, 3000 bp, Unknown
  misc_feature (1)..( 3000): cDNA_ID_3088254_gDNA_ID_2926133_Annot_ID_197060 3000 nt of promoter + ATG
gcaggggtatgcaaggatataatcgtaaaagccttaaaatcaaagattttgataaaattgttcctattttaacaataatcccaaatttaaaacataccttttcgtatatcataaaagaaaaactacatataatattaatataaataaaatcacatagtctagctctaacaagtaaagaaaaaaggtgaacacaaacagcaaaaaaaattactaattcatattgtgaagcaattaccaatgtgaagaactataagaaaaaaataatcaaaaaggtatgtatcaatagtacgtactataaaaatatgaaacttactaagtttgcttcgaccattttttcatacaaatcaaatccaaaacatcattttttatgaaaatgttttttaaagttttaaaaaataatattttaagcaaaagagagtttatgatttgaaaataaatatatttccactttactaaaccagaattttataatcaaagataataattagtttaaatctaaaaataataatactgtaaacctagtttggggtacaattctaacccacttgcatttaaatggcttgagaagtatgacgtggaaatgtgtttgtaggaagtctacgaagctgtagctagctaatagaatgaatgcattagactaacaatagtactattaagtggaaaataacaattaagacatcgttttgttattttgactagtatcatctaatctagtactagtaaattttgatatttgactaacacgccagatttaatgttgcatggtttaaacaaataattgttaatttatgtagcaattaagtatagtaagatttgcttagattgactcaactcttaacataaataacttaaatgacacacgtttgtttcaaaaactgtagtaatccatatctttggtaaaaaaacgaaataaccttaatgattaattgtaatcaaattaaaacaaaaaataaaaaataaaacaaatcttttatattttaaagcacaagtcactccaccaataaaattttgacaaatcagcaaaaccaaattatttttcaacagaattataaaatcaaaaaagaaaaccaaaacctatattacataattaaaacaaaaacgaaaatccagttaacgtgagaacaaactttttttaaaataataattttgaacaaaatttagataaagaagaatcttcttcacatatttcgtttttgatgttaaaaatactaaagaaaaacaatttaattttattgcatattataaattgacttgttttagcttaccaataatattttgacatgtatcaattcacaaataattgatttgatggtaggaatagaagaagaaaaaaacggttatgaaaacccttggagaatttatcatgactaataaaattcattaaaattcaaatatgacaatattatgtaaaaatctgccgacattaataaaagtctgtcgtgacgttatgaaaatttctttttaaaaaaaaaaaaaatccagtcaaacccgatttaacatacaatcagaccggaaataatttaattgagggctagctaataaatctcatataacaaaaaatttcgaaattttaaaaataaatctgccaaaaaaagtctgttattactaaaaaggttattctagtcataaacaaatcggccataacattgacatgagtaaatctgttatgctttgacactgaaaaacaaaactgtcatcactaaaaacaaatctgttatcactatgtgactgtgtagtaattttattttttaacaaaaatctgttgtaaaacaccagatttgttaacaagttaattaaatctgtgattacacaaaacaactctgtcatgcctatataacatttttcgaggttaacaaatctgttataacacaacagatttttgggtgcaaatagaaaatctgttgccaccataaagaaaaatctgtggtccggaaaacaaatcagtgacagatttggtttcaacattcttacttttgaaatttaaataaaatctgtggagactgtatgaaacaaatcagtcacgattaaaaaatctgcgaaaaaaaaaaaatctggcgtaacataacacagtaaagtctgtggtacaaaacaagtctgttgtaaaaaatctgtggttgaccaacaaatctgtgatcgataacaaatccgtcgcaacaagagccacagatttaccaaaaacgacgatggcattttcgtaaataaatgtggttttattgccttgctggaattaaatagtaatggcatttctgtaatattgtttttctctgcaaaggaaaacaaggataatttaggtataattattactcaaataactcatatttttagcattccttttgggtcattatgtataaaatatgggttactctagtaaatttccctatagtatatcaattggcacagcttattagttgatgtatatatcgtagaagatgacttcatgcatgcattggccacttttccaataactttctcagggaaagtcatacattcggattacactataatctagtcgaccatatatagaagaagtaactaaagctttcaaacttttaattctttaatctttttcttttgagtcctcatctcaaacttttttttttttttttttgtattaaattgacctaaagggacgttcacatagtggaaataaaagaaaaggtgacaacaaagatcagaccttagggtatgccaaccttttgagtcttattttatcttctcaaatttgctgtcaaaccttaaaactctataatgattttactcaatcatctccatgttgtgagaatcttgttctgattctacatgaaagctttgctcgtaataatttcaacaaattcgttgactctacaaccaaaaccctcatgtgctaactttcaagtaagtatatgtagttttttgctcgaaataacaaaaaaaaataagaacaaaacatcatcttgtgtttgatccaattcttgaatcttgaaacattcttttgagctctctataactatttaaaaaatg

SEQ ID NO: 15416 - DNA, 3000 bp, Unknown
  misc_feature (1)..( 3000): cDNA_ID_3041184_gDNA_ID_2926133_Annot_ID_197059 3000 nt of promoter + ATG
cttgctgctgctggtatccaaaatttatcagatttggtaacatcaaactcctcaagaattctttcctttcttggtttctttaaaaaaaatcatcaagaatatgtttcttgattcattctttttttctacaactttcccactctttaaacattatttagcttcatgatttttctacgcagagtgatgatgattccaagaatcaaatgctaagaaagaaagagttgttgcttcaaaacatagaccatgcagtgaatctattcctcatctacgttttgacattatccatttttcctggattcttatacgaaaacacgggacaacacggactaggtgattggtatgcacttatcctagtagcgacatacaatttttgggatttgttcgggaggtacgcaccgctggtgaaatggctgaagcttgagaatagaaaggccctaacgattgcggtcttgacccgttatttcctcgttccggcattctatttcactgcaaaatatggtgataaaggatggatgattatgctcgtttctattttgggattaactactggacatctcactgtttgcattatgactatagcccctaacgggtacaaggtaatctatctactctccctatgctgttaaccaaattaatttgaatatatctagaaacttagattagttcatatttagaaaacaaaacacattatctttacaatttttttgtgttataccctttgcttttacgatttgaaaatataacacaagttttttttgacatataaatacaaacactataataaacaaacgacctctaccttcatatttaatctgattttgtattttgtgaagggtccggagaagaatgcattagggaatttgctggtggtttttattttaggaggagcagttgtaggaatttctttgggttggttatggcttattggcaagaaatatgctttctgagttctcatcattttgtgcaattaattccgatgaatctgactctttatggcaaaaaatgagaagcttggtgcctcgctcgaacctaactgtttattcatgaaaaaagaagaagaagagaatactaacacgtaaaactttcgaaagcttgaagtgatgaattcttatttcgatgcttcaccaaattataaaatttcactttttcaactccacaatttgctgtatctattttagttaatattttagacccatttgatcattttattaactattttctaaaatcttatatggtgttatttaaccatagatttttatagaaactaaatcctaacagtctacttttgtttgatcactgattataattttatgcattaaagtttagcattgttccatcagatatttgtaaaacaaaattaatagcaaaataaagtcattcatttaagctagtaacggacggttttcttcgagagaaaaccagtccggagtagaagagcttacatgggaaaacatagaacctcgtgctcttttcttcttagcaagacaatcagcagagacattgtttaagtatgtaataaaagataaagaaaaacgagaaaaactaggctttgaagcattaaaatcttttcactccgaagaaaaagcggactactcatcaggagtgttcaaaagttgtgtcgactccttactatctgtctataaaataatgtcgaaaatggataaaaatataagaaatcgtattgcccataagagagcctcaacagatatttgtaaattatatttaagagttttaaaatttggtcttattaaccaagtgttcatggccaagtgctttcgtcatgttggtccagactagagaacacttcttttaatcatgaaaacttaactcattgtttcctttatgtaaacattttaaagtggcaaaagttttttcttaggtatctacaaatattgagaactagtttcggttacgatccaaaaaagaagtaggtgttatttagttaagattttaaatattttgctaaaataagatttcaggcattttcgtgtaatttacaaatacaaaatgtagtgtgtaatttagacccatatttcctttcaaactaaccgatcaaaacattgatcacaaaatccttgtgtgcaactaattccccaaaaaagaagaggagaatactaacacgtaataatcaatttgaggtgaagtgtttatttatttattttgctaaatatttgaggtgaagtgttattttgataaatgcttcacttatcctttttcttttttacaacaaaattagttcatccatttaaattagaaacggatgattttttttaggagaaaaccagttcataataaaagattttatatgaaaaaaagataaaactttgtgctttttctttttcggcgaggcaattaataccaatattgtttaaacgtaaaataaaaagataaagaaaaacgataaaagttaggttttaaaatattaaaattttataattctagaaatgtccaaaaactaagtcaactacttcaaatgcttcacttatccaacttcaccgattctcatcgagtctatttcatacatagtttttattttcatttattacgtttagaccgatctcacagatatgtggatatttaatgattaaggattttaaagaaagttttgctttcatactatatcgtcaacaagttgtctaaaaataggaacataaaaaaagctttcacactttgaattctttaaattctataatcttttctttttctttttgagtcttactttatcctttcatatttgctgtcacaccttgaaaaggtctattattttactcgctcatctcctctttttaagaatcttgttttgaatcttcatgaaagctttgctcgttaaaaaatcaacaaactcgttgactctgcaaaaccctcatgtgctaagtttcaagtaagtatctctagctcctttatttgctccccagcaaaaaaaaaggaacatagcatcatcttgtgtttgatccaattcttgaatcttgaaaacaggtttatgttcttttgagctcaatg

SEQ ID NO: 15417 - DNA, 3000 bp, Unknown
  misc_feature (1)..( 3000): cDNA_ID_2034990_gDNA_ID_2926133_Annot_ID_197058 3000 nt of promoter + ATG
cattaggaagggagcatatgataagtttttttttctaactttacctaataatcaaatttggtgctctctattattgtgacgtcaatagacataaggataaatataggaaataaataacattaaattttataaacttttatgaattgtttttaattcaaaaattagttcaaactacataagcgattttatacaaactttatgacatgtggcatatttttctatgttttatttccattttcattctcacttgaaaagaaatgatatacataaggtatgaattataagaaaagcttataaatagtagtttacagttttacattgatttttattttatttagcatgttataaaataattattcttatcatcaaaatatatattttcaggttttttttttatatgaagatacatcacacaaaggatctattcatccaccatttttattaagtgatgagggtttacagtcatttttgtttttgatttgcttgggcttttcttatttttgctgatctgttcaaaaaatatgggcatgattatgagacctgatttactccatatttagcactttatcaaggttgtaaatattctttttgttaaattttattagtgttttcattgttttttgttgcatttagtatccacgtgatttttcttgtgttttagaaatcctatagtgtctttgtgtgtgtgtttttagttatgtgaagttaaaataatggaatacacacatgtagatgctaagaagagaaatgatgatcatgaacaagtccaaagtgtcagaaatatcaattcggatgaaggccttactttcgaatttagattcagaaatttagttagctttccactgatggtgatttcaagccaaacggaacagaggtttaagaattatcatcgatttagtagacacatatcattttcatgcttaagaaaagctcatccagaaattttccttcaatgccagaggttatattaacttagtgcagtaggatcaacatacaattagagactttttaatgatgtaatcatctaagatatgatccactttattttggaataatccggtccaaacaaatttatattcaaggattttttagacattttttaatatagtgagatcaacaatttttagacatttttaatacagtgagaccactagagactttttcatgatatcattatccaagatttgacccgttttatcttgggtcgaccaggtctaaacgaatttgtatttaagcaatttttagacattttttaactgaaatttgttttgtgaaggattcttcaattctatcatttatatttttgtttatgcatttttcttatatctttcaccatgtttaatgagtagtcttttgtttgatcatgagttatgatagattaggataatttgatagttaaatgatgatgatttatattgcttattgtagatttcttcatttaggttaatcttattattatgtgcaccgattatgtggttcataagtatctggtgaacattttattttaagtttttttgttaggttatacagctaacattaaaaaatagtaagaaaatacaagggataatatagtgaaaaaacactgatagtgagaacatatttcctgaagtctctcttcacttcatttggaaatggaataacttattttggcaatgagatgtttgattactgaacaataacatttggtggtttttgttcggaagatttctaaattggtgaaaatagagcagcatcttgtggggtttgatcaacatatacgaatgaagtaaaagaatgcaaagaaattgcgattaaacactatgcaattaaacctcattatggtcttagtaactgaataatctactcagttactaatgtataaatatatttttgctttatgataattattaattattattcatgtaaagtttaaattccaaataaacatatggattagtcatacctcaataattactcttttaatagtgcataatatttagttacttaattacttcaatcaagttttttttttgagttttcttgtcaataaaaaatgtcccgtttttttttattttgcatcaaaaaaagtatatataaaagaatacagagtaaaatagtattttaaacataaacttttcactttaacaaaattttctacttcaattcttaactagcggcacaatacttatttattttaagtgtttgatgatactttttctacatgtaaaaatcaattaacatatataaggtaatttttcaaacaaaaatataaaaatttcaagtatatttataaaattaaaatatatcaaaactattaaaaaaaattaaaactaattttattttgcacatcacgcgaggctacttctagtgtatatatattgtttgatgatgttgtgttttatatagagaaaaaacaaactcatagcataatgctttttaatttcgtcagaaaagccaaattaattagacaaaactacatttttcttctaaccacaccttatagagtgcttttttctttcaagtgcgtttctatatctgtgacgaagaaatacgtatcgcactgctttttcttttctttttttcttcaaaaaaagagtttgaaacaaacttaatggtgagaaataagtagaaccacacataaaaagctggaacgcgtcgtacattcacgcccttactttaatctatttggttctgtttctttttcttctgtgtctcatattatatccttccatatttgctgtcaaaaaccttttaaaagtcttattattattttacttgctcatctccttgtattaagaatcttgttttgagtttttgtgaaagcgttactctttaaataatcaacaaactcgttggctctgcaaaaccctcatgcatgtgctaagttccaagtaagtgtctatagctttctgctccaacaacaaaaagaaaaagaataacatcatccagtgtttgatccatttcttgaatcttgtaaaagggttatgttcttttgatctctctgtaacaatttcgaaaatg

SEQ ID NO: 15418 - DNA, 3000 bp, Unknown
  misc_feature (1)..( 3000): cDNA_ID_3088258_gDNA_ID_2926133_Annot_ID_197057 3000 nt of promoter + ATG
ttagaaaaattattgattgtagagaggaactaccttttggattaaatttttgtaaaaaattacaaattttttaaaatctctccataaattaataattattaatttatcgataaattaatacctctctaaattaataaatttttgtactattattacctagaaagtgaaaattgacctacaaatatatcttcaatttgattcacatatacgaagtcacgtatgtttctataaatttagatccaaaatgtgtgaaaacccatctgtttttgcaaattcttgcaattgcaattgcacatgtttctattacgtttaaatcaatcgagctctaagtgatttatccatagtgatatacagatccaatatccatgaaacatatttaattcatgaaaaggctcaaacattatcaacaaataagatatggtcaactatgtagtaactagtaacacgtaggctgctgctctttgtggcaaattcatgcgcaagcaaagcctctagatgtttgacaagttactaccctaatatagcatcactagctatcttctaatttttttttttagttattttaatcctgtattcttttatttatttatttgataaagtgatgaaattttattctcctttttcttatcaactaatatacttattcattcacataatttcgcactttgcggagttttcatttgtcgttaaacccgacagattcttgaaccgcaaggaacgagacattaacctaatgtacttatatttaactatagtattataatagcataaatgtgacaatgattcgatcactactaatatattaatcaccaatctatatcgtcgtccttcctgattatttgaagattttgtctataaactagctgcttttgtttatgtatttttattacttggatgcttttgtttgttggaatattcgaatgaatttttgtttgcctgaaactatgcatatataataaggccatatgcgccaataatatagaatccaaatattcattaactataattagtttgttctagagttttagctactcatatattcaaattcttaggagatcaaaaaagtacttaattagttaataaaatccatttttattagttgtaattaaatgtaaagtgtcgaaacacgaaagggaagatgagttgcacaactcgtggttcctataagagtgataatctatctgacgtcacgccatgcaaaatgtatcaatcaattttcttctcacatttatatttacttcaaaatgattataaagccacccaatgaataataagatatatatatatatatatataactcaaaatcaaaaatttcaaatggaatttggaagcatcacaaattcacaatcatgtattcaaaatctcacgtagaaaaagctaataagtccaaaagattggtcttcatttttttcttgagaaagtttgatgggatagagagagagacagagaggaacagctaaatttgctgtgtatgtatttaatacttgaacatttatttatctattttcttatacatcaaactcacgaatttataggttggtaatgtcgtttttataacattaataaaaattgcaattgtagtttttattgaaatttacccaaaaaaaactattatacgaaaatatgttatttatttaaaatttgatattagatgaatccagaatcttttataaaacttggtgtgtgtgaacctgcgttaatttgttaaatacttttcacgtaaaaatcaaaattaattttaaaagttatgttaccaaacagtattctgatagttttacaaattttatccattgtatatgttttgtttttgcaaaaaagtccaaaggaaaaaacaaagcagaagggttgaattgtgaggaaagagagagtacgtggcatcataactttggcgacagctaatgtgaaaacagccaaaagctacggagagcgacactcctcgacgacgtccatgtctctttagattgtgattgcattgttaattatcatatttatcaattgattagttaagtcttaagtatcatcacacaagtttatacattaatctatacagtgtttaacactacaaaactccccaaaatcacgtgtttcatatcatacgtacatttgtctaccgtctttattaacaatattaaaacagaatttatcaattttctagttgaatagactatatactattatagagactcttataaattatgaaactcctaatcaattaaaaatagttaatttgaaacatatcactcgaaactagggtattagttggattgacgatatttttcttattaatatcaacgagaagaatcaagtgtcgttagctcaattggtaaaaaatttaggcaaagcttagagatgtctatttgagtgacgcttggaacaaaaattacatgctatggtttcaggcctagagaaatgcttcgatccagaatctcttgatattcaaaaaaaaaaaaaaaatcaacaagaagaatgtataaatggtttctatactatctaagttatgaaaaatatttttggttacccaaattacaagatttgtaccgaagtgtcacactagattcacatgcatgcatagttataattaacttaaaacataaatgacttacaaaaatacttacaaacaaaaaccaaattaagttatttagtggccagctttgttactagagttttagccattatcataattcacaataaggtgtaggaaaaaacattaatatatagtatgtatacatccaaaaaaaactttttggaaaaaacaaattttgggattataaaggacacgtagcccaatcgatgaacagaggacggcaccgaatcaatttgacttcaccttttttccccatatgataagagtctcatctctttcctatatatatttcgtacctctctttaaggaccctacgtctctctctttctctctactctctgtttcctcataattcaatcactatatttttttaaaaacatttgacttcatcgatcggttaacaattaatcaaaaag

SEQ ID NO: 15419 - DNA, 3000 bp, Unknown; identical to SEQ ID NO: 8037
  misc_feature (1)..( 3000): cDNA_ID_2025014_gDNA_ID_2926133_Annot_ID_197049 3000 nt of promoter + ATG

SEQ ID NO: 15420 - DNA, 3000 bp, Unknown; identical to SEQ ID NO: 8040
  misc_feature (1)..( 3000): cDNA_ID_1989590_gDNA_ID_2926133_Annot_ID_197042 3000 nt of promoter + ATG

SEQ ID NO: 15421 - DNA, 3000 bp, Unknown; identical to SEQ ID NO: 8041
  misc_feature (1)..( 3000): cDNA_ID_3041167_gDNA_ID_2926133_Annot_ID_197034 3000 nt of promoter + ATG

SEQ ID NO: 15422 - DNA, 3000 bp, Unknown
  misc_feature (1)..( 3000): cDNA_ID_2154680_gDNA_ID_2926133_Annot_ID_197029 3000 nt of promoter + ATG
acgagctctataaacgtgacatgtcatcatggcattgtcgttaatcacacgtaagtgtaaggttctttttaaaacatgcttctcaattaatatataagggatacctaaaaatgtttcaaatttatttgttctttttctctcaatttttttaatttagttttgattttactaaaaatacaccttttgatttaaatatggacaaaattattattttacatataaaaactaggtaatgcccgcctaaatatgcgagtgtaaaaaataaatataatttcatatcgataatatttaaattctaaataataatctatatttttcttattatttaatttcatattttgtttcaaacaaaatttcaatcatacactttaactatttatttaataataaaaaagggcattttaattctagacactccatcttattgatgatatttgaattctaaatagtatttcgtacacttttcctatatttaatttagtacttttattgaaaaatattcaaatcttacacattccatttatattcatatacaatttaactattatttattaatgacaaactggattttgattctagacccttcatcttaaagaataaatgttaaaacacttatatcaaaataaaatgtatatcagatcatatcaaatatatatctagataagttaatgaatggttatttatttatatgtatatattttaaaattatctttcttaaaagataatttttttactttttaagtttaattattgtgttaattgaaatatcaggacactgtgaagtatgcgttgaataagcaagagaaagaatggtcacagctttgtaattctcagttcgggtatctgcttgagcacggtcgagaagtagctttttcggtccagttcgctcattacatgttagtgacggcgaaaaagcacgagatttggatggattttggtgaagcgcctatcagattttcaattcaagagttctcggttgctatgtttgcggatcatgcatccagcctaaacccaatagatgtcccaagggaattgatatgggacctacctcgaagaactgtcttctttggtacctctattcctacgatattcaaaggtataagatctttattggttctaaaattcctgagattcctcagaaattagacgaaaaagaactaaaaattgggatgaattgattggagagaatgtaaatgagattgatgatacctagatagtaaagaagctggaatccaagaagttcgatgatcatcagaaaagactggagctttgttctatgtcccaagtaaaaccccatataattcatttatatatttactatactactcaatcacatagtcactatgtatgcaattatggcaatcaatgtaatattataaaatcttaaataaagtacgccgcccatcaataggtaattaataaatgagtatatctatgatatacttttgttagtttttatgacccaggtaaaagagtgtatgtgttagccacggtatatatgtttgttttttggtttatatttttttattatgttagattatttgtttttacttccattttttgttatttttgcttttatcgaatatcttttggatagtataaaaccaaatgcgacagtctcataaatatactgcacgacaacaatcatctaaaatattaaatatttacaaaatttgtacataatttttttccatcaataaatgatttatcctaagagattagtatctcttctcttgtcctttgcccaattattggacaaagagttagtgatctatcttaggtgagtttatgtaaaacttctatatattaataatcgagaaaataataatctctttaaatcaataaatttttcggttacgagtcagaaaaatgtaaaaaaaaatgatacatttggataaaaaaaacaactataaattttactatatatttagttttgaaaccttgaatttctctacttcgattccaaaaacgcaagaaaatcaaaatcagatatataataaaggtgagttttcaaaaatgaatgagttatgatcaatgtggtgaatctgcatgtgtttctcatcctcttcccagactttgtcgtcgtgacaaagcctttgaattactcttttctcatcctaaatcaataatacaaacaacatatacatttaatttttagatgatacaaattttgaacttgtttctaaatcattctatttttaaaaaaaaattgttagaatttttcataccaaacaccaactttaattattagaagataatacaataagttttggataaagtaatacttcactacaaaaaagtaaacaacattagagtcatcttacattaaatattcttatatatatatatattttattttatgataagtttatataattattaatttatgatattgttaagaccatatgtttacatagatttttttttaaaatgattatcttggttcaattgaaattcaatatgatatttttacaattgcaaaaaaaaagcgtactaaaatgtctataaaataaacagttatcaatgatcctaagtcctaactattggggaaaaaaggtgagttgttttgggtaatttggtttaatatcatttaattcacataataagtggacctcttatgtgcatgggccttaaaaataataaagatccggcccattactgtgatcagaaacaacatttaaaaagtgatcagtctatagaagaatacaaaatatactatttcaagtaaggaaaagacaaaacttagttggacttgttgaatgcacaagtaaaccatgaaggagaggaatcttatctggcacagtccaagttgtgcttaatatctcaccacaaccgtcgatcttcacgattgttgacacgatctaacggtccttagagactcctggcttgttctataaccgaatcttttaaagaatctttaatccttagtaggccccgcttcatagccaataagagaagctctctccaaataatcgcagaagagatcaagagagagatatg

SEQ ID NO: 15423 - DNA, 3000 bp, Unknown; identical to SEQ ID NO: 7883
  misc_feature (1)..( 3000): cDNA_ID_2154662_gDNA_ID_2926133_Annot_ID_197023 3000 nt of promoter + ATG

SEQ ID NO: 15424 - DNA, 3000 bp, Unknown; identical to SEQ ID NO: 7886
  misc_feature (1)..( 3000): cDNA_ID_2154659_gDNA_ID_2926133_Annot_ID_197022 3000 nt of promoter + ATG

SEQ ID NO: 15425 - DNA, 3000 bp, Unknown; identical to SEQ ID NO: 7888
  misc_feature (1)..( 3000): cDNA_ID_1809625_gDNA_ID_2926133_Annot_ID_138808 3000 nt of promoter + ATG

SEQ ID NO: 15426 - DNA, 3000 bp, Unknown; identical to SEQ ID NO: 8036
  misc_feature (1)..( 3000): cDNA_ID_1989594_gDNA_ID_2926133_Annot_ID_138811 3000 nt of promoter + ATG

SEQ ID NO: 15427 - DNA, 3000 bp, Unknown; identical to SEQ ID NO: 8040
  misc_feature (1)..( 3000): cDNA_ID_1989590_gDNA_ID_2926133_Annot_ID_138816 3000 nt of promoter + ATG

SEQ ID NO: 15428 - DNA, 3000 bp, Unknown; identical to SEQ ID NO: 8042
  misc_feature (1)..( 3000): cDNA_ID_1989588_gDNA_ID_2926133_Annot_ID_138818 3000 nt of promoter + ATG

SEQ ID NO: 15429 - DNA, 3000 bp, Unknown; identical to SEQ ID NO: 8037
  misc_feature (1)..( 3000): cDNA_ID_1989587_gDNA_ID_2926133_Annot_ID_138820 3000 nt of promoter + ATG

SEQ ID NO: 15430 - DNA, 3000 bp, Unknown; identical to SEQ ID NO: 15418
  misc_feature (1)..( 3000): cDNA_ID_3088258_gDNA_ID_2926133_Annot_ID_138824 3000 nt of promoter + ATG

SEQ ID NO: 15431 - DNA, 3000 bp, Unknown; identical to SEQ ID NO: 15417
  misc_feature (1)..( 3000): cDNA_ID_2997100_gDNA_ID_2926133_Annot_ID_138825 3000 nt of promoter + ATG

SEQ ID NO: 15432 - DNA, 3000 bp, Unknown; identical to SEQ ID NO: 15416
  misc_feature (1)..( 3000): cDNA_ID_3041184_gDNA_ID_2926133_Annot_ID_138826 3000 nt of promoter + ATG

SEQ ID NO: 15433 - DNA, 3000 bp, Unknown; identical to SEQ ID NO: 15415
  misc_feature (1)..( 3000): cDNA_ID_3088254_gDNA_ID_2926133_Annot_ID_138827 3000 nt of promoter + ATG

SEQ ID NO: 15434 - DNA, 3000 bp, Unknown; identical to SEQ ID NO: 15414
  misc_feature (1)..( 3000): cDNA_ID_2035028_gDNA_ID_2926133_Annot_ID_138829 3000 nt of promoter + ATG

SEQ ID NO: 15435 - DNA, 3000 bp, Unknown; identical to SEQ ID NO: 15413
  misc_feature (1)..( 3000): cDNA_ID_2997104_gDNA_ID_2926133_Annot_ID_138830 3000 nt of promoter + ATG

SEQ ID NO: 15436 - DNA, 3000 bp, Unknown
  misc_feature (1)..( 3000): cDNA_ID_1396277_gDNA_ID_2926134_Annot_ID_138832 3000 nt of promoter + ATG
catctctgttatagttgctcgtagctcttcctctttggtctttgcatccaactctagaaataatgagaaatcaagtccatattcagtgtacacaaaacgatgtgagaaccaaacatgtaactagaaaactaaaattcacctttatcactgtatcttttctctgcagattgaagagaagaagaaagattttccttgtcttgaacatgagtttcatccacttgttggtaccatctaacacagaccttaagcttcttgataatatccgtcatttgctcaatcttaccctattagtaccacaatgcaaatacatattaaagtgatttttttcttagaatctcctataatcaaccaattggttattcggttcacaaaccttggtatcaaattttccagctttagctctctcgttaagcaaagccaacacttcatcttttgtaaactcaactttaccacactcctctgtgcttcccacatcgctgttcgcatcttgtctgttcactgtcgaaagcacttgtcttcttccagtaccttgcgtctccttccttcgcttgtcaaaaggaatacttgagagcgcttcctttttcttaaacatagttcaaaaaccaacaaaattaagtaaagccacagacttttatgaatcaatttctcaagagaacccacaagatcttctcaattgaacaaaaccctaaatcaaacaattaaactgaaaaatatcgttatgacttttacaatctccgcttctctcttagaagaaggaaaataaaagaaagaagaaggcttacgacgtttggactaggtaaaggagcgcgattctggttgcgaagtggcatcttcgatggattgcttcaccttaggctcgtcaataggatccaaatctcaatcccgagatcggcggcggatttcttaagaacccgggagaaatcagacctggttttttctgaatctgagatgggaaattagggttcttgcttttttcctaatgggggagattttaagaattgaggaaggaggaaggaagaaggaggagcctgttgtttgaatatttgaaaacagatcggcggactcttgtcaaaattgtaacgttactcttctcctcgattataatattaactttcaggcccatcagcattaaacaataatcttttttttccttagatacttactctcaggccaattgacttaactttcaggcccatcaacattgtaacgttactcttgtccattaatatttaaattattattatataaagtataggctccatttgagccaattgacttaaaactcggtccattaacactagtgatattccatattttgcgtgactttttgttggctaaataaattatgggaaagaaaaaaaagtaagatattaatcaaattggtttctattttatggttaaatctttttataaaattatttttcttttattttgtataaaatgaagggttttaaaagtttcaaattcttgtttttagtttgattcgcagttaatattcgattttgggataattttggagagttattacttactttaactaggattcaacccgtggtttacagcgggcctcggttttatatgttttttttttttttttgtcatcatcatcttattgatttataaatcagcagtgtagtcacaatgtaaagcatagcttattacattaggaacccaaaaatgattaaggaataaagattggttttggagaggagctttagcaagaatatcagctggaacattgtgatgtcttcttatccaattgaaatggattgattcaaacttccttgaccaccaatgaacgtctcgtatccagttgtgaacgccaaaatgtaccttggatccgttgattaggtcaaacagcatcttgttatctccttcaaagcaaacccgtttgtaaccatgactccaacagtgctgcattgaaatgattagcgcttgaatttcactctccagagcattgtccacctttcttcctatagcctgacccgccagtagataacttccattactatcccgaacaacccaacctgctttactttctacatctccattaacgaatgagccatcaaagttgcatttgatccatcctctttcaggtcgtcaatcttatatggtttttaattaagtatttgattatatttatattataaatttataaaatatttcttttattttaaatttttataaataatgattgagatttttattggttagttgttatttagtgattaaaataatgtgttttaatgtgtgtatgtaatttaaatataagtaaagtagtaacaaaaatgtaaaatagtaaaaacggtgtaattttttttgtgattataagtttttttattattattatttttgtgattataattctttttggaatgaaatatgctcatatttagataccaaaatgaagtagtgataccaatattgttgaacggttaagattgtctactttggatgctaaacatgattaggtatttgaattcgtgaataagtgactattattcctaacccacccgaaattaaaaatgtggatcatataaactttaatagattgaattgaccaaattattcttaatggctatgtacaaaatccaaaattgaaattgaggccaaaattatctatttttcaatttgtacttttttttaacaataagggatttcatttatttgtcaagttggattggatttaagttacaatttgcttagatattatcgaaaccggttttcaattaactttgactaggtttaaccgaattggtcaatttccacgtcattcagccacgtgacaatcgcattctgggaacactcgatctcaatcctatgtggcaaaactgagaatcaagaaaccacgtgtcaacatattagtagttaaaaccatatccgagtaatctaagtaacaacgtgaatcagataaggtattctttgtcacataaccaaacaccaaaaattataactcaacacttcactaatcaattattcaaagcagataaaaaaaaaatg

SEQ ID NO: 15437 - DNA, 3000 bp, Unknown
  misc_feature (1)..( 3000): cDNA_ID_2035053_gDNA_ID_2926134_Annot_ID_138834 3000 nt of promoter + ATG
accgctggaccgagtttagtaatgatcgggctcaaggaaccgtgggtttcaggctcgatatagtttcgactattcggtttaaactccataggtggatcagtaagcatcataggatgcacgctaattgcaacatcgtggttggaagagacgggttgatcttgcccaagtttaaccataaacggtgtccagtctacttcacttagaaagattgattggtttgttatttgctattctctttatattttactttccttttgaatgattttgctttctttacgttttgtaacttggatttgggagtttggtttttctcattaaatgtatgatctttgagttaaacatatcaaagaaatcatttggtaaaagtaaaaacgcaaagcaattggcagatagttcaatctattacctcagtcttcttgagtctggcaaacagaataagttatggtttcctcttgctcgaaatctgagcttcaacaatttgccttctccattgatgaattgggacctgaataagaattttttgtaagatgaaacaatgtttatcggaagcaaaagcagagtccggctctgtttttttatactggcttatgataaaaaatcaaagcaaacttgggatcttggaatcagatggaagtgaagactcaatcgaagagaaagagagatgcttacagcaggaaaaccgccgtaatcccctggttccgtaatgtttttagtaacacaactattagcagcaagtcgaacctatagtcggaaaccaaaaacggatttagatgaagcactgcacaatttcattactccaattatgtttctatttttttaccttggatacaatggagacatggtctcgaacagctactcgtcctcctagtgctacaaagtcaccaatcctacaaaaaataattgtcgaaaagacgagaagcttatagtttcaatcaacggaacataatagttatttggttgctgggattagaagcatttactctgctgatccagctatgcctacttggccacagaacaagcaacatttgccaataatcacattgtgacctatctgcaatatttaagtaaacagaatagcatctcagttgtcatttacttgtgatctatgggggagttgcaagatagaatcgaagagacacctgaactaagttgtctatcttagtatcatccccgatcacggtatctctccagctgcataaatagtaaaggatatggagctagaaaagagctttacagggaactagttcttgaaatattctgttacctgccccgatcaatgcatgtgtttgctccgatttccacacgattccctatcttcacatttaaagtctagggagagcaagaaacagaacaaaggataaaagtgatgcacaattgttatccagattcaagagagcaatctaggtgtgcttacttgaggcttcttcaccatgtttccgttgtcatccacgtaaaacccaaatcctgaacagttaaaaaccaatctcaattcaatgccaattctcagaagataaagaagaaaacatggacttggtccataccatcttgaccaatgcagactccattatggatgacacataaatcaccaatactacaattgctgactgaaacattatacctgtagacaagtatagattctttcaagattctcttcaaaaacatgtataagacattaagcaaaaccgttacccgatctttgtagaagggccaattttgactgatgatccaattacagtgttggatcctatatgaacctctgctcccaatatagcttcttggtgaaccactgctccaaactcaaccagagccgaggaatcaattagggccgaacgatggtacattcctcctccgtttcgccatcttagaaaacctttctcaacattacctccactacttgtctctaatcttgacagttacaacaaaacacaagaagtatcagcaacaatcatttacatagaatagtcaccacctttacacatataacatctttccaccatctaaatatcacaatccggactctttaatagcgtaaaatgtttcatgcaacaattgtcatcaatattcgttcatcacaatgctgttaaatcatatacagatcatgaacatctttcccaagcatcataataccacacatgtcagaccttatacacgaaactgatacgaatctaggaatttcactgcatattctcagaggcattccaacaaacaccttgcgtacacgataacttgataagataaatgcaaacaaaagtcaaaactttaaaggtacaaattcttaacaagactaaccgttatgtggagaaacattaacagtgacggattcagttgattgatgagagcaaacccttaaatttcggctactagagaaaaacctagaccgcttgttcaaaaagacaccatgagtggacactgagaacaatgttcgcaaactatttgccatagtcaacaaaatttatagagattcagaagaaactgaacaaatttagcgacacgaccaaaaaaaaaaaaactttgaacttgcttttttttttttccctccaaagctttaaactctttcttttaacaaaacaaattagaactaaaaaatcaacatttccatgtaatattttatactcaacaaacaatcttgaaaccgcttcatatcacttttgtaaacaatgttactcaggattggctattatgagttctaaataaaatctgatgacaaaaaaaaactattttgatgaatttataaattttatgattccccgaaacctttgaccaaatatgttttttaatcatattattatgtcaatgattacaacagcacattttaatttcattatctagacaggcctgcctaacctatggaatattgaagtttgaacataataatttgatttaaacaatcttaattatcaatgactaactgtagtaattagactttgaatcccactaattccaatgaagattatattaagaaactcaaagaagaagaagagcaaagaaaacaaaaacatg

SEQ ID NO: 15438 - DNA, 3000 bp, Unknown
  misc_feature (1)..( 3000): cDNA_ID_2993281_gDNA_ID_2926134_Annot_ID_138842 3000 nt of promoter + ATG
acatgtaattacctacaaagaattttgaaatgaaaattgttcttattgaataatgaagatgaattaagctaagtttgtagaattgatatgcgaattggaaactggagaaagagaacagatacattcgaatttttatccttttttaaaaacattacgttggataattttagtaagatttagattcttcgaggaggctattgacttagggaacacgtaaccgagaaggttaatatgggctaagcccaagtgagttctatttaatacgttcattaaatgatataaatactaaacaaattctctacaaaacaatcactttaattatctctctttttcttcatccgtttctattgataaagttatgaagtttctcgtcgagaatctgaatggttcatcattcgaacttgaggttgattacagggatacactgttagtggtcaaacaaaagatcgagaggtctcaacatattcctgtttccaaacaaacccttatcgtcgacggcattgttattcttcgagaggatcttactgtcgaacaatgccagatcgtccccacttctgatatccaactcgaagtctcatctgacgatgataaccctaatcacaacgactgcgatcaaaagccgcaaaccgagcaatctccagcactaccattggtttcagcggaagagtactttgagagacaagattggcctttgacagcagaagagctgagacagatttatagttatcggcctgagcatgaaggttgagagcaaccacaacgatgatcaaaccgagcaatatccaccgtcgtcgttgcgaagatgaggcttgacgagatctttggaaacttttcattattatctttggaaatttttcattattatcttcaatgtgtttactattttttttaagttagtttagataattatagattatttacattttacctaaggttttggtttctattttcttaataaatagctcattatttcccattatttcatgaagttatttgtttagttgagattttataaaaagggataataaactaataagcatactagattgtaactcgtgttggtagtagaattttaatttttaaatatttatttaaagttggatcattgtttgttttataatacagctttaatcaatccatacataatacaaaacaaagaaacttagaccatgcacatagttggtattcataaagtatcataacattttttactattaattttaatgtttatttattgtttgagaatttttataatactgataataaatctgttttcagtgatgagatccgtaatgatatcattgaaaaaaaatatttgcaaaatcgaaaatacctgctagcatcggccactacaacgataccggagacagtccgattgaagagaacagttaaaagagaagcgcctccgacgtagatataaaggagtgtgagagaatttgcgattaaggttccaagggatctgaatttggaagatgattctcgttttcattgaaaaagaatcgtatcaagatgcactgaagaggagagaagagaagagcaaatgattttttttttctctcctttcccacaaaaacgcgttgccgactaatcacaagccgccaaatcatcaaaaactagtatcagaagtatctctccagtgatacgacttaggcccaaatcagttgttttacccattaatttaatgttttttgggtttctgatactcataaaaatcctactatgtacatggtcttacccttattccattgtcggtgaaatccttcagggtttatgcttttccagtgctaaaatcgcatttcaacgaaaccgaatccctaatgaatgaaatcgcatttcaacaagtagaaaaaagtgataagactagggctttttattcaaaatctcggttttgtttaaattcgaaccaaatccgaccggtttacttaattaaaccaaattgttaaccatctctcagaagcaaacccctaatggcctaatccgatgatcgacctagttctcaatgtacttgaagattttatattgccttctactcacaatattatgcataaccctattataaagatgatcaatgtttatatacagctacaaactttttcattctcacttagtctcattgtattatcaatcaacgatatagctctataccatattgaactccgatgatcggggctataatcggagaagagagagatgtaacaaacgtttattatcaactcaaaatattgttacaaagcttaaactaaaattagttacattcacatcttatatactattcacattaatcttaaaccgaaatctagttaactggagttaaccaaattaaaccagtccatctatcccaataattcattcattcatacaattttatgtacaaggttaccaaaagaatcaaagagaaaacacttggcttaagtaagagtataacaataaacagacaattaaagaagaatcatatgcatatataatttcaccatgtgatattgaattatataaaaagaaattttcacagaagtggacgaaaaaagatttgctctcaccgtttgtcaaagtgagaactggttttcacgttttgtcttttcattcaatttcggaccaaattaccctgggaaaacttaataatggcacaaaccaaaccgtgcagcagttcgtatcggttaagttgacggcgtaaaccaaaccctacagcagttggtttcggtttagttgatgcggttcagttttgaaaaagacaaaaaaaaaaactgaaacgaagaaacccgagaaaacgaaaaagagaagagagtaacggagagatttgagagagaatcagaaagcgaaacgaaattcagtatccattgcttcaaaattcgacataacttcgaattgttggatagttgaattgagccactgaactcccacatccggggaagtgaaagttactgtttttctcggcgaagccaagagaaagttactgtttattccggcgaaatttgaacctccggcgagatagcatctttagct

SEQ ID NO: 15439 - DNA, 3000 bp, Unknown
  misc_feature (1)..( 3000): cDNA_ID_2110032_gDNA_ID_2926134_Annot_ID_138847 3000 nt of promoter + ATG
tagtatgatattgtcctctttgggtctacatgttcaagccctcaagaatttgttattgggttacttcccaaaatgcctcatactagttggagttggacttgacttatatattagaaactctttttcttaacttccgatgtgggacctttggtttatacccaacaatcaaaatacgaattagttacgaattataaagtataaaaacgtaattaaactcagatgaatgaaaatccccaaactcagctttcctcttacggaaataaacgaattttcatgtaactaccacattgctcgatgtttattttgatcgcgtacaagggaaaaaataaaaatttgaaaaatgggggatttgaagtatttttccaatcccttattttactcgtctaataaataagaaatgtttcgctttatcccttaaatgtttacataaatctattgatatttagtgatttgagtatcagcattcagcattattgataactaaagtgggaaaaatgctcataccaaattacaaatgtggtaaaataaagaatttgtgttcttgctctaccgaattaaagaaaataaaaattattattctttaaacaagagaattttgctgcataagaccaaggaaattgtgtccgcgtgtaagaattgttgatcttacgtggtttgtctccagtcgattttaaggttttgccttgatcctagtgtttcttgctctctccgattagttggtgaggtgtgttggtagttgtatttggtttttggtcgcgttggattcttgctttcctccctgtcggtttgctattggtttgtcgtcggtgtgaggtttctccggacttattggtgcttttggtatttacaggttctatagggatgctttgtgaaagtctctcatgcctttgttcaattctagtgcttagattgttttttctccattaattttgtatcttctttcgatttctgtctctatatttggttttaatcagttttgctatattttggagtttagtttccctcttttgggcaaatgtttcagggttattgtgagaaaaaacaaagaaacagtgattattttgacggagatcgagagagagttaggagaaatattaaaaacaatcggagaaagccgaaaagaacgacgagatattgttttctttttcctaaattattctttaagaaaaagggcgtgacggggacgatatcactgagcaatcaaaggggtgatttataaatctaagtgacggcgatttagttgtttgataagttctttgattgctgatttggaagattttcttttaaagttaatccacatggcaaaaatattattattagaagaagataaaatattcattaatttttatagattttctgatatttttagctaaaacaattctaaatttatataatatttacgagtttaaaaaaagcatttacatacataacttaattatcaaggaaaaatattaatagttagagatatcaatgttacaaagttatcagaacgcacaaaaatatacagaaagaaggtcaatatgataaatcaaattcagaaaacgtaataacaaaaaatatccaattaaaataactaaattaatatgaggttaggtagcaaacgtctaaattacaacacaagtaaatttttagccattatggattaatgactattgataaaaaaaaaagtaaaaaaaataagtagaatagaatgaaagtagtgcttggtacattattatgattttttatttagtgaatgttttcagaaaaatttatttaagagtaagattaatggagaatttaacacaacaatttttttttgacttttttttcaattagtttgctagttttttaatttaattaatgtagaatgacacatatcattatttttatgataatatgtcactcatatgagtgtttgacaattttcatatatataatttcaactaataataatttagattaaaaaaaaacaaggaattcaatgccaagaatatcatataaaatatataggaaaagtattaaatttggttgacttttcattttagtcacaaacttttattaatcaacccgatttagactcgtcataaaatattttgatgaaacgcattaacgaggttaactatgtgttacttattatcagttatctccataatcaatctgctgataaatcaacacaatttattttaaaaattttagtcaacaaaaatactgatttaaagtatctaaaggaaaagttaatgtcttttcaaccaaattatttgttaaaaaatacatattttctaaaataatatgttttgctaataaataaaaagcaatttaaaccgaccgaatgatatttacttttgtactaatttggtttctattttcatcataaaccaaattttaataaaaaaaaattttttaaaaaaaacctatgaaacaataacgccggattggaaatagtgtttttttttgggatttttttaaattaacaatttgctctaatttctttatttaaaaaacgcagaaaaaaataataagataaaaagaaaagtgagcacgtagttgtcatttgcagatattatcatttgccaattttcttgtaaattcacctctttccttcgtctatctatcctcccttccgcaacattgtaagaacaccaaatcccctctcatttccaattttttgtatatcttcttgtttcatatttagatcatccaatctctaagaatgttaaaggtcaaattttaaaatttttttgtcggtttttttttcctctccggtgtcggaatccgacaacgtaaggatgattcacataggtttttaatttttgatatgaaaagagattcttctcgtgattggcccatttgttttgttttcaacaatgttcacgttttgatcgcaaatttaatttgatttccatgataaaaattggaactttcttatgttgtgatcatttacaacaatttgtgcgtgatgggttgttctcaatgtaggattttgtttgatgatcgttgggttttgaaagaagagcaatg

SEQ ID NO: 15440 - DNA, 3000 bp, Unknown
  misc_feature (1)..( 3000): cDNA_ID_3046844_gDNA_ID_2926134_Annot_ID_197125 3000 nt of promoter + ATG
aggccattcaaaaatatgaataagaataaaaaaggtttaagtgctattcagaaaataaataattcttcagaatattaacaattattttggaaataatttgtgttggaaacatgggaaaaatcgtttggatagtttgacgaagcaaaacaacatatatcataataatctcgaaacaccataattttctcagtttatcccacttcttaatgtaatttttggttactaagagaataaatgaatgagtaagacatatgtattttgtttgttgaggatatttatttcgtcatttattttaaaaaatgttgtattttaattttttattattattaaaatatatgttttgtcactatgttacaacataattcaattttgatatcatttatatttataaatatatttaataataataaatataagtaaataaaattcacagcttctacaactttttgttaccataattttctacaacataattttttaaagtcgaagtctctacagccaaactttctacaacataattttttaaagtcgaagtctttacagccacccttattgtattaagtcttaatatagtataaaaataattactttatatatctaaacagaaaataaaacatagaaaatatagtatatctattttattacgtaaaaaagttagaatatgttttgttgtacaataaaaaatgtaatgaaactcatactaaaaatttactcttttacatgtgcaaattgcaggaattatatcgagaatcattgttgcttttaaaatttaataatcaatgatatgtttttaaataaatttaactctcagataaattaacaatttatttttgaaacttatggttttaaatgattggttttgataatttatatgtttgttgtgtttattcattatatgtgaatacttagctaataaaacgggatttgtaaaacaaatatttactaatatatacacgtttataaattcttccatacactaaccgacaacgtatatactaacacatgacgttttacaaacacacaacgtatacaactatacatactataagattcatttatactataagattcaaatttgatatagactttaatactttgtaaattgggaaatatgtcagaaaaatcgccaattttcaaaaataggacgaaaaaatctccaactcctcaaacgtcgttttaatcacaaacttttggttgacttttccagaaaatacaaaagtttggttgacttggccaaattagtcatcacgttaagtctccgttaggacgacgattacagggttaataagccgttaagggcttccgtcttagcaaaacgacatcgtttctataatgacaaaatgagccataatcgatagaaacgtcgtcgttttgattcagagagatttgagaaattcccaaatcgattagaaaccctaaaagagagaaaattctgaaattctctcaatctctttccaattgatcccgatggcgaagacgcggggaggaaactggaatcctcgtcggtcgcggaggctaatggctattgcaggcgaagctaacagagcaaacataacgaatcgaccaccgaaagttgttgagatctcagaagaactggagacaaatcaaaacccagaagaaaccgcgatgaatcagatcccagaagaaactgcgacgaatcgaaacccagaagaaactgcgacgaatcgaaacccagaagacaatgtgggtgggactgttggtgaagacaatgttggtgaagacgatatggatggaggtctagaggaggaaaattgtgatgattttgaagcagattttggtgttggtgcaagagaagatggagatgcaagcaacactgatgctgacagtggaggtaaagattgtgatccccaatccacacacacttcgatggcacatcacattctccggtgactccagatgtaacagagcttgaactcattgttagagagagagagatcgaattgaagaatagaaattttagggattgaaatctgaaatcgatttgggggtttttagagtctcatctgtcattacaaaaacgatgtcgttttgctaacccggaagccgttaacggcttattaacctcataatcatcgtcctaacagagacttaacgcgatgactaatttggccaggtaaccaaactttggtattttctggaaagtcaaccaaaagttttgtgattaaaacgacatttccggagttggaaatttttccatgcaatttttgaaggttgaagatttttctaacattttccctttgtaaattatagaagataacattttatccacactaagaatccatcaaattagtataagatattaccaaaataacagacgaattaaaatgttatctcgtgcaaagcacatggtactgacctatattaatgagaatggtatgaaatttttgttattttaattacttttacatattaattattctacacaatttatgaaatactaactgtttttccttttgtatgtgcaggttgcaagaattattatatgaatactgacctactctataaaatttaacagctacatatgaccgagatatgctgagctgagattttgcagaagtgacgctttttcaagttttcaaatttagtaaaaattaaattaaaataaataaatctggcgagatatcaaatcacagccgttgattgctagcaaaaaatctgacctctttaaactgtaatagcaaaaaaatctagttaattaggctaattatctattagatcgaactttcacgttgtttcaaatttaaagagttacacagcgtgtcggccacttaaaacgatgtcgtaatgttgtttcccctcctcgacaagcgccaagcccgttaaaatccccaatttggatatatatcttttctctgtcgacgctctctctctctctctctctctctctctctctatcttaactcaactattcagtttcaattttcaaatttcagaaaccattttctctctctatctctcttcttcttctttatctcagta

SEQ ID NO: 15441 - DNA, 3000 bp, Unknown
  misc_feature (1)..( 3000): cDNA_ID_2165766_gDNA_ID_2926134_Annot_ID_197120 3000 nt of promoter + ATG
cactacttggcgactaagtattggtgactgaattgcgactatttgacgactggttacaggttgaattatcgattatacattctgtttttagttaaaactgtaattaacaaacttgataaagcaactaaaaaactgtatttcacaaacaaaactgtaattaactaacaagctgtattttataaactccgaaccttaattcaaatacacacacattaatacaagttcttaagtttgataagaaaagcaactaaaggaaggggaaatgagatgttcactcctggggtggatcttgtgaagcagtagcagtctggacatcctctgtttgatcttccgaagcagaagcagtagcaccagcagactcgaggaatgcgagaaacttggggtctctttctgtcaagtacttcttaaccatcctcaagtgtttgatctcttcttgttgctcattagcaacacgcttgatatctgcttgctcagctttcaccctcaatgcctctgcctcacgatgtgcctggagagtcgcttgttcttctatcttgcagttggcttcctaaagctgtgactgcaaggtagtgaaagcagaactgcagcctgggtacttccgctttccattgatgtacctccctaagcttcccattccaaagtatacccatctcttgtttgtgacagttgactgcaaacaaaagacaagaggattattgtagaaaagatgaagcaagtgataatataaaaaaaagacaagaggaacaagaccattacctgaaggaagacctcatcatcctcctcctgagatagttctgatcgacgggaagtaccatctgacccttcatcattctcacgggcagccaacttagcttccttgttcctcaaatatgcctcatgaatttcatgcgccttcctatcaacaaaagtcccatcttttttggtatgagtcttaacgaatatctcaccaatagtaggtggtcttcccaactcaatttcctgaaatgttgttcacaaaacaattcagactcttaataaaaatcattctataaataaacaaatgtaacttactatctcttgctcaatctgtaagaaagactttggccccgatacatgtttgtgaggaccaggaccattacggtcagacattcaagctgctgatgtggttgaactcttggcaatggcttcttttgtgtcccaatacgcacacatttccttccacaatgtcttctcaatccatggcggtcgctcatttgcacgttttgcgcaagccttagaaaccatgtccttcatacgcgtttgacatattttaaagaatttttcttcaactacaccagtcagtgatggatgccatgtgtgtgtactctacaaaacaagaggagagtttgatgttagtgatcaaacaaccaaaccaaaccaaatgtaagagattaataagagatagaagttaatttattgcgaattcgaggaagtatatgtgtcttctttcagtaggtacacagctccaactgtaaaatggcccattaaacttgtttgtgaagacctttgtgatcttccgggtcagcttaccattgtcgtgaccaaaccttcaattacataaaccaattagcatatacaaacctaatcaacttagcatatatacacacattactcaatattaacgcttaacctaatcaacttattaaatatattacacacctaatcaactttgaggatacacacacacattactcaatattaactcttattctaatcaacttattaaacacctaatcaacttaataaactaagcttaccatagggtttcacacacttaacacacacatattacacacctaatcaacttagcaactctccctaatattctcagcttaccatacggttagaggctcaaatgtgggagagataaccgttgtatacttctcacggcctggctgggcaagcatgtcatgtagatttgcaagcaaagcttcagggagagttgattccctttcaagatcagccacaaactcagcatcatcatcttcatcttcctccgcgtgtgagttttgagcttgagagctgtgatgagatacataggctcgaggtagaggatttgaggcttgcggaagtagaggattggatgcttctcgttgaaccagcgctatagactgattggaggcattcttgtgaaccgccgctggagattgtctcgccgtagaggctagacgatgaacagatcctccagatctaggttgagtcgagccggatgctcaaaacagagtcgatccagatccacgaggagaacaagatccgcgaggagacccttcgcctgactggaaaagttgcgtcggaggaggatagtccctgacggatggacccgttgaaggctgtgcagtcggatgatgttcaaaatcttgaagcggggctggacgaatcaccagcgtgaactcgtagtggctgggatgaccactgggccttcgatttgatgccctagtcttcggttcaactcgaactggctgggaagaagtgggtcgatttgagggaatgtttgatacacttcctcttcctctcttgcctccaccacatgtcttcatcacttgaagctaagaaacgagagattgagaagattgaagatggattgatgaagtttaggatcgaaaggggattagggttaggttagggttcgtcgagagtgagagagtgaagagaagggggattagggttagggttaggcgtaaaatcgtttatatagtctgggtttagggctaactttactggatcgttactaaatcaagcatgtgaaagcccaattaattgcccaaataaaacatatgagtcgctaaatggtagctgtacttggtgacctattagcgactaaattaatgagtctcacattcaagactgattagcgactattgtataatatagactaattagtcgctaatacgtcactatttagttgccaaaacttacgactacataatcagtcgccgaattaagtagctaacaacgtgatttcttggtgatgacgaattcatg

SEQ ID NO: 15442 - DNA, 3000 bp, Unknown
  misc_feature (1)..( 3000): cDNA_ID_2165774_gDNA_ID_2926134_Annot_ID_197117 3000 nt of promoter + ATG
tgtccgagtgttgtttagagatttggcgctgacttgatcagtgtcagaaacagagatgatggaacataggtgtgatactacattgttgttataacatatgtgtcgaacagagaacaaaaacatatttgcttaatggtactttattctctgattttcaatgattgtctctgatactttttcagaatgagactacatgaatctgtagaagaagaaaaaaacgtaattgcacccatcaaacccatcgtctcattatgtcctacaattaaaacagaaattgaaatccccaaaccgtgtttgaattattcttcaacattgggtgacaataaatgtatttattgcttttgccctcgtgaagattaattagggcataaattgtatttgtaacttccacttcttcttatttcatagatctgacaattttatttaccctaaaaaaattgcttcgtcgtcttcgttgtcgtcaactcccttaccttcgctgatgaaagacaaaaagttgagaaactgggcggagcttccgtccaagttgacgtcatcgattctacttcgtcttggcgctattgagatacttcaaaacgctcaaaaagtgtgcaaaccgtggcatcgagtctgcaaagacccctcgatgtggcggaagatcgacatagataaccgcaatgatagggcagccttcaagtacgacctcgagtcaatgtgccgtcacgcagttgatcgtagccacggtggtttgattgagatcgagatttggtactacggtactaatgatctcatcatgtacatagctgacaggttctgtttctccctagctctctttccatgttaaagagaatttggtcggtgctaatactagggttagagtgtttgctaactatagggctaagagtgatcggtgctaatccaagggttcgagtgattgctaattctgaagttataagtgattggaggattttgtgtcactctttttaaactagatttatttttatctgttctatatccttctactgaatctctgataaagcaccttggtttgcttagtggttttgtcaacgaagtgttctcaataaggttatgtttttgacttttttagtaacaattatttgcaggtcaagtaatctgaaaagccttggacttgtaaggtgctttccaataacagatgagggagttgccaaagcagtttcgaaagtaccgttgcttgaataccttgaggtttcatactgcttgttttcaggagagtctctgagagatataggccggtcttgtccgaatctgaagacactgaagctaaaccgagcccctgaaatcatgttttcaaatagtgggtttgatgataatgccaaagcaattgcagaaagcatgcctgaactacgccacctccagcttttagggaacgggctaaccaataagggcttgaacgccattcttgatggttgtcctcacctggaacaccttgatttacgccagtgtttcaacatcaaccttgttggggatctcaagaaacgatgttttgagaggatcaaagacttgagatgccccaatgactcagatgacgattcagatgatggctcagataatggtgcggtgacaacatttgggtcacaatttaatgaaaccgactatcattggtactagatattgaatctttctgaatcttgcggaaatacctttgttgttgttgctttgttttttgtttttgacaattgacacctttgttgtttgacttatgaatagtttcagtttcctttcttggtagtttcagtgtctttcctttgaacttttttaagaagttttgagggcgtgattttaagtcgttcgagaacgatgtcatgggtctttatattttttttagttggtacattactttcacgattgtttagttacatactatcaaaagtaataatattataattaattaaatttacttatgaaaaccactaattttagcatcaatccaaagccttgcgattgatagcttaaaaaaaatgttgagtagacccgtagctatagagagaatataatcgtgtaacacttttcccttggtgtttcatcaccaatttcatttgatctttatatcaacaatgtccaaaacacaaggtatggtgtccccatgcaaatcacaacatcatcaataatcactagctagtagactcttaatgattgtttacgtgatcacctaactgtataattgactatcagtagagccggaccataacacatgaagatgaaacattccaatggggctcccattttaaaagggcccaacaaaaattttattttagttaaatatgcatatattaatttttgataataagagaaaatagttagttttatacatataaatcacaaataattgtgtgatccaaaatatttataaatctaatatacaattaaataaataattcaaaattttgtttaaattggttttctatttactctatagtttttaagacaaaaatattttgttttcgtaatttaaatggggccccggatttcattggtccgggactatcacaagaacagaatataaggtgataaaaagaaataagattgtaaataacttttccttttggtaatattttttttttttgttcaatccttttggtaatgtgtaaaaattcacaaattatcaaaagaaaaagagtggatattgattttactctttacttttggtgaatgcacttttggaaattgattttactctttactgtatttgggaatatatgcattgcaagttacaagtcaatttgttaataaaagtgttgaatgttttgtttcatctacattattattcttcacctttgttctaccgggtttaggagtagaaaacaatcaaatggattctcagattgttaatcttctgaggtctaaacagtattgtgggcctaggcccaatacattatttcagtatgcttggcccaaattagtttcgtataaaataagttttaccgtgaggaactaaattgtaaaacagagacggatacggcaattgtatcctttagaatg

SEQ ID NO: 15443 - DNA, 3000 bp, Unknown
  misc_feature (1)..( 3000): cDNA_ID_2182795_gDNA_ID_2926134_Annot_ID_197109 3000 nt of promoter + ATG
atcttccaaatcgagtttcctgccatgtcgatttcacaaaacacgatcagttttgagattagcaatcacacagacaagaggacaaagatagaaaaaaagaagagggaagagaacataagagatgatcacatacctgtccaacaccggcaatcagaaatttacccgattttgcaaaagccaaagagttgacaaatccagtctgtaagatcaaacaaggcattgcaaggattattacttggtgaagtgaaatgcattaatcacagtcacaaacaacagattcatcagacaacactaaggaatataactagtgaacgaaaatttaccagtggaagctcgtacaaaggtcgaattgcattagtttcaacagcccacaaacgcacaaaaccattaccagctccagatgcagcaagatcactgcctctactagtagcaactgcattgacccaagaatttgctgaacagttattgttgactggttcatgatcaccgttttctgttaagcaaataaataagaattagatatttcagagcatcagtagctgcaacgaaacaaaagtgttttataactatatactgcaatgtcaagatccaactgcaacagagatgaaatggggaggatctaaattaggtttcacctaagattccattggtggtaatcccatcaggtatatcttgatgtgcattcttgaaaacgaacaccggtttcttttttaacatgccccaaagagcaacagttccattatccgaaccagacaggtactcattatcactgatgaaacagcagctctcaagagacgatgcaggagctcgatagatcatacgggtgctctcaggcacctataatcatataacaagacttacaaatacagaataataatagaaaccttatgatgatatcttccaacagtgtttacatggaggatagaactattaccttatgatacagcatggttctatctcttccaaccgtaagtgcacgctccttcctcagtgcatcaatggctagaatttcaccctggtgtccatgattttcagttataaatgctttatcttctacgttccacaccttcacagttctatcaaatgaaccagaatagagttctgaagttccgtatctgaaacatagacaagaaactgtgttccggtgacctggaaaggcctgtagacacataattgtaatacctgagcgcaagacttgatgaagaacaaataaaaaaaacactaaacaaaaaccaaatttattatcattacctggacatgctctcgggtacgaacatcccaaatatgaacatgacggtcaactcctccagtggccaaataacgaccatcagagctaacagctaaagcaagagattctctactgtgatttttgttacgaggctccctcaatttcatcccatgcgacttgagaatttcatcacttggccatatgtatttgtcagttttaccagaagatacatcccaatgcataatagtaccatcttttgaagctgaaaatcctctagaatcgtcatccgataaagctaccgacacaacagatcgtcggtgcttgacaataacactaaacccatcagtacttagtggctcctgaaccctgaatcattgaaaaactttaatcaatactactatcaaccaatcttcaaagatatcaaattgacctaagaaatgtacaaaatcactaagtttcttcacaattaaaccagctccctaaaacactaactacccacaaaccctaaattaccaacaatctcaaacctaaactatctaatttgaatacattgaggtactaaatttcttccttacctcgatgcaataagtcttcgaatcctaccactatcctcctgctgcttctgcatcaaactcttcttaatagtctcatcgtcatcttcatcatcatcatcatcattatccgcttcctcacgctctctcctcatcgcttccctccttctattcagcatctcctccgccaatctcttccgcttctctcccgccgtctcatcagcaaactcatcttcatcctccacttccccatcaactcttctcccatcttcatctccgccagtaaatccgttctcttccgcatcagagtccacagactcgatatcgtcgtcatcgtaactgacttttctccgtttcttcggctcttcctcaaaaaatggatccctttcattcgaaccctttttacctcctctcttaaagcttcctcctttcttcttctcgttgttgtacttcattcttctctctctcactccctcttagggtttaacgattttacactttgactcgtctaggtttagcctcagggtttagtggcgacggaagaagctggaaaacgattttgtttatttggtcggaaagtttacaactttaaaccttccactaggttttcttcaggaatcgggtctaccgggttgacccggactaaccaagcccatgacttacctggtctatggtttgagcccattaactatttcgttcttttaaagcagaaacttgggcctttaatttgtagagccgaagactaaccggaccgtcaatttaagtttggttcaatccgatttctgaatttttggttctgatttctgaagagtagtacgtaaaccgaattgggagattctcttatttcagtaacagtttaatacagtttttgtttagtgttttcaatttcggtattttttacaaactcgaatcggatgattccggtttaataaaatcaaatgagttcggtttagctgaatttaaaactgtttttaatcttatagtataccgaaccggaccatccatctaatttcaattgtctaccaaaaccgaccgaccagtctttgtcgaaagttgtctttcttcttccttgttcgattttcgcctcctttggcttttcattctctctctaacttctctatgttaaaattccgaaagctcgattcagaaatctagaagcttcctcgagggccctcgcgtagaaagtcgaactcaaattccctggagacaaagaagaggaag

SEQ ID NO: 15444 - DNA, 3000 bp, Unknown
  misc_feature (1)..( 3000): cDNA_ID_2182799_gDNA_ID_2926134_Annot_ID_197108 3000 nt of promoter + ATG
ccacaagagttctttctaatgtgaactctggaaagacttatgcatgcccagataacaaagttaaatgcatgtacaaaattcttcgtagcacaggcatgttaagatatttgcaatacctgatatagtactgcaatagtgggctttgcacatccaaacagaaacttgatatccagaacctgcaattcctcaagcctgaaatttagacaccacactcagtacatcatcattcagttttaaatatccccagaaaaatcatatcgtagtgattctagaggaatgagtatattgaggattaaacagtttatttacgaaagaatctgatgcctggaaacaaatgcacactagaattaaagagtacctgatattaaaagcttccttgagctgtcccttattatcaaatggaataacctaaaagaaaaaccaaggaaatagaacgcatcatcatacatgtataaacagatagattagtggaagttcagtaacatgatatatttaagtaaacaagcacatctgtcaaagtttttatagaaggtaacattataccttgaacaagccgtcatacagatggagtccaattaatctacaatctggatcaattataccaatctacaaagcaattgtcaaatcagaggtaagctacatgcccaccaaacccttaatgacaacgcatattttttgatgaaggaaagtaaatatataagcactctgaaatgcacagtcaagacgacgatattcaatacctgaccattgtctgttggccggcctatacgatcagaaacatcccccattgctctgaaaaaagtcaaaacatcatacagaatcagctgtaaagtagaaaatggtcatctgatatattgcttccaataataaccagtaagatgcaacaattacgccagcaccatacatgattttttccatgctttggatatacagcaatgtatcaattttgtgaaaggtgagaacctataatcaaactctcataaaaaatgcttaatcagaaataggttatagatcagattttgtaaagcaggaatatgctgtaaacagctatctaaaacaggcaagttggtaccatgcactaatctgtacataggtgacgagtgtaatacatttatttctaacaaaaaaatgataagataacggcgaacatgatcatgaactaaaagaaaaatagcacaactggttggttaacatcaactggatgcatggaaaaaaatttatcttttggaagctataccttgtaataagctcagaggactcaggatcccattgaagaacacagaatttgtatctctcagttgcaatgaacaaaaagtcttgcgcttcgccctacaaaagacggtggacaatactatcaacattttaactcattattaagaccatgacaaaagaacacaataagagatatatactcacatggggtcggaacaactccagagtagcgattcttccatatataggaacgtccaacataggctgcaatataggaacatccagcagattcttatattactaacaaaacaaagcatgacaacaaagtttttgaactttatactctaatgtacatggaacttaatccatataagcttgacagaatagagatgtatgtacctgaagtccttgtggggtaagcaaatggatctcgattcgagtacatttcctgagaacagatcaacactgctgtcaaactaatctactaatggatctgatagatgttacaatttaaggggacaatgctaaatcggataaatgagataactttcaaacaaatttacagtactgatagctaacgataattgaaaatcctccatatcaaaaaaggcacgatcttcaaatgtaatttagttcaggaagtaaaagccataccaaaaaaaacacaattctttgtcacagtttcaaaaaatccacctcatcaaagaacccagaggcattaaaatccttatagtcatctcccaaactgaaattgaactacaattttgtttgcaaagtgggtaaatttatgaaaattaactcgtgatgggaaattcattgaaaaccctaaacccaaatcaacagctgcaattcaaaaggggactaattgacaaacaaaaattgataacaaatagaggtagggggagagtttcgtacgcgacaatgagattgagctcttgaggacttgtgaagttgccaacgcacgagtgagtgacactggtcggtttgtgagccgtaacaacgtagttccatgagctcatcttcctcttctttgtctccagggaatttgagttcgactttctacgcgagggccctcgaggaagcttctagatttctgaatcgagctttcggaattttaacatagagaagttagagagagaatgaaaagccaaaggaggcgaaaatcgaacaaggaagaagaaagacaactttcgacaaagactggtcggtcggttttggtagacaattgaaattagatggatggtccggttcggtatactataagattaaaaacagttttaaattcagctaaaccgaactcatttgattttattaaaccggaatcatccgattcgagtttgtaaaaaataccgaaattgaaaacactaaacaaaaactgtattaaactgttactgaaataagagaatctcccaattcggtttacgtactactcttcagaaatcagaaccaaaaattcagaaatcggattgaaccaaacttaaattgacggtccggttagtcttcggctctacaaattaaaggcccaagtttctgctttaaaagaacgaaatagttaatgggctcaaaccatagaccaggtaagtcatgggcttggttagtccgggtcaacccggtagacccgattcctgaagaaaacctagtggaaggtttaaagttgtaaactttccgaccaaataaacaaaatcgttttccagcttcttccgtcgccactaaaccctgaggctaaacctagacgagtcaaagtgtaaaatcgttaaaccctaagagggagtgagagagagaagaatg

SEQ ID NO: 15445 - DNA, 3000 bp, Unknown; identical to SEQ ID NO: 15439
  misc_feature (1)..( 3000): cDNA_ID_2110032_gDNA_ID_2926134_Annot_ID_197099 3000 nt of promoter + ATG

SEQ ID NO: 15446 - DNA, 3000 bp, Unknown
  misc_feature (1)..( 3000): cDNA_ID_3088380_gDNA_ID_2926134_Annot_ID_197098 3000 nt of promoter + ATG
tcccagacgtgttatccaagagaccagtaagattcaagattcgtctgtgacggttcaagtgcctcaaatggagcaatctccagcgtcaaactcagtcaaagagatcactgacccgaagaagaagattaaagtatatgtggtggcagcttcaagtgagtgtaaaggtctgaagagatttattgaggtggatgtgaactcgacggatcaagtgaaaatactgagaaccgagttggttgaaagtggtcggaggggtcatataagaatgcctcacgaaggatatttctttgtggacagaaagaaagagagagtattgaacgaagatcagtcattcgagtggaaccgtgttcttccagccgaaacagtttatatggttagtggacgtgatacacattttgcctcgtcttttactcgtggctctaaagtcacaatgctttgtgctcaaaaagttctgtagaaagtctgtatatatgacacagaagaaaccaaaaactatgatacattcagcaacagaaagttatgtggatctttaactctttgctaataggttttaatctttcttcaagttttcttctggcccttaagtcacaatgctttgaaatttttgagtatatgtagatacatagaagaaacaaaactatgatacatttagtaacagaaatttatgtggattttatcctatttgtaggtgtaactcttttcttctaggttttaatatttttcttcaagtaaacttgttgttattgaattccctttagtcgaaagcagcgatcaagcttctcttataagttacaaaccctaatttcagcaaacacaacttggaaacactagcagcaacaactttgttattttaaaacattagcaaaagaaatctcattgcaacatcaaatggcaaaactggaaggtaaaaaaagcagaacttatcaaacaagactaccaatatgatgaactgatgatttttttttttttttttttggctcaacaacaaactttccattcacccatttatggatacacagtctagctcaacagagcttttaacccaaattggtacaatagaatacaactttagatcataattctcaaaagaaagagattccttagctattctatctgccactccatttccttctcggcttgtatgcacaagcataaaatcctcaaacttgctaagtagatactttatgtcttggataattggattgagacttgacaagcataactttcatgtaaccaaagacacaagttgctgagaatccacctcaaaaatgatcttcctataattgaatcgggataatgacagcacagcccatctaagagcctccacttctacttccagcacgcttcttacttttaccacagctcttgcacctaaccataacaccttccctgtatgatcgcgaagcacccaccctaagccacattttaatccttctgttggccatgccccatcaaagttgcacttaacccaagattgtggtggagcttcccatgtttctcgtctgtcccgacggtgttgtggttggtgctttccttacattctgagcctctttccttctaatccactcatctgcatcttcttgtgtccttactaatacctcattggttccaaattccctccctttaagcaccagctcgtttctgttcttccacagcctcccaagtatccaagggactaaagcctccacattcttcagatcaggatattcttgtttaagatgttgaactctatggaggtttgtatgaactgatgatctaggaccggataagttcccttcttcatagcgaacttattcaaagaatgttttgtgtatcattcttgttacattgttattaatgaaaaaatattattggtcattggactgaacacgagtgttaaatatggaccaggccccaaataagatccattgatatatgaattaaataacaagaataaatcgagtcaccaaaccacttgccttttttaacgagacttgttcaccaacttgatacaaaagtcattatcctatgcaaatcaataatcatacaaaaatatccaataacactaaaaaattaaaagaaatggataatttcacaatatgttatacgataaagaagttacttttccaagaaattcactgattttataagcccacttgcattagataaatggcaaaaaaaaacaaaaaggaaaagaaataaagcacgaagaattctagaaaatacgaaatacgcttcaatgcagtgggacccacggttcaattattgccaattttcagctccaccgtatatttaaaaaataaaacgataatgctaaaaaaatataaatcgtaacgatcgttaaatctcaacggctggatcttatgacgaccgttagaaattgtggttgtcgacgagtcagtaataaacggcgtcaaagtggttgcagccggcacacacgagtcgtgtttatcaactcaaagcacaaatacttttcctcaacctaaaaataaggcaattagccaaaaacaactttgcgtgtaaacaacgctcaatacacgtgtcattttattattagctattgcttcaccgccttagctttctcgtgacctagtcgtcctcgtcttttcttcttcttcttctataaaacaatacccaaagagctcttcttcttcacaattcagatttcaatttctcaaaatcttaaaaactttctctcaattctctctaccgtgatcaaggtaaatttctgtgttccttattctctcaaaatcttcgattttgttttcgttcgatcccaatttcgtatatgttctttggtttagattctgttaatcttagatcgaagacgattttctgggtttgatcgttagatatcatcttaattctcgattagggtttcatagatatcatccgatttgttcaaataatttgagttttgtcgaataattactcttcgatttgtgatttctatctagatctggtgttagtttctagtttgtgcgatcgaatttgtcgattaatctgagtttttctgattaacag

SEQ ID NO: 15447 - DNA, 3000 bp, Unknown
  misc_feature (1)..( 3000): cDNA_ID_3088384_gDNA_ID_2926134_Annot_ID_197095 3000 nt of promoter + ATG
taacaagaatgatacacaaaacattctttgaataagttcgctatgaagaagggaacttatccggtcctagatcatcagttcatacaaacctccatagagttcaacatcttaaacaagaatatcctgatctgaagaatgtggaggctttagtcccttggatacttgggaggctgtggaagaacagaaacgagctggtgcttaaagggagggaatttggaaccaatgaggtattagtaaggacacaagaagatgcagatgagtggattagaaggaaagaggctcagaatgtaaggaaagcaccaaccacaacaccgtcgggacagacgagaaacatgggaagctccaccacaatcttgggttaagtgcaactttgatggggcatggccaacagaaggattaaaatgtggcttagggtgggtgcttcgcgatcatacagggaaggtgttatggttaggtgcaagagctgtggtaaaagtaagaagcgtgctggaagtagaagtggaggctcttagatgggctgtgctgtcattatcccgattcaattataggaagatcatttttgaggtggattctcagcaacttgtgtctttggttacatgaaagttatgcttgtcaagtctcaatccaattatccaagacataaagtatctacttagcaagtttgaggattttatgcttgtgcatacaagccgagaaggaaatggagtggcagatagaatagctaaggaatctctttcttttgagaattatgatctaaagttgtattctattgtaccaatttgggttaaaagctctgttgagctagactgtgtatccataaatgggtgaatggaaagtttgttgttgagccaaaaaaaaaaaaaaaaaaatcatcagttcatcatattggtagtcttgtttgataagttctgctttttttaccttccagttttgccatttgatgttgcaatgagatttcttttgctaatgttttaaaataacaaagttgttgctgctagtgtttccaagttgtgtttgctgaaattagggtttgtaacttataagagaagcttgatcgctgctttcgactaaagggaattcaataacaacaagtttacttgaagaaaaatattaaaacctagaagaaaagagttacacctacaaataggataaaatccacataaatttctgttactaaatgtatcatagttttgtttcttctatgtatctacatatactcaaaaatttcaaagcattgtgacttaagggccagaagaaaacttgaagaaagattaaaacctattagcaaagagttaaagatccacataactttctgttgctgaatgtatcatagtttttggtttcttctgtgtcatatatacagactttctacagaactttttgagcacaaagcattgtgactttagagccacgagtaaaagacgaggcaaaatgtgtatcacgtccactaaccatataaactgtttcggctggaagaacacggttccactcgaatgactgatcttcgttcaatactctctctttctttctgtccacaaagaaatatccttcgtgaggcattcttatatgacccctccgaccactttcaaccaactcggttctcagtattttcacttgatccgtcgagttcacatccacctcaataaatctcttcagacctttacactcacttgaagctgccaccacatatactttaatcttcttcttcgggtcagtgatctctttgactgagtttgacgctggagattgctccatttgaggcacttgaaccgtcacagacgaatcttgaatcttactggtctcttggataacacgtctgggaacaatcacaattgtatccaagggtttaacactgttacactcgtatgactgatcttcgttcaatacttgattattgtgcgtaaagatgtacccttcttgagccagtttcataagacctctcagtgttttcacctcatccgtaactttcacttgcaccagaatattcgttgggacttcattcataccaggatatggcgacacatatactagcatctgccggactcttttttttccgttagtgatctttttgactaagtttgactgtggaaattgcttcgttggaggcacttgatcgttgttgttcttactcgcaaacttcacagacgaatcttgaatgttaacggtctctttgactgagtttgacggtggagattcctctgtttgatgcgcatcttgaatcttactgatgtcttgggttgtctcaggccgataactgtaaatctttctgatctcttcctctgtcaaaggccaatcttgctccgcaaagtactcttcaactgaaatccacggtgctggaggagattgctctgtttgcgggatttgatcgtcgttgttgtgaatagggttcacgtcaggagagacttcgagttggatttgagaatcgtggaagatctggcattggtcgaggttaagatcttctcgaagaataaaaatgccgtcgacgataagggtttgtttcgaaactgggacacgttgagacttctcgatcttctgtttgaccactaacaatgtatctgtgcgttccacttcaatctcgaacgatgaaccacccagaatctcgaccacaaacttcatgactctatcaatggtgtttcaagatcaatggagactaatgaagaagagagtcaagaaacagagagagcgagagagaaagtgattgttttgtaaagatagttcacgatagaatttggttttaatatcattcattcacatatcaaatgaaccgcatttgggcttgacccatttttattgggttacgtggctcttaagtcaatgaaagcctcacataaaatcatcagtatctatgctacagtatattcttacttatattatccaacggtaatgttataaaaagattgattaaaactatctagatccgacccattaaaccgtaaatctacaaatccgacccattaaagattcttgccggagacgaaaggtattccgattgaggagatg

SEQ ID NO: 15448 - DNA, 3000 bp, Unknown
  misc_feature (1)..( 3000): cDNA_ID_3088388_gDNA_ID_2926134_Annot_ID_197094 3000 nt of promoter + ATG
tacactgcatattaactttataacataactcaagtgataaattgatttgacagccaacgcttactaacacaagtatgacattcatttcaaccgtaattgccccaaccaaattcacagtagtggttattaaagtgaagaaattactgacgatctctgactatctcatttcaaacatggttaacccgactcttcccgacgatttactctcgaagatagctaagaacctggctaaccaatgctggtccgaccttggtccactggtacgatccggcactcgtggaagagacattgtctaccgtccggatgtcctcaaagatgccaatattctcaccttgtgtaactcgcccgatgacttccaagcttgagggggccacaatccctccggatccgctgatgaaggccgacatcgaccattttttttacggtgttttgcagctaataatcccacggcagtgtattacgaaggtattcgtgttctaacgcatgaacgaaacatcaatggagccatcaggctcttacagcgtcatgctccagtacgagcaaatgcaacagttacatgcgccattgtattcatatgtgctgggtatgattatatgggcgacttgtttctacagctcttcacccgcaaccattatccattggactcggttgccactcgaatttgggtgatgagtttcttcaaggaaataaagaagtttgaccctgcatacaacaatacatatggtcctacgttctcttatcctaccagccatggaattagtatgcctccttgcgccttatattgttacatggtatcaggagctttccaaaacgtttgcaaccgctgttacctctgatcgtgtgccaggcgtgttagtcaaatgctatagttaaaatctaaagttgaatatttttcagccaaattcgcatatgatatttagttcccgaagtaaatgtaaatttggatattaaaatctaagcgtccacaactacgtacacgtgcatctaccaaataatacttaaaggttttttgtttgtctcggaaaactagatatgtacgtacactagcatgagatatcaactctaacgtacactaaaaaataacacattcaaacatatgaggtctttggtttgtctcataaatggtgatatttatgaatggacgtacactgatagtacactacagcgtacactgtttgttgggtaaatgtagaaatgtaaatgtggacgtacactacaacgtacactgtttgttgggcaaatgtagaaatgtaaatgtggacgtacactaaaacgcacactaaaacgtacacgtctagttttaagctgttattaaaaagtggttgctcataacaacaataacaaattatatatggaatactattacgttgatttgacaatatgaatacacatcatcacttaatacctttgcaataaatacaaccataacttacccaaccatatcttcaatgatgcttatttaagtgttggaatttcattttgttaaaacaccttactcctaaatataacaaacccaaatattcatgatgatttgcttgcgaagatagccaagaaaatggctgacaaatgttggtggtacctcggacctatgttgaaatccggtcctcgtggaagagacattgtctaccgtccggatgtcctcaaggatgcaaacattttcagcatgtgcgacgatcccgatgacttctacgcggtaggccacgatccaaatgacatcaactccgaaggtcgctatagacccttcttcaaacggtgcttacaagctggtaaccccacggctatttaccatgaaggactgcgtctcgttacacatgagtctgacattcagggagctatcctacacttagagcgaatctccccaaggaacgccgctgcaacccttgcatgcgcaattctttacatatgtgctggtaatgctcacatgggtggtgtctaccttcggctcttcggaagcaaccattatgctttggaatcggaggaggcacgtgacatttgtgaggaggtgctagaagatataaagaaatatggtaatactttaaaatacacatacgctaacagtttttcgtacccggaatgtggtgacttaagcactcctgaatgcgcagagatgtgttacatgagatcgagactcttcaataatctttgcaaccaatgttacatctggttgtgtgctaaacggattagccagatcctgtagagctcacattcgccacgatcctgtcatatttataagtttttcatgcaacaatatgtgagctttttacgttgattatcagtaatggaagtttgtttttaataattatcactttgtaattgattcaaacatactagctcaaactactctaatatgagacatcattaacacaaaataataataaaataataaaatatctacgtacacggtatatgataatgtacatgtggtatagtttaattccaactataaagattacatagtgagcgacggtatagtttgtaaatgaagacgaaagaaaatttgatttgacgtcgtataacacatatctagaagatttcgctccatattaattactcgctgtcaaatacacactagaagtgacctccatcacactctcattaatatctctattagacatacacggttcccgagcaacgtactcaattgatttggcagataaaataagtaagttaatgtttatttgaaaagattgttagtaaatgcgttgacccctaatatagcactatacatgaagccatattgttccacttatatgcaatacaaacagacgttaactcaaccttctgtaagaaaacgtaatgagtattttatagacatacacggcgcgattatgagaggtacacagtagtttgtttaaattaaaagttactaatatgatgcactaaatatacatccacgtcacccacccacttacattgatgattattcccctctttaaaactcatgtcaaacacacttagttgaatacacgaatccgtctaaacctcctcgtttgaaaaaca

SEQ ID NO: 15449 - DNA, 3000 bp, Unknown; identical to SEQ ID NO: 15438
  misc_feature (1)..( 3000): cDNA_ID_3088392_gDNA_ID_2926134_Annot_ID_197092 3000 nt of promoter + ATG

SEQ ID NO: 15450 - DNA, 3000 bp, Unknown; identical to SEQ ID NO: 15437
  misc_feature (1)..( 3000): cDNA_ID_2035053_gDNA_ID_2926134_Annot_ID_197084 3000 nt of promoter + ATG

SEQ ID NO: 15451 - DNA, 3000 bp, Unknown
  misc_feature (1)..( 3000): cDNA_ID_2035049_gDNA_ID_2926134_Annot_ID_197083 3000 nt of promoter + ATG
acgttgtcaatggtttggaaaagctttgcggtgagatctttaaggctttgcttctcttccttaggcttagcggagataacggtgttgagatcgtaacggaggtacgatgctcttaaacggagatcgttctgaacatagggccaagcttttttgtcgataaatgacttaacgttgatgatctctttagcagaatctttggctctagctgcagcttctgttggtgacaatggttgtatgtaaaatctatctttcaatgccaatgaaaagtctcttgcttggtctgagttatctgttccagctgctcacacacaaaaaaacaaaaacaaaagcagaaccataatcaatcaaacagaaccggtctctataatctaattactaaaacttttatcttacaaaagtgattaaagatacgtttgataaaaacctaaattataaccatgcaagctataacacaataatttcgttttgttatctccttaaccaaaaaaatagtattagtcattatgtgaaatttaattaaattagttttacttacgtaggccaccggaaggaagtggaggaccaccaactttgatcggaatagcttcggcgaaaacagctttaacgaatgaaccaccggctaaaccagccgccacgagtccaatcactgaccggcgactactttctggtactgacacgttctgctgagccctgatcacaagtccggttctctgagacccaaccgagactcttgagatgttcaaacggtttgagccgttgatctgtaaacttccttcaaggacagcctgagatgctccacgtaagccagccatcgaagtcactgcttgagccattttttttttatctgctttgaataattgattagtgaagtgttgagttataatttttggtgtttggttatgtgacaaagaataccttatctgattcacgttgttacttagattactcggatatggttttaactactaatatgttgacacgtggtttcttgattctcagttttgccacataggattgagatcgagtgttcccagaatgcgattgtcacgtggctgaatgacgtggaaattgaccaattcggttaaacctagtcaaagttaattgaaaaccggtttcgataatatctaagcaaattgtaacttaaatccaatccaacttgacaaataaatgaaatcccttattgttaaaaaaaagtacaaattgaaaaatagataattttggcctcaatttcaattttggattttgtacatagccattaagaataatttggtcaattcaatctattaaagtttatatgatccacatttttaatttcgggtgggttaggaataatagtcacttattcacgaattcaaatacctaatcatgtttagcatccaaagtagacaatcttaaccgttcaacaatattggtatcactacttcattttggtatctaaatatgagcatatttcattccaaaaagaattataatcacaaaaataataataataaaaaaacttataatcacaaaaaaaattacaccgtttttactattttacatttttgttactactttacttatatttaaattacatacacacattaaaacacattattttaatcactaaataacaactaaccaataaaaatctcaatcattatttataaaaatttaaaataaaagaaatattttataaatttataatataaatataatcaaatacttaattaaaaaccatataagattgacgacctgaaagaggatggatcaaatgcaactttgatggctcattcgttaatggagatgtagaaagtaaagcaggttgggttgttcgggatagtaatggaagttatctactggcgggtcaggctataggaagaaaggtggacaatgctctggagagtgaaattcaagcgctaatcatttcaatgcagcactgttggagtcatggttacaaacgggtttgctttgaaggagataacaagatgctgtttgacctaatcaacggatccaaggtacattttggcgttcacaactggatacgagacgttcattggtggtcaaggaagtttgaatcaatccatttcaattggataagaagacatcacaatgttccagctgatattcttgctaaagctcctctccaaaaccaatctttattccttaatcatttttgggttcctaatgtaataagctatgctttacattgtgactacactgctgatttataaatcaataagatgatgatgacaaaaaaaaaaaaaaaacatataaaaccgaggcccgctgtaaaccacgggttgaatcctagttaaagtaagtaataactctccaaaattatcccaaaatcgaatattaactgcgaatcaaactaaaaacaagaatttgaaacttttaaaacccttcattttatacaaaataaaagaaaaataattttataaaaagatttaaccataaaatagaaaccaatttgattaatatcttacttttttttctttcccataatttatttagccaacaaaaagtcacgcaaaatatggaatatcactagtgttaatggaccgagttttaagtcaattggctcaaatggagcctatactttatataataataatttaaatattaatggacaagagtaacgttacaatgttgatgggcctgaaagttaagtcaattggcctgagagtaagtatctaaggaaaaaaaagattattgtttaatgctgatgggcctgaaagttaatattataatcgaggagaagagtaacgttacaattttgacaagagtccgccgatctgttttcaaatattcaaacaacaggctcctccttcttccttcctccttcctcaattcttaaaatctcccccattaggaaaaaagcaagaaccctaatttcccatctcagattcagaaaaaaccaggtctgatttctcccgggttcttaagaaatccgccgccgatctcgggattgagatttggatcctattgacgagcctaaggtgaagcaatccatcgaag

SEQ ID NO: 15452 - DNA, 3000 bp, Unknown; identical to SEQ ID NO: 15436
  misc_feature (1)..( 3000): cDNA_ID_1396277_gDNA_ID_2926134_Annot_ID_197082 3000 nt of promoter + ATG

SEQ ID NO: 15453 - DNA, 2906 bp, Unknown
  misc_feature (1)..( 2906): cDNA_ID_2182840_gDNA_ID_2926134_Annot_ID_197080 3000 nt of promoter + ATG
ggaatatttggataaggtaaaagcaacataagcgtgaagtaccagctaccaaacgaagatcttgacgcgttgatttccgtatcaacggacgaagatgtagagaacatgatggacgaatacgaccgcgtcgcacagaatcaaaacccacgcgcctctcgtcttcgtctttttctcttcaccaaaaacgtcgccggagaagaagataacgatagtcgagctagcagtatcagctctctcctcgatagctctgttaatcgggagcaatggttcctcgacgctcttaacctcggttcttccgccgccgcaaccgcggtatctaacggtgggtccggtagagtctttgagcgagttagatctgaagtctcgtcgattgtttctgaagttcctgattatctctttggattggataatttcgatgaaactgctccgccgcatgagcttcgtgatcgtgatccgagagctaagatccaacgagaagtctcgacgctttcggatcctggttcgcctcgtcgcgatgttccttcgccgtatggttcgacgtcttcggctcctgtgatgcgaatatctacaccggaacttccaccaccagtttttattaaaccggaaagtccagaaccggtttcgactccgaaatccaatcctcaaccggaacaagtaatgcaacagagtaatctcccggttaactcgcaatggcaatatgcccctggcccaggccaacaggttcattaccagggtcataccattcaccaatcaccggtttattacgttcctggttcggttccgggtaatcatatggtccagcaaggaaatcatatggttcaaccgggtaatcatatggtacaaccggttcaaatgccgggtcagtatcttcaacaataccatcatgtaccaatgggataccaccaacctcagactcatcagatggctggtccgggtcaagtatatggtggaacggttaggccggttatgatggcagttgatggaatgaaccggacgggttattatggaatgaaaacacccggtccggttcaaatgtatcagcatcacactggtatggttgttcctggtgtagaagaacaacaacaatacagaaccgaaacggattcggatacgggtcgggcttcttagctgtttgaagaagaaatatgaaaaattatcacatccggggttttcgtcttttcattggagtcgttcttattcgttactgtgtgaactgtgtattattttttgttttacttttgtaaaatttatttttgtgtgtaataattttgtattacaaaatataatgaacagtaaaacccaataataataacattataatctatcaatagtgaattacatttgctaaacttttttttgtcatcttattactcgatttatcataataatgttaatggaatataatttgtcaatcatatgttcctcttcgtctttgctggtgacttgtgaggaagtagatatgtcttagaaaccacaccgaattcaatctcatatgtttgttggtgatgtcttcatagttgtaacttttaatacaatctaacaaagcataaaatggaagggaggtaaggatattgtgttgcatcattcttctcacaatcacttcttctttaccaagattgtcgaagcatgcattataaccattataaccatgcatcttaaacacatcctcccctttttttccttttttgtcgatacctttttatgttcatttgaactttctctttatgttcatttgttctacaagtactattcttgtaaaacatgttatttgtttaattgtccctactcactagtcactacctattttactaaaatcacaatttctacttttagctaccatactattcataatcgtaacaactaacacacttacatgaccaaaaatagatttttgtaccatttaatcttaactattaatttgtaaacgatctcactactattgtaacgtttagtccgtccttactagtgtgctccacgttctttctcaggtctatggactcatccctgtccgacgatcggtccgccaaatctaagaggttttaaagacttgttaacgatcctacaaatcactatacgatatttcatcatgttttatcctcatttacatggttctgataatcatttctcggaaggtcacctatcttaaaactacttcgactcaaacacgtttaactgtggagttctccgcataaattaattattttattctctataaaagttatagaaatggtctcgtcattgtactgattgacatcatcaactggagagacatcaactttgggagctgccaatctcagaagaagtttatctcctttacatgccgaggtggaagctctcctctgggcgatgaagtgtatgattggtgccgacaaccaagatgtagtttttcttacagactgttcagatctggtggagatggtgtcttccccaaccgaatggccggctttctcatcgtatttggaggagttacagagcgacaaggatgagttcacaaacttttttctatctttaatctctcgtagtactaatgttaaagcggattttttggcacgaaaagttcgtacccaaccgcttcatattacatctgtaaacaacattcctcaggattggctcgtttgagtcctaattaattttcggatgacaaaaaaaaaaggtctcgtcattgttaattattattctaattgactattcccattaaagcaatcatagagttacttaagtttgacattcataaatttatgcgactatgattaattattgactaagaaaaaattaaatactaatagtactaacattaaagacaaatgtaacgttttacgtgaagtaatcagaaaccagaaatagtcttcttcttcttcctcacacacatacttctctcaccttatcctccgagatcggaaaatatg

SEQ ID NO: 15454 - DNA, 3000 bp, Unknown
  misc_feature (1)..( 3000): cDNA_ID_2997128_gDNA_ID_2926134_Annot_ID_138853 3000 nt of promoter + ATG
tttgtcaactctttggcttttgcaaaatcgggtaaatttctgattgccggtgttggacaggtatgtgatcatctcttatgttctcttccctcttctttttttctatctttgtcctcttgtctgtgtgattgctaatctcaaaactgatcgtgttttgtgaaatcgacatggcaggaaactcgatttggaagatggggatgcttaaaatctgcgcaaaatggtgtcgcaatacatcccttaagactggcataagtatttcattgggataaatgaagcgttgttatggatagttttgagttgctaaaaagccaaagatctaatcgcaagtcatatagggattacatttccttgtagctcttgaagtttttgctcccttttttgtttgttccttgtaccattttttcttaatacgagagataagaacttatcattttgaggctctgaagaatcaaagaggataacagttcccaattttttcattctctcagtaaagctttttgtttcgttttcccaaatgttgaagataagtatatgaaaaggcaaattattaaaccaagatccatagtgaacacagacttgatcgtaatttatccggcgaaaagaagattgcttttccaaacaaaaaagacaagagcctactacttgaatgaattctcttaagtcaagcttagaatccctagagacaatttcttgatgtctcttggtctcgttgctgctccattctgactaatagcttcaactggataagaaaaaccagcagagaattgataagaaagttccaaatatccaaaacatacatagaataccacaaaatgaagacttgaaacaagaaaaatgcaaacagcattgaaagaataactaaacaagaacatatcctgcaaaaaaaacgaaaatgatacataataatccaaagactcgagcctatatgcagagaagttccagaggaaggtcatgcttccaaaagtttccattttaacattgcaaacactaactcatgtacaagtgagtgattctcattcacttatttgctaatatgcatataactcgatctcaaactaaccaataagtatcatactacctgaaatctagctaaccatcagttttgagatattttctacaacaaagtaaacccaagaacacagctttgacatcagagatcaatactaccaaccatcaatcctaaaccctgaatcattccattgttcgaaaaacaaactgttaaatctcatatccaaatcagaaacaagagaaaacgataagcataagacaaaaatctctaacctttattgactcatctcaacttctctttatttcagacactttctacaacaaagtaaacccaagactcagtaaactactaaccatcattcttaaatcctgaatcattccattgttcgaaacacaagcattcaaagctcatctccaaagcaaaagcaagagataagacaaaatctctaaccttttaaacgaaatcatctcaacttctctttacttgaactcttcttagctgcatccataaccttctcaagatacccttcaataggcggtgtaagagtagccatacctcgattcgccggaaacggtgtcaaatcaggctctaacgccgccttcttcagattctccggcaatgcctcaatagcagatttcttcaaattcaaaagcgcagtttcagctgcacgacgctctctatgctctctcatcaacactttactatactccttcgcaagtctctctccatcttcttccgtaagcttatacttaggcaattcctcagcttcaaaaatccctaacgaaatgtaatccaaacctggcgtcccaattcgcatcggctcatcggtgactcccattgaagcagctcctcctttcttctggatctccatatctcgttgcttctctttactaatcaaacctagcttctcacgttgcgcctcacgctcgatctcttggggggtcaagtagcgaacaggacaaggagcgtttaagcattgctcgtagagtttctgcttctcatcggaaattctaccttttcctttaactgcttcctctccttcaacaggtgctccgccgccgccaccacctttcttgatggagagtttgttacgcttcaatggctgacctgtcttcagctttgcttttcctttaggagttccacttgcggagcatctttggataagatggtaactcagtgattcgatgatcgcttttggtttcgtaactcgaatcatgcttctgattcacctgagtttctgattgctttcgtctgaaaatgttgcttgagtacagagattagggttttcgactctcgactgtggaagaagaacactgaactaacgacgtcgttttacatcaagttaaataaatcacgatgtcacaaaactgtaaattcagcttaaaccgagggttttcttgtcttttagaaaactccaatttggtttcttggttcggttttccatttctttgtataccgaatgagaaccgacgttaattttgaattgatttggttcaattcgatttaatttttggttattgtttcggcttaccaccacataaccgaagcttctttctgaaaacaaattcgattttacttttccagaactgagaagaaatttgctgaattcagtctcatgcaacttgttaaatttctcactattaacaacgaatttggctttggaaactgtaacctccaagtaccaaatacaagtaaaatacaaagaacgtggtgaaaagtaaagaagatccaacacagacaaaaagcaatttgtccactaagatctctcgagagccaaaaaaaagttgagaaatttgcagtcagtatgggctgctctgttgttgtctcttctgggccttgaaaggatcttcttcttcccctcaccttcttactataaacccagaatcatcctctgtttcttttgttcctcaaatcatttttttcctctcgattgtgagatcaattattaatattcatctggagaattatcgtctcttttctccattgctatg

SEQ ID NO: 15455 - DNA, 3000 bp, Unknown; identical to SEQ ID NO: 15444
  misc_feature (1)..( 3000): cDNA_ID_2182799_gDNA_ID_2926134_Annot_ID_138855 3000 nt of promoter + ATG

SEQ ID NO: 15456 - DNA, 3000 bp, Unknown; identical to SEQ ID NO: 15443
  misc_feature (1)..( 3000): cDNA_ID_2182795_gDNA_ID_2926134_Annot_ID_138856 3000 nt of promoter + ATG

SEQ ID NO: 15457 - DNA, 3000 bp, Unknown
  misc_feature (1)..( 3000): cDNA_ID_2993828_gDNA_ID_2926134_Annot_ID_138869 3000 nt of promoter + ATG
aatgtccttatatcctccttcatcaacaaggctggaatctcaaaacgttttgatagcaaacgtagagtccgaaggcaatcaacacagacaaatttgttgaagcaatcaaatgtgaagcttccttgtttctcctgcaagaaagttctggcttggcgaagagcttgacgggctacgatcatattcttcacatcgttagacgatagaaaggacttaggcagatgtgtatacaaatccaccatatccttctggatcttcttcattgtttcacttaacccatcaaatttttccattacaaactccccaaatgtaagaatgatttcttcttccttctccggtgtttctttcgagccaagaaacattttcattacaaactctccaaatgctgtcagaatgtttttagtttcttgattctccttcctttcacttagcaacagatatttcttataactagattcagcattttcaagaatatctatgactgcctccaaactccgttcccattcattcgatggcgaaaacagttcacccaatttactaatgcgatcatcaagaaacacgttgaggagatcatcattccccctttcgtctatccccattcggactcggtttccgactaaaacaatattgccaagtccgtaagtagaatgttctgttgaagaagattccttaaatagcgccaagagccttgatgcaactgctactacagccgtgtttgtaggagtgcacacaactgttttgcaacttaggctgagaagagcaaacagaagagtagcgactgtctttgtgttaccggtaccagggggtccccatatcagtttcacactagtcttgtcgcggatttctcttgtctcaaggcaagccaaaattgcagattcttgagaagagttcaaattcgctgatcgtataatatctaacacatgattcccccaattcctagaagaaacagattgctctgtatcctgaaatatttacaagaaaaaccacagttactccacattagacgctaaagccagatcatttcatgtttacttaccgcggtatttgcttgaaggacactcttgatgagactcaagtttccatctccgttgtgcaaagccttccagatacgagtgtttgtggttaagtatataagaaaaaaacccgaacgaaacgaatattgctcatcaatggatatagatttagaggaatgaacagagaaatgtagctcatctccaacagagaacacatacgcaagaatcagtgggtttaagtcatccacgtttccttgtgactccaatgagatctccatgtttcggctcgtagttagttctatttccttgtgcaacactcgtaagtactgatatattaaccttgtttgagcttctactcggtaattttattgccgtagcctccacggaacttatgtaaaagacaggagctttccacaaacagttcaagcttgaggacaactctgtacgtgtttcctctagtagaagaggaacaaagctcttacggtattcatcaacggaacaaaacatgcctggtatcgagtatcgacctaatctcttccttgttgatatctttgttgagaatatagttgagagaagatttgattaatcagacttgtcttctcatttctctccatgtcacagaaactttctgcaacataataacaatgaaaaacttgagttaggttcctaccttatagcaggtcatagctacatagagaagtaacttggcttacaacgcaaactaaataggaagatgataagtaggaaacagtttcttcaaaagcactgatgcaaaggaatcaacaaagccacaaacgaagacaacaggaaaaagctggcttatcagtttggtctacttataaagaaggaagaggaagaggaaaggtccaaatagaataagtaatttcttcaacttccaagaataaattgtgaatatatattagacagacatataaagtgaaaatagcacattgcttgcataaactagaatttaagtcaatatttctttttatttttgaaaactgtcattagtacttttttgtttgttttacgagaaattagttcactaagaagaaatgtcagaaacttaagaacgaagcatttacggtggagaggacaccatttgtctgctatgagtcgtcataatcatcatcatgattatacgaaattagtcacatccgtaagattatattataatttgtaaaaaagtactttaaaataccacacatacaaattttatccaaaactaataaaacatttctttcgtttataaaaaactgattcaaaaagtagtaaaatggagcaaaagaatttaaatagaataataaaaatttacacttgaagatttcacataactccgttgtaaaagacaaaaaaatcgatatggttgactatacattatacaatcgctttatagaaattagaatgggcagcaggtcaagaacaaattgacaaaatgagatatcgttttcacgttttaataattatgttaaaatttagagattttgttatgatgaaacattttataaatttttaagctcattttgagcattttagagggaataagcatttttttttttgaaagttttctacttttttaaaggtacttttttaatttatttcctaatgacgtcagctgttgcgctaatatggttaacaaattttaatcacagctgttcgtttgttttggagaaagaatcaatttggtggctattattaagagttagagaagagttggttgttgtgtggatagaaccgacaatctcgtttttttttgctctccagaaggaaacatgagcgaggaggtaaaatctaaaaatttattgcggttattaaatctgttgatggttgtggattcgtgttgatggttgtgaaatgttattgtatgtaggttccaatagagagttattgtatggtcatctgcggggaatgggaatgctcggatattcaagaatggtattttgaaattaacaaaattctaatgtctagaattgttccaattcctgcaggg

SEQ ID NO: 15458 - DNA, 3000 bp, Unknown
  misc_feature (1)..( 3000): cDNA_ID_1989583_gDNA_ID_2926134_Annot_ID_138871 3000 nt of promoter + ATG
taacgacaaaaaatgtgagaccatcattttctacggtttgtattatgtatgtttttgtggatttgtattcatggactacttcaatattcatggatttgtcactagtggatttgtcactagtggatttgtcactagtagatttgtatacttgaaaccataattatattttttatttaatttctatcatattttaatcatttacatttttatcagaacgacgtagttgtcaaatggtcataaaacccaaatttatggggtttcctatagaaacaagcttagtctcctcgtacaactttcaccacacaactacaacatggtagatcgacttggaggtatctcgattgtctgcccttgtggcgaggaagtagtgatgaaaacatcagctactccaaggaaccctggtcgtttgttttatgtatgtcccctgggatcttccgtaagtaaatctactaattatctaataatttctactacttgctatccaaaataactatcaataatacaggaaaattggaaccatttgttcaaatggacggatacatgtatcgttgaagagatccgaagattgatagaaaaagtgaataacatcgagggttctacactaaaattgcaaaaagggctaaatttttgtgattccgtgattacctctttgtcacaggagacgtgagacctagattccgttcttcgggaagacattgaagacctgagatcgcagcttagatctatgaaaatattcttgttttatttttgctctttattttattttttatgttttttaatcgctttatttccgaaattattgtaatttctgttagtatatttatcaagacctaattcgactatccatcattgcttaaccatttcgattctattatcttccttcgttttgatttattcatcctaacgagtaggattagttaattttcagagttacatattttacagaacatgacatgtaatccacttgcactagataattcaagcaacttcaagtagatatcataatctattcgtactttttagacctaatacatcaggttatcacttcaaactgacaccctttacactaatttatctgttggatattactgtttgtgaagctacacatcaagggacccatcgtcaacatgtctatttttccgatgctagtttgtagacatatccactcttatgtttttttccacattttaattatagatttatatggataacaaactaaacaattttcgttatatcaaatgatacaaaattgtcttttaatggataagacttcatgcattggagtttatatgtttacttagatggataacaaacgaaacaatttccaataacgaaaatgagaacatatgattaaatcaaaattggacattagatgtcattgtaaattaacgatcacaatctttactggtttacattcccgttcaacttaatctaatataacaaaaacaaaaacaaaaaacacctagatgttagtatccaacaaaaacaaaaacccatagaaattattattcatgagatccaccttaagcgagacaccttttgcacctttgcccaactttcttgcacctagggcacgtacgcctcaccattcttcctggctggaaaggaagatgcataatgcacattttctcgttattcatgtcaatgaacatgcgtttgtcgtgagtacattccatcggcacctcatctgatagtatcctgttgtcgactcatacgccagtcctttgttcttctctacaaactttgcatacggattatttgcggcaagacacttttggaagaaactgtagtacttagaatgaggcattgaccaccacataaaatgattgtccatgtcaatgcgaacaaaggctagggttttcctcgacataacagcatcctttccctctctcccagctagcaaccagttcttcaaatcatcaacaccatcttcagcaacttttctaacgatgatctccatcaacggctgagaaatgtgtatatccatctttggaatctcctacatattaaatgaagatatttattcacaatcattaaataaattaacattattataaaccttgctttcccgtaaatcgcccaccttatcttcaattaaacgattcatctttttataagaatgtttaaaggttttgttctatttatagattttattaaaccaataacttaaacatcgattatgtggtatagaaccggtttggtcaatgcataaatttgtcgttggttttgatttttctgtataaaatatatttaaaaatttttacattagtttagtaattcaaaaaaaattacaatccgcgtggatatttgtttccgaaaaagttgatatttgatgtgttttggcagcaattttctctctcatccaaattagatttccccatcttcctggttcaaatatttttgatgtaacattttactattttaaccatttctaaacatttgttgtaatccttgtcgttattgaaatgtttgacatgtcatggatcctcaaaaatagtgaattattgtttgtcataatctcttgtttgtggatttgttaccatgggtacaagtataaatacgtatttatccaagttaaaacaagatgatttttttgttgttttggcggcaattttccctcgcttccgaatgagaattccccatcttcccggttcaaatatttggatgtaatattcgactattttaagcaagccaaataaaattgttgttatccacgtggatcttcagacgtttaacatctgatggatttacatatatagtgatgtaatgcatggcaataacccaaattttgtggatttgttactatggatacacgttttaaaaataatttttgatccattatgtcgtgatacctaaacgatatccggttaattcgtgtagttattactagccggttgttattctaaacgattgatttattggttatgtgagatgatatttaaggaagttgcttaacccattaattgaccataaaatcactgaaacgaaaaaaacaaaatg

SEQ ID NO: 15459 - DNA, 3000 bp, Unknown
  misc_feature (1)..( 3000): cDNA_ID_3088400_gDNA_ID_2926135_Annot_ID_138878 3000 nt of promoter + ATG
ggagatgtgtctcagaagacgaaatcgaaggcaccctattgcattgccatgggtctgcctatggtggccactttgcaacgttcaagacagtgtcgaaaatcctgcaagctggtttttggtggccatcaatgtttaaggatgctcaggaatttatctcgaaatgtgattcatgtcaaataagagggaacatcagtagaaggaatgagatgcctcagaatccgatcttagaagttgagatctttaacgtttggggaattgattttatgggtccgtttccttcttcttacgggaacaagtacatactggtcgcagtagactatgtatcaaaatgggtggaagccatagccagccgcaccaatgatgctagagttgtgctaaagctgttcaagacaattatcttccctagatttggagtcccgagaattgtgatcagtgacggagggaaacattttatcaacaaggttttttagaaccttttgaagaagcatggagtaaagcacaaggtagccactccttatcatccactgacgagcgggcaggtggaaatctccaacagagagataaaagcaattttagagaaaacagtgagaagtacaaggaaagattggtctgctaagctcgatgacgcactatgggcttacagaacagccttcaagacccctattggcacgactcctttcaacctcctctatggaaaatcctgttatttgtctgttgaactcgagtataaagccatgtgggcagttaaactcctgaacttcgacattaaaaccgccgaggagaagcggttgatccaactgaacgatctcaacgagattcgcttagaagcctatgagagttccaaaatctacaaggagcaaaccaagtctttccatgacaagaagatagtctcaagagattttaaggttggtgatcaagtgttgctgttcaactctcgcctgaggctttttccaggcaagctcaagtctagatggtctggtcctttctctgttactgcagtccaaccttatggtgttatcactctagctggaaagaatggagacttcacagtcaatggccagcggctcaagaaatacatgatagatcagtttattccagaaggaacctctgttcctttggaggagcctttaaacgcctaatgagtatgaggagtcaagctagagacctaaaacaagctcacttgggaggaagtcccaagcctacctttgtacatatctttcattttccttgttgtttttgatgcatcttgttagtgttttcaggagataagtttgaagagttgctggaaatagattctggctttgaaggaacagcaatacactcgaccacagagcaatcaaactcgacattgttctggcttcttcacaccaggaaatcactcgaccacaccctatagagaccgaatgacgatgtggtcgagtatagcgaatgatgtagtcacgacttctccagtcccgtagcttacgcgaccgcggtgctggccgcagcagaagaagagaggtcgagtatcatcatagcggtgctggccgcgacgaaggagcaaaagtcgagtacccccagggggaagctgagacacaacagggagattcttcgatggcctgggagcaatcacaggcagctattgacgaccaactccgctccttcttccactgaggtatgcacctcactccaccactgtaatataccatctcttgtttttattttgtttttgtgatgtgttttgtcctgagtactctcttccaaatttagtcacacagtggactgtgtgatttaagtttgggggagggctcaggaagtgtgtgttgcattgtatataatcttgagtctgcattcatctaaggcatagaaaaactaaaaaaattgaaaaatttcagaaaatggtttcacaaaaatagagtgttcatgtagttgcattgcatttaggattgagtctagagtgtttcgtttaggattgttgcatatgcataggggataatgatgagatagccttgtaagcattttggttcaccagataagctcagtgccctcgttgttagttgtttgatgcgttgtcattgaaattgaagtaaaactgcaccatgcctagattgctctactcgaccacactgttaggatctgatatgattccctatcaatttgaacttgaatctgatttagaattatcatgtcttggcatcgaatttgaactcatggataccctaaaatacttggattttcttactcattttaaccactcttgttgatccaagtagctgactctccttattagagcagttaacccatacccaaacctgaactttctttcaagccctatatcacttgtgagtgtttgtgaggtcttatttcgattgagcttggtagaaagtgttaggttcgtaacgacagagatagtgtctcatgtagttctagttcgcgttcttcggactagataggactaggtgggcgcttatatcatgggttgggatgtgtttaaaagaaaagagggaattcattgttgatgaggaaagggaaagaattctaggggaagtaagctaaagaagttagaaaaaaaatctagtaaaggttttgggaatgttaaagaaaagaatgaggttcttgttagctaaagaagaagggttaaaagcctttggttttaaagaaaaaaaaaaacaggaaccttagttgttaaagaaatccaaacccgctagatgtatcagagcgttgagaaagcttctccttgagttaagagaaaagaaaagaatgatatgaaaaagagtttgaaagattcatgagtgcaaagggtagagttaagttgggacaagagttgggattaccattagaacttcattgttatactctgggtagatgggatcttatctttgtatgcataacctgggacttacctttagcattctaccaaagctcaatcattcttgagggatcccctgttacttaagcctattctgttagggaccatctttgtctcttgaccttcaccttagccaaatgagttcattcatg

SEQ ID NO: 15460 - DNA, 3000 bp, Unknown
  misc_feature (1)..( 3000): cDNA_ID_3088400_gDNA_ID_2926135_Annot_ID_197169 3000 nt of promoter + ATG
atgggaatggacccatgaaatcaatcccccatacatcaaagatctcaacttccaagattggattctgaggcatctcatttcttcttctgatgttgccttttctctggcatgaatcacactttggaacaaactcctgagcgtccttaaatattgttggccaccaaaagcctgcttgaagaatctttgacattgtcttgaacgtcgcgaagtgactagcatatgctgagccatggcaatgcagcaggataccttctacttcatcttctgagacgcatctcctatagatcttatctttacagagagtgtaaagataatgctcatcccagtagtaatggtggatgtctctgaaaaacttcttcctttcataactggtcaggttgggaggctctactccgcatgccaagtaattgacgtgatcaacataccatggagatcctccttaaacagcattcaagtggtgaaactctttcccactgtagctcccattgaatcgtctattggaatgggttcttcaattctcatccttgacagatggtaagctgcaccattttcaatacctttcttatctactatctccatgtcaaactcttgcaatagaagtatccatctgaacagtcttggtttagtattcttcttggcatacagatgcctcaaggcggcatggtctgtatagatagtgacctttgatccaaccaaatagcttctgaacttctcaaatgcgaaaacaacagctagaagctccttctcagttgttgcatatcttccttgagcttcatccaacgttcggctggcgtaatatatgacatgaagcttcttgtctattttctagcctaaaatagctcctactgcgtaatctgatgcatcacacatgatctcaaattgatagtcccaattaggcgctcgaacaacaggagcagataccaaaccatccttgatggtgtgaaaggatttgaggcagtcctcatcgaattcaaattcggtttccttgcacaatagtctggttaacggcctggctatcttggagaagtctttaataaatcttctgtagaacccagcatgaccaaggaaacttcttctgtccttcaccatttctggtggctgcaactgcatcatcacttcaattttccctttgtcaacctctatacccttttctgatatcttgtgacccaacactatgccttccttcaccatgaaatgacacttttcccaattgagaacaagattcgtctcctcacacctgctcaataacctgccaagactcaacaaacatgaggaaaaagaggggccatagaccaaaaaatcgtccttgaagacctccaccatctcctcgagttaatttgaaaatatagaggtcatacacctctgaaatgttgcaggagcattgcataaaccgaatgacattcttttataagcaaaagttccataaggacatgtgaaagtagttttctcttgatcattagggtgaattggtatttgaaagaaaccactatatccatcaagaaagcaatagtatgggtgattagctaagcgttcaagcatttgatcaatgaatggtaaaggaaaatgatctttcctagatgcaacatttagcttcctatagtcaatgcacattctatgaccagttacagttctagtagggatcagttcatccttttcatttttgacaacagtcattccaccctttttagggacgcaatgcactggagaaacccaagtactatcagagatagggtagatgacaccaacatcaagcagtttcaaaatttcttttttcactacttctttcaactaatccaagtccagcacgacccgctccctggagctacacaaaggagagcatggatgaccttgtctccacctacttcacctaaggtaacaccaccaccaccattgtacataccatagcatttttatttttctttgtgtgtttcgtgttttggtcttgaattctttctcagatttttattacacaagggactatgtaatttaagttagggagagggttgaagacatgtttaacattgtgttcacttttcttatttcatattttgcatcatctaaggtagagaaaaaaccacaaaaattcgaaaattttcaggaaatgatttcacaaaaacataatgtcatgtagattgcatttcatcttaggattgtatatagagtgtttgcttttgggattgctcatttgcataggggataatgatgacttcaaaccgttaagcatgttttgattcaatgaagtaagttcaatgcccaggttgttagttctctgttgcataaccgattgtttctctgaagtaagaccgcaccctgctttgaatttacaacttgactatactgctttgattcgaaactcgcttatcttatgccattccctatctattagaagctgaactgaatttgcaattatcatgtctatgcattgtttgtgaactcatggctaacatatacatatttggattatcttatttacttcaccaccccctgttaatccaagtagctgactctcatttttagagcagtttcccataccctgagcctagccttatttcaagccaaagataatttgtgtgtgattgtgaggtctttttcgattgagcttggtataacgtgttaggtatgagccgacaagagcagtcattcatgtagacctagcccacgctttttgggttagctaggactaggtggagacttgtatttgggattaggattgtgtatggattgaatgggaaagggaataggaatgaaaagaaaagaaaaaaaaaagagagtaagaagttaggcattgtgattcaaagaaaagggtaaaacgccctctatgctataagtttagaagaaaagccttaagtttaccaaagtttaaaaccaaacccgctagactcttgaatcattttaaagaagcacccttgagaacttgaaccaaaagagagaaagaatgagaataagggtagagttaggacatctaagggagtgggatcatcttctgagctttcataatag

SEQ ID NO: 15461 - DNA, 3000 bp, Unknown
  misc_feature (1)..( 3000): cDNA_ID_3088448_gDNA_ID_2926135_Annot_ID_197151 3000 nt of promoter + ATG
tttaaaaacaaaccctaaccgattttccggttcacgggcgttacaattgaaacaaaccctaaccgattatccggttcacgggcgttacatctgccgcatggaaatcatcgggatcactgtacacgctgtaatattagcatctttgagggcatccgtccggtagactatgtttcttccacgaggccttgaagttaagagaggtctgaggtaccaccaacatttgttagccatttttggctatcttggctagcaaatcgtcaggtatatttggtgtagacatatcttagaattacgtatttcaaaaataatgaaattcctactcttaaataaacaacaatgaatagtcgggtaagttatggttgtagataatgcaatcttaggtaactaataatgtagtgaaggattgtcatatcaactatattattaattggaaatcattgggaaactttacaacctttgaagagtagttttttataatgtctaagactaaatcaagtattcgtccatgggtatactggtcatttaacatattgaaaaaaacgcggaactatttcgaatccctgatctattatcgggccagtcgtattcaaagattggtacactggactatatgggccaatgattccaaatatgacccaataacacgacactcccctgcacgcaaataaatagcaactatttagattcaaaaactaatggcaatcaacaataaaatcttagctaaacgaatatattcttatcccataatatccgttttccaatgcaaaaatacagcaacaacaccacattcgaattcatattaacagatatttattctataacgcaatcaacaataaatcgtaactttcaaaagataccatatatatatctcttaactaattaacatttctgaatatctacatatcatatttaagctttccgaatatttcttgcctttgtacagaatatagattcatctcctaaactaattatcatttgacaatatactgacttaccaaaactaatccatttaattaaattgatccttttgcagaaagaatataccttatcataacttattcggtaatatcctaataaactgaaaaatattctctcaacctaacctaatgctccacgagattgatttagtaattagtataaatatatgcccaatattttcaagaacaatacactcaccttcaaaagttgaacaactgtttctcatcactcataattttttaaaaaattaattgataccaaattaatttatactaaattaggtttgattcactcaccttcaacgtttaccaaattaatcaaagattagtaacaagtttgattcctctcactataaattattgattgaggaaacaaatggtctaacatttctttgtctagctcttcttttgatttatttgtctagctcttctttgcattaggcaagcgttggtgttattaaatgagtaatgaagagaagaaatgatattgcagccaaatcgcatatgttaattttatgttactttattttctaatcaggttaactttgttttctaaaagttttcagtctaattaacttcagattaagtattatgaagttaacaatttcatatatacaacatttaggtttgttactgcttatcaaacaataggataatatagtttatggaagcaagcaatttattataatcaaaaccatcgacatacaatgataaaacaaagtgaactatgtttattcatcaaattcgaataggtgaagagtaggtacttagcaacttcaacagttaagaataacagtatatatatatatatatatatatatatatatatgtatatatttttagcaactaaacaaaggtattattgtacttaacatcaaactaatctttttcatttagctttctgtgaagttccaaagactaatctttttcatttaacattcttagaaacaagtgacgatgtataatttaggtgaggaaaacttttcaagtcaaaggaatctttacatttagaattctggaaatctccaaggtgaacatctaagccttctatcgtgtttcgagtagcttattatcaagaaattttagttcggaacacgggaaattgtagcacataatgattttgttagctgtagtgttaaaagaaaacgaaatcaaatccgtctcatttgatctacgactatatatagatttcaaaataattacccatagcagatcctgttttttgacaattcttggggacgatctattatcaaacaaattatttcaaagattataaatttaatcgacagatttgaaaacaaaaaaaactaatatatgatgcaacaaaaaacatacttctttatagaactaaatctgtaaagtatatacaaagtataacagagactaaaataggtggattatctgtgaattttgctacagatttgtcgatcgaccgacaatgttcaacaatttgggtttgcaccaaaagacaacgtgtcttcaaacaataatttaattatctgtccaaaataagaaaaacataattcattacaaacataattcattactaaatcaattacaaaacattattcggcccaatatataaatgtttttcggcccataccaaaatatcccaaacctgttattgcttggcttgactctgtaaactctgattgcatcttgattgctagcatcacacccatttagattgacaacataaaatactacaacgacaggatagtgttttaggattaattgactaaaaacctattatcaatttggcgccgttgtcaattgggtgtttgtttgttatatttaagatttcagacttgcttacatcaagttctttttcaattttcacttcaagtactaactgtgtgtttttcttgttgtcttcttgatccaggtacacctctcctgtatgcgaactcgatcaaccggcaaccataacctgcttttcaacgataacattgatcgcatagctcgcgaactaagagaaaggagaaacatagtcgaccttgtacaacaccaacaaccacttgaa

SEQ ID NO: 15462 - DNA, 3000 bp, Unknown; identical to SEQ ID NO: 7273
  misc_feature (1)..( 3000): cDNA_ID_1989612_gDNA_ID_2926136_Annot_ID_138884 3000 nt of promoter + ATG

SEQ ID NO: 15463 - DNA, 3000 bp, Unknown
  misc_feature (1)..( 3000): cDNA_ID_3088548_gDNA_ID_2926136_Annot_ID_197231 3000 nt of promoter + ATG
agaactaaaatgcaatcaacaggggatgcaaatagaggatacaaataataggtaaataaaaatacaatcaacaggggatgaaaatcaatctaatagaagttctaaggatggattcattgataagggtaactctagtgttcatcaaatggctaataggcgaaaggtagattttcatgacgatagattcaaaaactgggtcaatccactctcgtgacagagacccccataactctaccacttcctaatctcaactcttgttgatgaaacatagcagagcagggtttaagaaaaaatctaccaaagccaataggcagacaaaccaatcccttggccgagtctacatatctctagaattcgtaagtcagacatccacttgaacgtcttttggacgctggacgtctttgatcgaatctccacattagccagcgaaaaccgcataggggccaagcgaatccagaagggtataaacctaaacactaaccacctaactaaccaagagattaccctaatctaatccgtcctcaagaaccctaatcactactcaagcaacattctcaagaacacaaacccagaaattactaaaatcataccaaaatgtagatctaaacaagctaaacaactttacttaaacaatcaaatgcaaaaacgaaatagattaagagtaattaaagtttcaaaattcataaacacaaagaaaaactgaaagataaagcataaatcctttggacaaaccccaaatgatctatttatactaaaatgttggaaaccctagattcactagaagacaagagacttgaggcggtttgggcgaatactcgaccttggggatcgagtaaagagggtgctgcaaagtctgcgcctttgtgtctatgctccgactgatcaattggtcgagtagatgcttcgtcctctcctattcgtatgctcagatgtctggttgagtggggaatgaggaggatccgaagacgctttgatagctcaacaagtcttgtagagatgcttcatcatttcgtctgcttgtttttgtggtataggtactaatctttgtgcatgcaaactcgatccaaaggttctacacacctactacttttcaaagacagaatagacagaatagctcatgaattacaagaaaccaaagcaaaggcaccctgtgatcagcaaaaaccagctcctatggatcaacagaaacagaccagttgatgttcaagacccacctaatgttgatcaaccaagaaacattggtgctggtgatgccccaaggaatcatcaccaaagacaagtgatactgcctccaccagttcaaaacaacaactttgagatcaagagtggtctcatctcaatgatccaaggaaacaagtttcatggtttacctatggaagaccccctggaccatcttgacagatttgatcggttctgtggccttaccaagatcaatggtgtcactgaagatatgtttaagctcagactatttcccttatctttgggagacaaggcacaccactgggaaaagactctacccccagacttcatcacctcgtgggatgattgtaaaaaagcttttcttgccaagttcttctctaatgctcgcacaactagattgaggaacgagatcccaggcttcacacaaaaaaacaataaaactttctgtgaagcttgggagagggttaaaagctacaccactcaatgtccccatcacggcttcaagaaggcttcattattgagcacactctacagaggagctttactaaagatcagaatgctactcgacactgcctcaaatgaaaacttcttgaacaaggaagtagcagaaggatgggagttggtcgaaaatctagcacaatctgatgggtgctacaatgaagactatgatcgctcggtgagagaaactggaggaactgaggataaacagagcaaggatatcaaggctctgaatgaaaagctagacaagttgttgctgactcgacagaagtaggtacactacatcaccgatgaagagcacttccaaatgcaagaagtggggaatgatcaaactgaacagttgtgctacatccagaaccaaggagggctcaacaagggctacaacaactacaagcccaacccaaacttctcctacataagcactaatgtagctaacccccaagatcaagtgtatccaccacaagaaaatcagtctaagctttttgttcagtacaaccaaggttatgtccctaaacaacagtttaatggaggctaccaacagcagaatccaccaccagcgttcactcaacaaccacaacaagccctagcagctcaagatcctgaaattaaacaacttattcaacagatcattcaaggacaagctactggcgctatggcttttgacaagaagatagctgaattacataacaagatcgtttgtttttacaacgatctaaatttcaatttcgaagctctgaattccaaaatcaagtatgtggagagtcaatttgcatcaacctctgctctgaagcatcctcaacaactcccaggaaaagcagtctagaatcctaaggactatgctactgcaaatgctatcaccatccaccaagaagatgagtctccaccaagtcatcagactccgaatactgaagacaatatgattcaagaagggggggggattcaactcaaattgttgcacctgccacccatcaattcatctagactatagagcaaacacctttgctgaatactcaccattctggaaaaaaattcaaaattgaaaaactcaagaaggatcagaatcaagagatgattagtagtgcctccaccaaagaaacatataaaaagaaagtcatccaagaaaagcttgatgatcccggttcattcactctaccatgttctctaggactattgacattcaatagatgccttaagaatggaaagattaatctgaaccttgaaaaaggcattaagatgaaatttgacatcagaaaagcttcagggaaatcaacaacaggaggttagagttttgggattcaggac

SEQ ID NO: 15464 - DNA, 3000 bp, Unknown; identical to SEQ ID NO: 8049
  misc_feature (1)..( 3000): cDNA_ID_2165821_gDNA_ID_2926136_Annot_ID_197229 3000 nt of promoter + ATG

SEQ ID NO: 15465 - DNA, 3000 bp, Unknown; identical to SEQ ID NO: 7277
  misc_feature (1)..( 3000): cDNA_ID_2165569_gDNA_ID_2926136_Annot_ID_197219 3000 nt of promoter + ATG

SEQ ID NO: 15466 - DNA, 3000 bp, Unknown; identical to SEQ ID NO: 7276
  misc_feature (1)..( 3000): cDNA_ID_3050126_gDNA_ID_2926136_Annot_ID_197214 3000 nt of promoter + ATG

SEQ ID NO: 15467 - DNA, 3000 bp, Unknown; identical to SEQ ID NO: 7278
  misc_feature (1)..( 3000): cDNA_ID_3088491_gDNA_ID_2926136_Annot_ID_197205 3000 nt of promoter + ATG

SEQ ID NO: 15468 - DNA, 3000 bp, Unknown; identical to SEQ ID NO: 7279
  misc_feature (1)..( 3000): cDNA_ID_2165457_gDNA_ID_2926136_Annot_ID_197193 3000 nt of promoter + ATG

SEQ ID NO: 15469 - DNA, 3000 bp, Unknown; identical to SEQ ID NO: 6992
  misc_feature (1)..( 3000): cDNA_ID_2165180_gDNA_ID_2926136_Annot_ID_197181 3000 nt of promoter + ATG

SEQ ID NO: 15470 - DNA, 3000 bp, Unknown; identical to SEQ ID NO: 7274
  misc_feature (1)..( 3000): cDNA_ID_1989609_gDNA_ID_2926136_Annot_ID_138887 3000 nt of promoter + ATG

SEQ ID NO: 15471 - DNA, 3000 bp, Unknown; identical to SEQ ID NO: 7280
  misc_feature (1)..( 3000): cDNA_ID_1989607_gDNA_ID_2926136_Annot_ID_138889 3000 nt of promoter + ATG

SEQ ID NO: 15472 - DNA, 3000 bp, Unknown; identical to SEQ ID NO: 8044
  misc_feature (1)..( 3000): cDNA_ID_1810169_gDNA_ID_2926137_Annot_ID_138901 3000 nt of promoter + ATG

SEQ ID NO: 15473 - DNA, 3000 bp, Unknown; identical to SEQ ID NO: 7762
  misc_feature (1)..( 3000): cDNA_ID_1989617_gDNA_ID_2926137_Annot_ID_138907 3000 nt of promoter + ATG

SEQ ID NO: 15474 - DNA, 3000 bp, Unknown; identical to SEQ ID NO: 6919
  misc_feature (1)..( 3000): cDNA_ID_1816192_gDNA_ID_2926137_Annot_ID_138910 3000 nt of promoter + ATG

SEQ ID NO: 15475 - DNA, 3000 bp, Unknown; identical to SEQ ID NO: 6920
  misc_feature (1)..( 3000): cDNA_ID_1816188_gDNA_ID_2926137_Annot_ID_138911 3000 nt of promoter + ATG

SEQ ID NO: 15476 - DNA, 3000 bp, Unknown; identical to SEQ ID NO: 6927
  misc_feature (1)..( 3000): cDNA_ID_1816181_gDNA_ID_2926137_Annot_ID_138913 3000 nt of promoter + ATG

SEQ ID NO: 15477 - DNA, 3000 bp, Unknown; identical to SEQ ID NO: 6926
  misc_feature (1)..( 3000): cDNA_ID_1816177_gDNA_ID_2926137_Annot_ID_138915 3000 nt of promoter + ATG

SEQ ID NO: 15478 - DNA, 3000 bp, Unknown
  misc_feature (1)..( 3000): cDNA_ID_1816177_gDNA_ID_2926137_Annot_ID_197274 3000 nt of promoter + ATG
ttgattaaaagaaagataagttctcaaaagagaatacaagagtatataaagagaaggagaagagaagctgaagaggcaagtcttagaacatacttcaaggctgcctagaacacaacagtaattaaaaacaaagtttgaaattcaaaataaacccttcaactactaaggccacgaaattgtctctttattttagtgggtttgggccttgaatcatcaaaattgattatatgaagtgaaaacataagcctcattaaaaaccttcctttggaaaacccagtgggacaaaaccaaaggcagggaaaaagagcactcatgaatcacttatccatcttgatgaggtccttgagcttagatcaaaacaaagaggtagtgatttggctcaagtcatttggtcggtcccaaatgtggttaagcatcccgccaatggcatggttgaataccttagctctagaacgagtcattgggacggtcgatgtgacaagaacatcctccgctacaagcttctcctcagctacaagctcatcctcagctacaagcttacctccttcctcagctacaagctcacgttcaagctccggttcatgctccatatccttaatgttgtccatgatcatatcatcccctccctcttgaaaaggatttgacctcaaatccggttcatctgcaataaaaggtaccaagtcagaaacattaaagctagaactcacattatacttaccttgcaaatcgagttgataggcattgtcgttgatccgtttgattatcttgaatggaccgtctattcttggcatgagtttggacttcctttgagctcgaaacctctcctttcttaaatgaatccacaccatatctccaacttcgaagatttgttctcgtctccctttattagcttgcttagcatagagtttggtcttttcttctatgtttctcctcgcattctcatggatatgttgcactagctcagccttctttttaccatcaatacttactctttcactcaaaggcaaagggattagatccaaaggtgagatggggttgaaccaataaacaatttgaaaaggagaatacttagaagcagaatgcacgacatgattatatgcaaattcaatatgtggtaagcattcttcccaagttttaatgttctttttaatcaatgcacgcaagagagtacctaaggttctattaaccacttcagtttgaccatcagtttgcggatgacatgtagtagagaataacagcttagttcctaacttagaccacaatgttctccaaaagtaactaagaaacttagtatctctatccgaaactatggacctaggcatcccatgcaaacgaactatctctttaaagaatagattagctacatgcaatgcatcatcagttttatgacaagcaatgaaatgagccatcttagaaaatctatcaaccacaacaaagatagaatcatttcctgttctagtcctaggcaatcccatcacaaaatccattgaaatatcattccagggatgagtaggaataggtaaaggagtatacaaaccgatgggctgaaccttagatttggcttgcttacaagtattacatctcccacaaattctttcaacatcacgtttcatgtgcggccaatggaaatgttctttcatgacttccaacgtcttagcaatgccaaagtgtcccattagtccacctccatgaacttccctgacaaatagatctcgtagagagcagttaggaacacacaaacggttctcatagaagagaaacacgtcttgtctaaaatagtgaccgaaagcaaacttttcacaagctttataaacctcgtgaaaatcatggtcagtttcataaagttcttttatttgttcaaaacccataagcttaacattaagagtagagagtagggtgtacctccgggataatgcatcagcgactacattatccttatcttttttgtacttgatgacgtagggaaatgtctcaataaactcaaaccacctcgcatgtctcttgttaagtttctgttgtcccttcaagtgttttagcgattcatgatcagtgtgaatgacgaactccttagaccataggtagtgttgccacgtttggagagctcggaccaaggcgtacagctccttgtcataggttgggtattttagcgtagctcctccaagtttctcactgaaaaaggcaataggcttttgatcttgcattagaacagctccaatacctatacctgatgcatcacactcaatctcaaacgttttaagaaagtcaggcaatatcaaaacaggtgcattggttagtttatccttgagagactgaaatgcttcttcttgtgcttcctcctatttgaatcctacatcctttttgataacctcggtgagtggtgcggcaatggtactaaagtccttgacaaatctcctataaaatccagcaaggccatgaaaactccttacttctcccacagtctttggactcggccaatctttaataaccttaactttctcttcgtcaaccttaactccatctgcactcacaacaaagccaaaaaacacaagattatccgtgcaaaaggtgcatttctttaggttggcatagagttcctcttttctaaggacattcaaaacagaatctaaatgctctatatgctctctcaagcttttgctgtaaactaagatgtcatcaaagtaaactacaacaaatatcccaatgaatgctcttagaacatgattcatcaacctcatgaatgtactaggtgcattagttaatccaaatggcatgactagccactcatataacccatgtttagttttaaatgcagttttccattcatctccctctctcatcctaatacttaaccgttatattgttgatggctctgcaatcaacacacattctccagctgccatccgcacttacatacttttcatggataccctaagtcaggtaagtctagtggtttatgcaaactatggacgagtggaagatttcgtgagactcaagaaagat

SEQ ID NO: 15479 - DNA, 3000 bp, Unknown; identical to SEQ ID NO: 6927
  misc_feature (1)..( 3000): cDNA_ID_1816181_gDNA_ID_2926137_Annot_ID_197267 3000 nt of promoter + ATG

SEQ ID NO: 15480 - DNA, 3000 bp, Unknown; identical to SEQ ID NO: 7762
  misc_feature (1)..( 3000): cDNA_ID_3088578_gDNA_ID_2926137_Annot_ID_197262 3000 nt of promoter + ATG

SEQ ID NO: 15481 - DNA, 3000 bp, Unknown; identical to SEQ ID NO: 8047
  misc_feature (1)..( 3000): cDNA_ID_2165947_gDNA_ID_2926137_Annot_ID_197257 3000 nt of promoter + ATG

SEQ ID NO: 15482 - DNA, 3000 bp, Unknown; identical to SEQ ID NO: 8048
  misc_feature (1)..( 3000): cDNA_ID_2165930_gDNA_ID_2926137_Annot_ID_197253 3000 nt of promoter + ATG

SEQ ID NO: 15483 - DNA, 3000 bp, Unknown
  misc_feature (1)..( 3000): cDNA_ID_2165898_gDNA_ID_2926137_Annot_ID_197246 3000 nt of promoter + ATG
ttattgcatgttttcttgtagtgacattcaccggatctccttcagatttcttcccaaacctgggcccgaacttccggcccccaacactaccagctttgacggtttctccggccgattctccggtttcctacttggtcgcctgaccatggtgaaaccatcatttcccgattggttcttcttaggaacaccctgtgaaaaatctcgtggaccttcacttacatccgttcgaggaccctcctttgactgttcttggaccactctgggacacgtatgtaccaagtgtccatacaagccacatgttgagcaaatgttggtcagaccctcataggccacatagtacctgtctccgttcaccattattgtccctttgagtggtttggctaagttcatttctacacaaactcttgcaaaacgagctctttcatgattcaacgtcatcgtatccactttgaagggcttacccaaacctcctgcgatactcatcaaaatagatggatgataaaaattcaccggcacattggttaaacgaatccacacaggtgttgtagcaatcacatcacgtaacgggtcaaactccggcaaccaagcttgaaccgtgagattgcttccaaacactctccatggatcgcctgttaaggcagctaaatactcttcctgcaactcaaacctgatcatgaagaattgacggggtagatccattactgtcatcatccccttaggattccacaactcccgaagtttcttattaaaaatttaatatttcatttgtatagttgaatacatagtttataaacgcatgatgctttttgggccttacctatggtccaacgtgacttggacgttcttctaatttcacttctcgaatagacatctcaagaatagtggaagaacaacggccattgctattttaagcaacgtaggattttcttgcaagcgctagtataactctaaaggatgtaatgtagtggacatatattttttcgtattctcaaacatttcaggctaatccaagaggttacttgaatgattttattaataatctatctcaatacttggataagttaaatacccatattgatagtatgaataagttcacaagtggattttagctattctacatatgattcaaatctcaaaaatatgtggaacactagaacttaacaattgaaatcttatttggtcgagcttatatggaaaaaagtgggcacaaatcaatagtttaactaatcgttttcatttatatttgcctcgtatttagttaaactattatgtcatgtatgtttcaaaatttataagttgtaatagttattaagttttttaaaactaaaagagttttaatatttaaataatttttttttccttaagaactccaagctaagaacctaccattgcatcaccaaaattttaatctcttaaccaaactcttaagatcaaaattttcaaaattaatcatatatatttctaagaactattctaatactaatctaagagactatcaataatgatgttctaaagacttttgggataaaatagtacaaattttgtttttttataaaagttaatgtgttttgcttttgcttgaaatgaacaaaaaataactaaatctgtaattaccttgattggtatatagttagccaaatattaaaacatatatatatatatctatatatctatatatatagaacagaaccaaaagtgtttacaatatcatttttggattgagttaaatatgttcctttttctgtttttaaaatagaaaataattgaaatttattcatcttaggaaagattgctttcatttttttattaaagtaaatacatagaaattaatttagagaaattcctaaaaatagcactaaagcaagttgtatgggtaagaatagcacacattccaaaaatagcaatacttgacttactatgaagtttttgttctagaagtcttatcacaaatttattttttcaatatatcacaacttttatataaaatcaatttaaccaaaataaattagaaataaatttaaaatattatatttgggttttcaattttcaatttaaagtaaatatttcaacaatttaaaagaaattttgattcatttttatgttagtttataatattatatttaggttccctatttctaatttatggtatatattttcaccatttaaaagagattttttattttaatattagtttgtagtattatatttgggttgcctatttccaatttagggtatctatttccactattttaaaaaaaattgattcaatttaataatagattagtgtttgctctcatttttattttctatcttatattttagttaagtttaattgaaatttatagtgctatttgtggaattttagaaatattgtgctaattttagaagaaaaagttttttttgtgctatttttgtcaattgcccaaaaatatatcgatgtgtttagatatagatataaccaagccacgttctattctgccatcattttggaaaaactattctggtgtaccatcttttattctgagtaccactcgagcatgtgcaattacatctctctccttaatgaataactgagggagaatttcaaaataaagagtaaatcatttagtaaaaaagaaaagaataacgaccgttaccaaaatcgcgaacctactctcctgccgacgtgattttctccgacttcgccgtcggcgacttgagcttcgatttcgccggcgatttgagctctaatttcaccggcgagttagcttccaagatagccgtagcttccaagccgataatctgctcccaaagtgagcttcctcttcaacggcaaaagtaaatccgatctcgttttcatatgtagattaatgtgaatttcttgttggagttagttgttaataacataaaattgttgtattgttcattctgggctgttgtatcgttttgaatcagagagtttagtgagtgttcaatcgaaatttacgatttgtgaaacccagaattgacgaactgggacaa

SEQ ID NO: 15484 - DNA, 3000 bp, Unknown; identical to SEQ ID NO: 8045
  misc_feature (1)..( 3000): cDNA_ID_2165889_gDNA_ID_2926137_Annot_ID_197243 3000 nt of promoter + ATG

SEQ ID NO: 15485 - DNA, 3000 bp, Unknown; identical to SEQ ID NO: 8046
  misc_feature (1)..( 3000): cDNA_ID_3088544_gDNA_ID_2926137_Annot_ID_197237 3000 nt of promoter + ATG

SEQ ID NO: 15486 - DNA, 1528 bp, Unknown
  misc_feature (1)..( 1528): cDNA_ID_3088548_gDNA_ID_2926137_Annot_ID_197234 3000 nt of promoter + ATG
tatctttgggagacaaggcacaccactgggaaaagactctacccccagacttcatcacctcgtgggatgattgtaaaaaagcttttcttgccaagttcttctctaatgctcgcacaactagattgaggaacgagatcccaggcttcacacaaaaaaacaataaaactttctgtgaagcttgggagagggttaaaagctacaccactcaatgtccccatcacggcttcaagaaggcttcattattgagcacactctacagaggagctttactaaagatcagaatgctactcgacactgcctcaaatgaaaacttcttgaacaaggaagtagcagaaggatgggagttggtcgaaaatctagcacaatctgatgggtgctacaatgaagactatgatcgctcggtgagagaaactggaggaactgaggataaacagagcaaggatatcaaggctctgaatgaaaagctagacaagttgttgctgactcgacagaagtaggtacactacatcaccgatgaagagcacttccaaatgcaagaagtggggaatgatcaaactgaacagttgtgctacatccagaaccaaggagggctcaacaagggctacaacaactacaagcccaacccaaacttctcctacataagcactaatgtagctaacccccaagatcaagtgtatccaccacaagaaaatcagtctaagctttttgttcagtacaaccaaggttatgtccctaaacaacagtttaatggaggctaccaacagcagaatccaccaccagcgttcactcaacaaccacaacaagccctagcagctcaagatcctgaaattaaacaacttattcaacagatcattcaaggacaagctactggcgctatggcttttgacaagaagatagctgaattacataacaagatcgtttgtttttacaacgatctaaatttcaatttcgaagctctgaattccaaaatcaagtatgtggagagtcaatttgcatcaacctctgctctgaagcatcctcaacaactcccaggaaaagcagtctagaatcctaaggactatgctactgcaaatgctatcaccatccaccaagaagatgagtctccaccaagtcatcagactccgaatactgaagacaatatgattcaagaagggggggggattcaactcaaattgttgcacctgccacccatcaattcatctagactatagagcaaacacctttgctgaatactcaccattctggaaaaaaattcaaaattgaaaaactcaagaaggatcagaatcaagagatgattagtagtgcctccaccaaagaaacatataaaaagaaagtcatccaagaaaagcttgatgatcccggttcattcactctaccatgttctctaggactattgacattcaatagatgccttaagaatggaaagattaatctgaaccttgaaaaaggcattaagatgaaatttgacatcagaaaagcttcagggaaatcaacaacaggaggttagagttttgggattcaggacatg

SEQ ID NO: 15487 - DNA, 3000 bp, Unknown; identical to SEQ ID NO: 7427
  misc_feature (1)..( 3000): cDNA_ID_3088608_gDNA_ID_2926138_Annot_ID_138926 3000 nt of promoter + ATG

SEQ ID NO: 15488 - DNA, 3000 bp, Unknown; identical to SEQ ID NO: 7430
  misc_feature (1)..( 3000): cDNA_ID_1817681_gDNA_ID_2926138_Annot_ID_138927 3000 nt of promoter + ATG

SEQ ID NO: 15489 - DNA, 3000 bp, Unknown; identical to SEQ ID NO: 7431
  misc_feature (1)..( 3000): cDNA_ID_1817677_gDNA_ID_2926138_Annot_ID_138928 3000 nt of promoter + ATG

SEQ ID NO: 15490 - DNA, 3000 bp, Unknown; identical to SEQ ID NO: 6923
  misc_feature (1)..( 3000): cDNA_ID_2165350_gDNA_ID_2926138_Annot_ID_197287 3000 nt of promoter + ATG

SEQ ID NO: 15491 - DNA, 3000 bp, Unknown; identical to SEQ ID NO: 7429
  misc_feature (1)..( 3000): cDNA_ID_3088608_gDNA_ID_2926138_Annot_ID_197307 3000 nt of promoter + ATG

SEQ ID NO: 15492 - DNA, 3000 bp, Unknown; identical to SEQ ID NO: 7428
  misc_feature (1)..( 3000): cDNA_ID_3050474_gDNA_ID_2926138_Annot_ID_197317 3000 nt of promoter + ATG

SEQ ID NO: 15493 - DNA, 3000 bp, Unknown; identical to SEQ ID NO: 6924
  misc_feature (1)..( 3000): cDNA_ID_2165361_gDNA_ID_2926138_Annot_ID_197289 3000 nt of promoter + ATG

SEQ ID NO: 15494 - DNA, 3000 bp, Unknown; identical to SEQ ID NO: 6922
  misc_feature (1)..( 3000): cDNA_ID_2165328_gDNA_ID_2926138_Annot_ID_197284 3000 nt of promoter + ATG

SEQ ID NO: 15495 - DNA, 3000 bp, Unknown; identical to SEQ ID NO: 398
  misc_feature (1)..( 3000): 2750-1469P.txt file - cDNA_ID_19124; gDNA_ID_1590760; Annot_ID_150004
  misc_feature (2235)..(2235): n is a, c, g, or t
  misc_feature (2245)..(2245): n is a, c, g, or t
  misc_feature (2353)..(2353): n is a, c, g, or t
  misc_feature (2521)..(2521): n is a, c, g, or t
  misc_feature (2533)..(2533): n is a, c, g, or t
  misc_feature (2967)..(2967): n is a, c, g, or t

SEQ ID NO: 15496 - DNA, 1363 bp, Unknown; identical to SEQ ID NO: 55
  misc_feature (1)..( 1363): 2750-1469P.txt file - cDNA_ID_19407; gDNA_ID_1848; Annot_ID_145388

SEQ ID NO: 15497 - DNA, 1836 bp, Unknown; identical to SEQ ID NO: 63
  misc_feature (1)..( 1836): 2750-1469P.txt file - cDNA_ID_19619; gDNA_ID_1946; Annot_ID_145447

SEQ ID NO: 15498 - DNA, 2630 bp, Unknown; identical to SEQ ID NO: 109
  misc_feature (1)..( 2630): 2750-1469P.txt file - cDNA_ID_21148; gDNA_ID_2698; Annot_ID_145871
  misc_feature (2289)..(2289): n is a, c, g, or t

SEQ ID NO: 15499 - DNA, 94 bp, Unknown; identical to SEQ ID NO: 112
  misc_feature (1)..( 94): 2750-1469P.txt file - cDNA_ID_21263; gDNA_ID_2750; Annot_ID_145922

SEQ ID NO: 15500 - DNA, 159 bp, Unknown; identical to SEQ ID NO: 156
  misc_feature (1)..( 159): 2750-1469P.txt file - cDNA_ID_22476; gDNA_ID_3406; Annot_ID_146280

SEQ ID NO: 15501 - DNA, 8 bp, Unknown
  misc_feature (1)..( 8): 2750-1469P.txt file - cDNA_ID_25828; gDNA_ID_25704; Annot_ID_146507
agctcatg

SEQ ID NO: 15502 - DNA, 7 bp, Unknown
  misc_feature (1)..( 7): 2750-1469P.txt file - cDNA_ID_28712; gDNA_ID_28590; Annot_ID_146701
atatatg

SEQ ID NO: 15503 - DNA, 3003 bp, Unknown
  misc_feature (1)..( 3003): 2750-1469P.txt file - cDNA_ID_30436; gDNA_ID_1972016; Annot_ID_177933
ttaagatgggatatataatacattttgtaatattcttccaaaaaataaagttaaatacataggttctcacttgatggtgccactatgccgaagtgatgactgcaaagctcgtctagagtttcgtatccaagggtgagagagcagtgtctttgcatcaggcctctgcctggaatcctgtaaaacacaagatacaaatcagatgtacatactggatattaaataaatcattgtctaggttctggtacagaggtaggtgaataaaccctatagcagaaaattataccttcttgaagcactgtcgtagaaagtccgtaatatctggagaaagactatcaggaataggagggttgtcatcctgaaacgaaaccataagaaatagtttgtcacttctggctaacagcttttgcatttttcaggagagaagtgtttacgacatggagaaggggacggaagagacacctaaatttgattgacttaaatgcaaactcataaaatgttgtcaaatacctgaacaatacgaaagagggctggcatgggttgcagatcatagtaaggaggtacacatgtcagaagttcgataacagtgcatccaacgctccaaatgtcagaagcagcacaaactcctgacatttcaataacctgaaacagaagttgggcttctgtcaatacgtacataatcaggtaaaagttctctaaaggagcaaacaaaagcatctttcaaacaacaacaaatattgtttcaaaactgcgtacgaaagctatacagaatatggagatggaaaatatataatcaaaggtgtacctcaggagccatccagtaaggagttccaaccaccgagtgagtattaacatcagcctcgttaagtttagtggcaactccaaagtcagcaagcttcacaagaccctgaagtgtgatgtagtcaagtatctttctaaggaaaaagcctagaagaatcttatccagcagatctcaaaacaaaaacacactgaagacatgtctgagaatagataatatagaaaacacacctcctttgtcgtcaaaatatttgcacccttaatatcacggtgtataacaccctgctcatgcagatataccaaaccttccaagacctgtattcactagttagtacacaatgcataacgaaacttaactcaacttgaaagatgtatacagacctgagcaatgtaaacagccaccaaagattctgggaaaggtccaaatttatttggtttaataatgtttgcaagagagccattctcaacgtacctgcaaacacataattgaacttgagtttcccgtccatagtccagagtggaccaaaataaacaaaaaaagctacttactccaaaataatgtgaaggtgagtctttgtcttcgacgacccaagatacttcacaatgtttttatggttcaagttctgcaatgaaatattatctcagaatacatagagaagaactgcatcttaaccagcatcataaccattcatgagaagaagccaaaattcagaaggtgattgatttgacataaacttagtatcaggatcccaactctgtaaacagtacaaaattcagaaaactaccttcaaaagatcaatttcttgctggagaaattcatcccaacagcacaagaatcatccacatgtaaaaaccaggattagtcagcatagcagtggtaaggaacaaataaggaagatagatataaggaaaataacaaaccataatggtgttaagatcctcttgaacaatattttccaaagagacttgtttaatggccacaaagtcaccattctccaagtctaatcctttataaactcgaccataagctcctttaccaatttcatctcccagcatctaccctcaacatatcaaggatcaaccattgaaattaatcaaaattgaagagaaaacagcaaaaagcaccagacttaagcttaaaatcaataaaattactaaagctaaaatcttaaggagacccattagaaaacccaaatcccagaaattacggagaagaagaaagctcacatatttgttgtcgagagtctttgatttgtgaaactgagatgacgtcatttgccgcgccatctcttctcgtttcttcttcctccgtcagcagaacaaaaaaaatgcagcgaacagaacacaattgctcctcaaggaaacagaatccaataagaattagggttttaattttttgagaaaattgaaagaaaagatttcgagattggtggagttgaaagatcagagatgccagctctattacagtagtgaaaatacatgaccaaattttaataaaatcaaaattaagaaaaaggaaagaacaaaacaaaagttttgggttagaaattgactaactgtaataaaggagaggtaattatgttaatttctcatgcgcctgtattcttctttattatgtggcccatactttttatttatttacgatttcacccctttatttcccgatttgtaaaaatactagcattttgtccaattactgattaatcatctatttaaaaggtggtccaaatatttaatgctttttcactggtgtcaattttaattaaggtggttagtattcattaatgtattatcaaccattttgttataactttctcaattgtaggagctggtataatcggatgtttatagccaatcaaattataattcatagtagtatcaaatctttaatataaataactagaagcaactaacctatgcattgtaataacattagccatttggatttcaatatgattgttactgcaaaatctttaaaatgaaaggaaaaaaaaaccacgcaggtgaaataaaaaccaaatgaagattattaccaaacgccgaagctagcgcgtgagagaaaaggtcggtaggttcattggtaacatcagcagactaatggagagagagaaactttgagaaaagaaaaaaacaaccaatcgaagaactcatagagatcacgaaaccctagtggaaagagagaaagctttgttgaagacggcggagatg

SEQ ID NO: 15504 - DNA, 3003 bp, Unknown
  misc_feature (1)..( 3003): 2750-1469P.txt file - cDNA_ID_30436; gDNA_ID_24396; Annot_ID_146435
ttaagatgggatatataatacattttgtaatattcttccaaaaaataaagttaaatacataggttctcacttgatggtgccactatgccgaagtgatgactgcaaagctcgtctagagtttcgtatccaagggtgagagagcastgtctttgcatcaggcctctgcctggaatcctgtaaaacacaagatacaaatcagatgtacatactggatattaaataaatcattgtctaggttctggtacagaggtaggtgaataaaccctatagcagaaaattataccttcttgaagcactgtcgtagaaagtccgtaatatctggagaaagactatcaggaataggagggttgtcatcctgaaacgaaaccataagaaatagtttgtcacttctggctaacagcttttgcatttttcaggagagaagtgtttacgacatggagaaggggacggaagagacacctaaatttgattgacttaaatgcaaactcataaaatgttgtcaaatacctgaacaatacgaaagagggctggcatgggttgcagatcatagtaaggaggtacacatgtcagaagttcgataacagtgcatccaacgctccaaatgtcagaagcagcacaaactcctgacatttcaataacctgaaacagaagttgggcttctgtcaatacgtacataatcaggtaaaagttctctaaaggagcaaacaaaagcatctttcaaacaacaacaaatattttttcaaaactgcgtacgaaagctatacagaatatggagatggaaaatatataatcaaaggtgtacctcaggagccatccagtaaggagttccaaccaccgagtgagtattaacatcagcctcgttaagtttagtggcaactccaaagtcagcaagcttcacaagaccctgaagtgtgatgtagtcaagtatctttctaaggaaaaagcctagaagaatcttatccagcagatctcaaaacaaaaacacactgaagacatgtctgagaatagataatatagaaaacacacctcctttgtcgtcaaaatatttgcacccttaatatcacggtgtataacaccctgctcatgcagatataccaaaccttccaagacctgtattcactagttagtacacaatgcataacgaaacttaactcaacttgaaagatgtatacagacctgagcaatgtaaacagccaccaaagattctgggaaaggtccaaatttatttggtttaataatgtttgcaagagagccattctcaacgtacctgcaaacacataattgaacttgagtttcccgtccatagtccagagtggaccaaaataaacaaaaaaagctacttactccaaaataatgtgaaggtgagtctttgtcttcgacgacccaagatacttcacaatgtttttatggttcaagttctgcaatgaaatattatctcagaatacatagagaagaactgcatcttaaccagcatcataaccattcatgagaagaagccaaaattcagaaggtgattgatttgacataaacttagtatcaggatcccaactctgtaaacagtacaaaattcagaaaactaccttcaaaagatcaatttcttgctggagaaattcatcccaacagcacaagaatcatccacatgtaaaaaccaggattagtcagcatagcagtggtaaggaacaaataaggaagatagatataaggaaaataacaaaccataatggtgttaagatcctcttgaacaatattttccaaagagacttgtttaatggccacaaagtcaccattctccaagtctaatcctttataaactcgaccataagctcctttaccaatttcatctcccagcatctaccctcaacatatcaaggatcaaccattgaaattaatcaaaattgaagagaaaacagcaaaaagcaccakacttaagcttaaaatcaataaaattactaaagctaaaatcttaaggagacccattagaaaacccaaatcccagaaattacggagaagaagaaagctcacatatttgttgtcgagagtctttgatttgtggaactgagatgacgtcatttgccgcgccatctcttctcgtttcttcttcctccgtcagcagaacaaaaaaaatgcagcgaacagaacacaattgctcctcaaggaaacagaatccaataagaattagggttttaattttttgagaaaattgaaagaaaagatttcgagattggtggagttgaaagatcagagatgccagctctattacagtagtgaaaatacatgaccaaattttaataaaatcaaaattaagaaaaaggaaagaacaaaacaaaagttttgggttagaaattgactaactgtaataaaggagaggtaattatgttaatttctcatgcgcctgtattcttctttattatgtggcccatactttttatttatttacgatttcacccctttatttcccgatttgtaaaaatactagcattttgtccaattactgattaatcatctatttaaaaggtggtccaaatatttaatgctttttcactggtgtcaattttaattaaggtggttagtattcattaatgtattatcaaccattttgttataactttctcaattgtaggagctggtataatcggatgtttatagccaatcaaattataattcatagtagtatcaaatctttaatataaataactagaagcaactaacctatgcattgtaataacattagccatttggatttcaatatgattgttactgcaaaatctttaaaatgaaaggaaaaaaaaaccacgcaggtgaaataaaaaccaaatgaagattattaccaaacgccgaagctagcgcgtgagagaaaaggtcggtaggttcattggtaacatcagcagactaatggagagagagaaactttgagaaaagaaaaaaacaaccaatcgaagaactcatagagatcacgaaaccctagtggaaagagagaaagctttgttgaagacggcggagatg

SEQ ID NO: 15505 - DNA, 496 bp, Unknown; identical to SEQ ID NO: 235
  misc_feature (1)..( 496): 2750-1469P.txt file - cDNA_ID_76034; gDNA_ID_75779; Annot_ID_146999

SEQ ID NO: 15506 - DNA, 1192 bp, Unknown; identical to SEQ ID NO: 257
  misc_feature (1)..( 1192): 2750-1469P.txt file - cDNA_ID_78177; gDNA_ID_78081; Annot_ID_147242

SEQ ID NO: 15507 - DNA, 1360 bp, Unknown; identical to SEQ ID NO: 266
  misc_feature (1)..( 1360): 2750-1469P.txt file - cDNA_ID_99140; gDNA_ID_99056; Annot_ID_147329

SEQ ID NO: 15508 - DNA, 3000 bp, Unknown; identical to SEQ ID NO: 10022
  misc_feature (1)..( 3000): 2750-1469P.txt file - cDNA_ID_1007273; gDNA_ID_2213619; Annot_ID_131941

SEQ ID NO: 15509 - DNA, 3000 bp, Unknown; identical to SEQ ID NO: 5408
  misc_feature (1)..( 3000): 2750-1469P.txt file - cDNA_ID_1007534; gDNA_ID_1620785; Annot_ID_50421

SEQ ID NO: 15510 - DNA, 3000 bp, Unknown; identical to SEQ ID NO: 8915
  misc_feature (1)..( 3000): 2750-1469P.txt file - cDNA_ID_1007791; gDNA_ID_1971923; Annot_ID_177216

SEQ ID NO: 15511 - DNA, 3000 bp, Unknown; identical to SEQ ID NO: 8915
  misc_feature (1)..( 3000): 2750-1469P.txt file - cDNA_ID_1007791; gDNA_ID_2926219; Annot_ID_203224

SEQ ID NO: 15512 - DNA, 3000 bp, Unknown; identical to SEQ ID NO: 6416
  misc_feature (1)..( 3000): 2750-1469P.txt file - cDNA_ID_1007795; gDNA_ID_1621093; Annot_ID_55556

SEQ ID NO: 15513 - DNA, 3000 bp, Unknown; identical to SEQ ID NO: 6416
  misc_feature (1)..( 3000): 2750-1469P.txt file - cDNA_ID_1007795; gDNA_ID_1621093; Annot_ID_170769

SEQ ID NO: 15514 - DNA, 3000 bp, Unknown; identical to SEQ ID NO: 6416
  misc_feature (1)..( 3000): 2750-1469P.txt file - cDNA_ID_1007795; gDNA_ID_2926160; Annot_ID_139666

SEQ ID NO: 15515 - DNA, 3000 bp, Unknown; identical to SEQ ID NO: 6416
  misc_feature (1)..( 3000): 2750-1469P.txt file - cDNA_ID_1007795; gDNA_ID_2926160; Annot_ID_198680

SEQ ID NO: 15516 - DNA, 3003 bp, Unknown
  misc_feature (1)..( 3003): 2750-1469P.txt file - cDNA_ID_1008056; gDNA_ID_2926228; Annot_ID_203574
cactgatagatagagctcacgagttaggcctggtagttctgatggatatcgttcataggtagtgaaggtttacatgaaagcaaacaatgagatccaccttttggtcatttacaagtcattgaatcttccgactctctaacctgtgcagccatgcttcaaaaaacacattggatggactgaacatgtttgatggaactgatgctcactattttcactctggacctcggggataccattggatgtgggattcacgacttttcaattatgggagctgggaagtatgtaactttttcgtgaattttaatcgaaaatgtagtgaacatacaacttccttaagcactatcagttccaacagtctcttttgatcttttctaacaggtattacgatatctcctttcaaatgcacggtggtggctagaagaatacaagtttgatggatttagatttgatggtgtaacctcaatgatgtatactcatcatggactctcggtacttcaaacttttctacaatggatggctaatgcaatctttatgtttttcccatctttccaatgttgtatcagctttaagtatatcttaggtcggtctgctgaccttctattttgtgggttttggataggttggatttactgggaactacaccgaatactttggattggaaactgatgtggatgctgtgaattatctcatgctggttaatgatatgattcatgggctctaccctgaagcgattaccgttggtgaagatgtaagttttctgattggctaaataaaaaagtgctctacagaaccataagggatacatattgtgtatcatattaaagatagtccaaaaccaaattagtgtgaactgacaagagaaagttagtatatattttttggtgatctatgctaataaaatcgtttcatttcaggttagtggtatgccaacattctgtattcctgtccaagatggtggcgttggatttgactaccgtttacacatggccatagctgataagtggatagaaatgctcaagtgagtgttttctgcattttcttttaagttccatctgctttaatatttggtgaaataagtgtcttactctcctccatgttatgctgtgaaggaagagagatgaagactggcaaatgggcgacatcatttacacacttaccaacagaaggtggtcagagaagtgtatctcttatgctgaaagtcacgatcaagctcttgttggtgataaaacaattgccttctggttaatggacaaggtatagatagattagacaccgttttacattaaactcattattaaaagttatgtgagcggtgttgttcgggttccaggatatgtatgatttcatggcagtagacagaccatcaactcctcttatcgatagaggaatagctttgcacaaaatgattaggcttataactatgggattaggcggtgaaggttacttaaattttatgggaaacgaattcggacatccaggtactaaatcgatttaagcttgtttcatttactttctgtgcaaaaattttgagtgtacaatttcttcatctactcctgcaatattcagaatggattgattttcccagaggcgagcagcgtctttctgatggtagcgtgattcctggcaacaatttcagttatgacaaatgccgccgcagatttgatcttgtaagttcttacaatttggctgagtacaacattactcaagatatttttctgtgtattctgattcagaatagttcatatatagggggatgcagattatctcagataccgcggactacaagaatttgatcaggcaatgcaacatcttgaagagaattacggtgtaagtctccaagttaaaacctttgtagatgatctcagttacccattagctttattcttattttacatttgagcagtttatgacttcggagcaccaattcatatcacgaaaagacgaagcagatagagtaatcgtattcgaaagaggtgatctcgtctttgtctttaactttcactggaccagcagctactttgattaccgcattggttgctccaagcctggaaaatataaggtataatacacatctaactcttccttttcaaacactggagactttggtattggttgtgaagatagaatccgatatctttctacatttcgacattccagatcgtattggactcggacgatcctctctttggtggattcaataggctcgatcgcaaggcagagtacttcacttatgtaagaaaaataaaaccattctagtcaaagtttacattaattgtgactgttccaatctcttgaccaatcgtgccaatgcaggatggcttatacgacgaacgaccctgctccttcatggtctatgcaccgtgtagaaccgccgtggtttatgctttagcaaaccacgattagaactttcagactttggatccaatatcataatcaaggaagagtgtgtgaaaaaatgtttttccttcattagagtgaagtaaagaatctggtaacgaaaaaaatgtctgtgtatacaagatcaccgaaaatgtaaagaatctggtaatggaaaatatctaaaacattaaaccagaaatgtagcacttgattaaaaaccaattacaacaaccgaaataaaccgataataaacgccagctggccggtcttggaaatggataaacaaccgaaataaaccgatgtatgccaccaagcataattgcaacggtataatgcttcaaacaaataaatcaaactaaaaaggtatcacaacaacttttgattatgatcccactaataatagtattgttgtaaatctaaaatttcaaaggttttcaaaaagggatcatcttcataagataccggtttaatttgatttggttgcgatgaataaatccggttaagacaccagtcacgctcctttcgcttccattattaggaacaagaaatccaacggtcatcgtagagcgcatcagataaacggctaaaaagcaaattctctggaagaagaagaagacgaagatg

SEQ ID NO: 15517 - DNA, 3003 bp, Unknown
  misc_feature (1)..( 3003): 2750-1469P.txt file - cDNA_ID_1008109; gDNA_ID_2214599; Annot_ID_186983
caacaactcctaaggttttttcaggtgaacttggaatcagctgtcagtataattaagaatgcagaagcagtcactgatgctatcatttcaactgtggatgattatgctcccacggtaggtttttctggctctgcgacaaatgtgacatgatagtcgtgtatctaagcggtgtaataacctataatgttccagtagcagatggagggtattgttccacttgcttcccaactagcggaagtggttgtacaagagaagttgatgctcgagaaatgccatgaccttttgagaatgatttccgagttagaggtataaagattgtgtgtgtattaacatttaaagacctgatctgatatgtttctgttctctgatcatattttgggatgtacacagatgcaggagaggagcttgaaatgctgcttcctgattcaacacaaacagactttcgatacaaatcttcttaaacactaggactgtgtcttcccctgtcaaagctttgcgactcagttttttaaaagcaaaaattacagtattttgaggcttaataaatgttgcgactctcgtaagagtcttaggttctctgtatcagatggaacaagatggtaataaccagtacacataagcacttttgatggtaatttccacttgtttctttcttggatattgggtttagttatctctttttcaatatgctttgattgcaagaaacagagtcaagaagtgtgtagtgtcctcctctcccgagtggatttgaccatatcttctatatgaccgaaaccacacttccttgcagctctcatggacttgttaaaactcaatcatgtcacattgcaagataagtactcttcgtccgctctagaaacatttattgatgacatggactaggaatacaagaaaagagagtaatgcacaagttcaaaacagcgagagactacatgaacattaaagacatgaaacagtaatttcaaacctgatattattactcagccaaagcgtggcccagttatttgaacgactttggaaacagtaatatcatttatatactactattaagatttaagaataagcgtttaccaagaaagagaatattcagtcctctcaaatgggaaatcgaaacgtcatgaaaaaaagaggaaaataaatgaaaagagagagacgctttgttctatatataaaggaaccctaaacaagtggtaaagagcaaagcaaaaccttttagtttcaatgtctaaattctattcataaaccctaaatcgatccatgtcttagaaacgatagaaattccgctgaagatatcttcaagcgacgaagatgaaatggagactccaattagagaagaaggtgaagaagactcttcgtcggaagaagaagatgatgatatgtcttctaataacccatcagctgcaacagagaagcaaaagagagtttattgagtaaaaacgaaatttataggagataatttttccttcgtcatttcaaccataaagccaaaccacaaaaaaaaatctcttcatctccctcaaaacttgaaatatggtgaaaacaactactcaaggtacatcacgtaagatattgacaattttttatttttatcattgcatgaaaattcgttttgtcataatcttaatctctatttgatctatgtgtgtagcgaaaaccaatgacaacgttaattgactcatacactgcacaatgttgaaagtgtttcaaagtgagatatagagagtcacaagaagagtacgaaaagaatcaaagtaaaactccgaaaaaagtcttttgaatgcaagagatgtgaaaaatctagagatgtggttgtgaactttgattcccctattgtgcgttggtttcaggatggacatggtatacccaacacccctcaaggtttgaagagggttttgatcgtcagaacaagctgcgagaaagccgatgtttaatatgaaacattagctcctaaacgaaagagactaaatactgtgaagaaagtcactaagtttattgaagacaatgaacaattcaaagacatgaagattgaagaggtttcttttaccgcacccaaacagctgaaaaggaaaaagttctaaataatgatgttatagttgttgatattaaaacttgaaaaatcaacaagttaaggaaactaaagagacagaataaaccttaacttgttgatcttttcaagttttgttatcggtaactacaacatccttacttatatttttttcttttcagccgtttgggtgcgacaaaagaaacctcttcaatcttcatgtctttaaattgtttattgtcttcaataaacttagcaacttccttcacagtctttagtctctttcgtttaggagatactgtttcataataaacatcggctttctcgtagcttgttctgacgattaaaaccttttataaactttgaagggttttgggtattaccatgcccatcccgaaaccaacgcacagtatggaatcaaagttcaaacacatctccaggttcttcacatctcttgcattcaaaagactttttcggtgttttacttcgaatctctttgcattggatcttaataatgtttgagccgaccatgttctacatatgatgaacaaaactcaagcactagcgattattaaggcttttttttttatttctatcgatctttttttttttacctattgataatgttgatgttgaaatactcaaacatggaagtggaattcaaaaatacaactaaagatctgttttcttagtacatacagaattgagaaacagagagatgaaaaatgccaagagtgtgaacaaaagtccacaaaacaaaagcctctgacggagaaggaggcttttaggtgttacccaaacaaaacgcacacaatacggcgtcgtttagaatcagaaaagacatttctttatggtcacttgattctctcttccttcatcaatcaatctcgtctcctggaaaacattagggagcctctcagatcctcaagaaaaccctaaatcaaaagtcgagatcgatg

SEQ ID NO: 15518 - DNA, 3000 bp, Unknown; identical to SEQ ID NO: 7630
  misc_feature (1)..( 3000): 2750-1469P.txt file - cDNA_ID_1008152; gDNA_ID_1621154; Annot_ID_56972

SEQ ID NO: 15519 - DNA, 3003 bp, Unknown
  misc_feature (1)..( 3003): 2750-1469P.txt file - cDNA_ID_1008299; gDNA_ID_2214454; Annot_ID_182627
cactttggagatcttagggaaatgatttcagaaaccagtttataactaaagtcacctggaataatgttagattgcctcaaccacagagaagctggtacaagggcgtttggttcccctactccacgcccaagtactccttcattttgtggctcgcaatacacaacagactttcaaccggagatcgcatcaaaacatggaactccggtcaacaagtcgcatgcaatttctgcaacgatgccgaggaaacaaggaatcatctctttttttcctgcaggtattcctctgaggtttgggaaaatttggctcaacgcctcctctccactgactactcgagtcactggaatcatctaattgccaaagaatctgctcttcctgttccggtatgtctttcaagcttccatctcccatatttggtgagagagaaatgcaagacgtcatggggaactcagcttaccatcaaacaggctcatcaagctcattgataagactgtccgcaatagaatcagttcaatacgagacaccggaaaccatagctacaacacatgcctgcagttatggttctccacacggccacgctcatctctgcaacttctctaaagtctcctctgtttttgtaccttctgcttttgcaatttcagcttttgtatcctctgtttttcttttaaaacactcaacacacggttgcattcattgtacaaaggattttgattgaagaaaattttacattctttcaaaaaaaaaaaaaaaagtgtagataaatataacctagtgaaaaaagaaaaaaacaaatttgtaaatacatcgacggctaagattacacatagaaccaaaataaaagaattttactattatattgatagaataatactggaaatagatctcagatatgtagctatataaatatatacacacatttgcaacctatattttgcaacgtaacaaaacaaataaagaaacaaaattttgttccttcctcttctacaagcaagtacgatcttttgctatattttgcagacaaaagtttcatcatggtctattcctctaagaagctgttcttgttcttcctctcgtgcattatgctgactttcaactataacactagtggcttcgtagccgcagcaaatagcataggcttgaactacggcctcctcggagataacttcccaactccatccaatgttctcaacctttacaagtccataggcattacaaaaatccgaatcttcgacccaaaaacagaggttcttaacgccttacgcggccaccgtaatattgaagtcactgttggcgtgagggaccaggacttgggtgctctttcagctaacgaagaagctgttaagggctggtttgcaaccaacatcgagccttacttagccgatgtcaacattgcgttcattactgttggtaatgaagtcatccccggaccaatcggtcctcaagtgcttccggtcatgcagtctcttaccatcctcgtcaagtcgatgaaccttcccatctcgataagcaccgtggtggctatgtcgaatcttgagcaatcatacccaccttctgctggagagttcacgtctcaagcgcgagaacaacttgtccccgtgctgaaactattgtctcaaacaagtacgcctattctcgtcaatatttacccttactttccttacgcatccgacccaacgaacatccctctagactatgctaccttcaacactaaggccaccgtcgtccaagatggaccattgggctattcaaacatgtttgatgcaatctttgacgcattcgtgtgggcaatggagaaggaaggcgtgaaagatttacccatggtggtgtccgagaccggatggccatctgccggaaatgggaacttaaccacaccggatatcgcgggtacttacaacagaaatttcgtgaaacatatagtaagcgggaagggaacgcctaagcgacccaacaatggaatggatgggtttttatttgcaacgttcaacgaaaatcaaaagccggccgggactgatatgaagcccatctataagctattttaagtttgaaagctgcttggactttccctattcactaataataatctctgctagtttgttagtgaactaagattaacacatgttattggctattggcttatgtgaaagtgatgagatctggtagcgagcttagttgactttttaataaatctgaaattggtagttgatcctcttactgcgtcgtttatggttgagccccaattttgtttctcgttagttaaaacatctttagcaaacatattcaaagttaatcgtcttctataatccaaattaaaattttcacttctcactttgaaatataaacattcttaaatggtcttgttaatcattactccgaccccaaaaaccattacaataaggtcaaaaccttataatgtcatctcatgctaatgtatatttgtacacaaatgttccttctcaatccaatgaatctctttttttactccacattggcaatccacaatagtagattaagagtttaaaagaagacattacatagacaactagacatgcattgccattactacaacacgttttcacatactaacttcgattccaaactaccacgaatgcaatttaccattgcttcttatttacaattttcttgagactccttcattttgaatccatgtcttctccttcctcgcatttatcaaaacacattaaaagcctgtttttagaattgccgacaaggaaaaaaaaactattctacactaagccacaaaaataacttaaaaccaaaataaaaacaaaaggaaagtgatgcttagattgcgatgtggtagggactcggtgagggttttggaagagcatgacaaaagatccgtgccattgatctctattaacacaccaaaagcttcttcttcttcttcctctcgtctctaaaaatccttcctttctttctgggttttctcgaatcttcatctctcattcaaacccacaagtccgatctcgcgatccaaacaccatg

SEQ ID NO: 15520 - DNA, 3 bp, Unknown
  misc_feature (1)..( 3): 2750-1469P.txt file - cDNA_ID_1008299; gDNA_ID_1591205; Annot_ID_150666
aaa

SEQ ID NO: 15521 - DNA, 3003 bp, Unknown
  misc_feature (1)..( 3003): 2750-1469P.txt file - cDNA_ID_1008621; gDNA_ID_1621128; Annot_ID_56418
ttgtttttgttcttcgatgcaaatctaggatggcaatgatggagaagaggtcaacaaggaagccgatgagcgtgatgagagacgtttaactgaattgggtagacgaactgtggagatatttattctttcccatatcttcaggtaacaatgtgtaatatgtttctatacggtatgccattgtgttcttccttgatgtgcttacatatattacttccatatctctgagaactgcagcactaaaatcgaagttgcacatcaagaagctatcgcgctaaaaaggcaggaagaacttattcgtgaggaagaggaagcgtggttggcagaaaccgaacagagggccaaaagaggagcagccgagcgagagaagaaatctaagaagaaacaggtgtgagactttcttctccttctgcttgtcctgtacaacttgttggatgctgatcggagtttctttggttcttgaatatttataggcgaaacagaaacggaacaaaaataaagggaaggacaaaaggaaggaagaaaaggtgagttttgcaacacatgcaaaggatctcgaggaaaaccaaaaccaaaaccaaaacgatgaggaagaaaaggattctgtcacggagaaagcacaatcttcagctgaaaagcctgatactcttggagatgtgtccgacatatctgattctgtggatggttcggctgacattcttcagcctgatttagaagatagggatagtagttctgttctttgggatactgatgccttggaaattcatcctccatcatcagaagggagcagtagaggaagaggcatttcgatatctacacccaatggaattacagaaggaaagagtcattccactatggatgatagttcttcaacttgttctaatgattctatccgatcgggggtaaccaatgggtcctaccaagggaattccttgaatttccgaaaccagaagtcgccgaacaagtaagtttgtttcggctgtcctttgtttcttgtcagtcctgaatccttagtgatacgctttgtgacttgcagaggaaagaaccaacaagtgaaagcaatgactgatgcccacagtttagcgagtgaaacagatgatcaaccctcaacacttggaacagaccccaagggtcagaattattcttccgaggcaagcaacgttggtgaatctgattgggttgttgtctcccacatccaggagccagagggttctcgaaatcgtattcctgttgggagggttcgtcattcatgcttttaatgttttgaaattagaagatcgctgattgaattattggtttcgtgcaaagaggtccagaatttcacaatttagttgtccctttttcaaattcattttgcaggaacgcaaaacggttcaatccattgtgaactcggtcgacatggatcgacctaaagagaaaagcactgctgtactttcttctcccagaaatgttgccaagaatccttcaccattaactcagacaaaaccggagaaaaagagcatttcaaccgcagacggtattccaaacaggaaagtactggcaactggaccaccttcatcaagccaagtagtgcttccttcagatattcagtcgcaaactgttggtctcagagctgatatgcaaaaactctctgctccaaaacaaccaccagcaacaactatatcaaggccttccagtgctccaataatccctgcgatgcgaccctccccaatcaccgtctcttcctcagttcaaacaacaacatcccttcctcgttcggttagctcagctggtcgtctaggtccagatccatccctacacaaccaacaaacatacactcctcaatcctataaaaacgctatagtcggtaactctcttggttcatcatcatctagtttcaaccaccacccaagctctcatggagttgtcccgaccacattgccatcatcatcttactcgcaagcaccaacatcatcttatcagtcaagcttcccttacagtcaagatgggctcttgtggacaggaagaagtcccagttctgtaaacatgggcatgtacaacaacacttactcacccgccgttactagcaacagatcgctgaaccacatggacgttcagatagcgcagcaacaagcacaaagcatgatgacggatgagttccctcacctagacatcatcaatgatctgctggaagacgaacagtgcagcaacatggtgtataacggaagcatattcaatccacaaccgcaagtgttcaacgggcagtactcatcataccatggtgagttattgtctggtggcaggaccaggagtttcggagaggaaggattgcattacatggcacgtggaccatatggtacagacggaatgatgccgagacagtggcaaatgacgaacatggacttgtcgttgccagcaatgaggagcaatggaatggaagatggaacatcatcagcagctaattaccatcacagttactttggtttggacgcttcgaatccaagttttacgtctggtattaatggctacaccgagttcaggccatcgaatggtcattgatcagcaaatggagagaggggatttgtaatgtttttattttttttaaaaaggaaaaaaaatcatgaatatacaatttgtgtaaagagagttgtcttcttgtcatcctctacgtttcaaatggtttttttttttttaaatatagtataagatagttttcgcatagaaaaactcttccctgaaagtccctgaatagtttttataaataaattatactcctctttatctttaatcaaaagaaactgaaatctgtctaatataaaatgtgtgtgtgtgtgtgtttttttgtctaatttatttttttctttctttgtctaatttgattagatcacttctttatttgaatgagtaaaaactagaaaaaaatgtgagccatttaaatctgattcatatcaaaaaattttcgatttaaaaaaaaaaccctcaaaaggtgttgatacggaaaaagaaaagggaaagaagaagagaatg

SEQ ID NO: 15522 - DNA, 3003 bp, Unknown; identical to SEQ ID NO: 15521
  misc_feature (1)..( 3003): 2750-1469P.txt file - cDNA_ID_1008621; gDNA_ID_1621128; Annot_ID_172404

SEQ ID NO: 15523 - DNA, 3000 bp, Unknown; identical to SEQ ID NO: 8989
  misc_feature (1)..( 3000): 2750-1469P.txt file - cDNA_ID_1008840; gDNA_ID_1971953; Annot_ID_58658

SEQ ID NO: 15524 - DNA, 3000 bp, Unknown; identical to SEQ ID NO: 8989
  misc_feature (1)..( 3000): 2750-1469P.txt file - cDNA_ID_1008840; gDNA_ID_1971953; Annot_ID_177402

SEQ ID NO: 15525 - DNA, 3000 bp, Unknown; identical to SEQ ID NO: 9096
  misc_feature (1)..( 3000): 2750-1469P.txt file - cDNA_ID_1008855; gDNA_ID_1971984; Annot_ID_177696

SEQ ID NO: 15526 - DNA, 3000 bp, Unknown; identical to SEQ ID NO: 1709
  misc_feature (1)..( 3000): 2750-1469P.txt file - cDNA_ID_1008901; gDNA_ID_1620437; Annot_ID_157062

SEQ ID NO: 15527 - DNA, 3003 bp, Unknown
  misc_feature (1)..( 3003): 2750-1469P.txt file - cDNA_ID_1008994; gDNA_ID_2214619; Annot_ID_135852
aaagtgtaaaacagattgtccactttcgtgtcaataacacaattatttgaaaacaccaatcaaacttgtcatggttttgcaagtccaaaagaccaaaaggccctattctttgtctacataaagctcacatgcatctctctctctctctctctcgttcataatgagatattaagatcaacaaaaggaaagaatggcaaaagctatggagctttgggtgggagagatgaagaagatgagtgagaagataaacactagaaatccattgatgcaaaggaagaattcaacatctgttgtgtccaaacaacaacaaggatcagaagaagaaagaggacttattaaccaaaagattagagagaaaaatgaagctgtaactatgtctgagctcactgtttgtcttctcatggaccgttttgttccttggtgatctttccatacccaactacttctagatctcttctttggtgatgtgtatatatatatctagaaactacatgtagtatgtctatatatcagattttgtttgtgcagaccatgtttttaagtttccttgtaaacctgtgaaagtaatgtgtttgagaaacatatttttattactttaatcaatagtgttcaattattattaaccgggatttatatgaagatggaactttctattcactctgtaattaggaacattcgcatcattcagtaagaaataaaacaagaaatgattataatttttctaataacgtaggaattctgagggaacccaaaactaaaatttgattgaaagattttgaagtggccaatcatgaatgagattgctggaagatatcatcaatattcaatacagataacgatttttttttttttttattgataccaaatgagctttcggcttttggcccagacggaaacaacggttacaaaaggtttgggctttgggctttgggcttttgatccacatgacgatcatatagttctttccttcaacacaaaacacttgaagtgtatcttatcaactaaactctattccagcaaaattatttcaaaattagatatatgggagaatttttacaggccattctagattttcattaacgctgtgatttatccgttaataagtacgattaagagtaaaacgacgtcgtttgcaattgaaacaaaaatccccaattcagaaataagaaaccctagatcctcaaatctcttcttcttttcttcttcgaattcactcctgtattttgaaatcaaagtgaattgcaaggcacaaagttcatgctttaaagcactgcaaatggcgaagtcatgatttatatggcatttttcctgtttttgtttcaattgcaaacgacgtcgttttgctcttaaacggtctcattaacggataaatcacatcttctaattgctctgtttattcagttgatgttgtgactaatttggctctgtcaacgaaagttagtgattttatctgaagtcaacacgtaattgatgattttaatcacaaagtacaaagtttatgtttaaagcaccacaaattgcgaagtcgtgatttaaatgacatttttcccgttctggttaaactaagtttctattatttaatatggatattgtggagcgtagtgtcagcactcagcagcttatttaacgtgatactctttaaccgagtaacaactagtgaggtcatattcaggaccgatccaacaatattgagggttttactccaagtaaaattttagttttatttttaattatcataaacgacataaatataatatggaaagatcacaaatactgattaaaaactaaaatcatcaaaacgaaaaagaaaaaagaaaaaattgggttcaactctcatgagttattaaacattttaggttttaggcttaaatctttaaaaaaaatcagaactgaaaaacgaaaaattctaattttattttggactctgattcatagcttatgtcgcttatgtagttatgctagggatgaatctgtatttcgttaccgtaatgagagttcgatactctcttacttgttacgattctggagcatgttacatttttttctttccgtcaacaacaactttaatatggtaaaacaaaatttatttttatttggctggtcctactcaagacaaatcttctgccgacatcacataatcatattaaaaaccataacttctgccactctgtttttttttttttttgtaaccattaactgattggattttgatccatctcatctgattttttagctcaacaatttacttgcacattttctatttggttttatttatacttagttacatatatgattatcgaactagtatctctttataattaagtatttttctatttttttttaatttagatttttgtgaattcatttacagtagaaaactgtaaaaccatatggtctaattatagaatgaaaacttcaacgaatccatacaacttattggctaaatataataaatctgcttgaagcatattgttattatttagttggatttgacgatctctgactttaatgtataccgacataccctatgatttagatgttgatttttcccattcttaatatatccatgttaagagattccaccataacatatctaattatttgcattgtaataaatattatcattaaaaaaaaatacaactggacagctggctcgtcccattgtttcttacgtccaccaattacatttgttaaagcaaacttattagaacgttcatgtgtgagaagttggtgtcgacatgtgtctaaggtctatgtcagaaatcggattagcttattaagtaaactatactatatcattgttaatatagataaaatatctagttcgtccaaattaaactattttcataactgccacgtggcgtaaacgtatccatcgagtcacttgtaatatctttataaccaaagtcttccaacacattcatcaccatctatctactctttactctcttctcttctcacatcaattattcatagttctctcttctccggcaagaaaagatg

SEQ ID NO: 15528 - DNA, 3003 bp, Unknown; identical to SEQ ID NO: 15527
  misc_feature (1)..( 3003): 2750-1469P.txt file - cDNA_ID_1008994; gDNA_ID_2214619; Annot_ID_187621

SEQ ID NO: 15529 - DNA, 3003 bp, Unknown
  misc_feature (1)..( 3003): 2750-1469P.txt file - cDNA_ID_1009030; gDNA_ID_2926226; Annot_ID_203516
gactcatttgatgctgttgcgactcatcgtccgtcatcagcgaatcatctaaatctgttattttcaagttttggtgtcgttttaaattgttatttttcataatacgtcgttttactcagacgttaccgttgctaccgctgccgcagcgtgaactaaaagaacatgctaattatcttttgaaatatcgaaactaaatgaaaggtacatgaatcaatggggctcttttagctccaattttccgctgaaactttgattatagcggtgatgggaaccagctgagtgacgctggttacaaccaatcgtttatagacacgtggagagttaggagtttgctttgtgcgacaggtttcctaccggcatgtgactctagagcctggccgcatataacattgaagcccgttaactcaataggcccaataatgttattttaagaaaagaggcccagaatcagctcaagagtacagacagtgtcaaagatttttctacaaactagactagagtctagtcactagactacaaattgcatacagctttagagtttgtaacatggaactcatgatcttagatcaattttgtagacaaatctacatgatgacaacagtgagtgtgagatgcctgaattacccgcggtcctcggctttattactgttaatacccgctctcacttcctctgcgttcttggctacttcaacaaatattagtctaccatctacaatctgacacaaacaaaataacccaatacaacttcaatacatttctaaagaagcaaaacaacgttattagtcacaatgagaggaacaaaatcgatatagcttcagaccctaattggcatttctacaatgaatttagagccctatggaacttatggatatgttaatgattcattacagaacaaatttcttaagctaatctcttattagcgtacattaaacaagaaagctagaaacctattgaagtgttgttaatggagaaattcaattgtatttttttactcaccttcccatctaagcttttcaatgcctttcgtgcatcatcttcagaatcgaaggtgataaagccgaatcctttaggtctctgtgtttctgaatctctaataagccgagctaaacaaccccacaaacacaaatttagttcataaccgagccttaaacaaattcaatttcaggtttttaccttctttgatttgaccaaaaggagagaacaattgcctcagagattgatctgtggtataagcagataaccctgcaagagaacaatttcagaaaccagagcaagtaaaaagagcaagagactaaaatcagaaagaagaaaccattctcgtactgcttacgaagagttgagctgagattctcttagccatctttaacagtaatccaaacggatttcggaaatgactcaaaaataaagcttttctaggttaaatgctcgagcggacgacgccgttttcagaagaaacacagatacccaacgaaacgacgacgtttttaaatgctgcgagaggctaattcaacaaccgattcatttgcagtgaagaagagataatttagcagacgtttcagcaaaagattttacttgatagatttgatttaagaaagaaatcggatccgatttgattaacatcgcaacaagaaaacgaaacagaaatcgatcaaagagtcaacaacaaccatcaaatctaaaaaaccctaattttacaaacatcgatttcaacaagatccacaattcaagagctagtaaacttagtcaccgccttagttccttcagaaacagcatgtttcgcaagctcaccaggaagaacaagtctaacagcagtctgaatctcccgagaagtaatcgtcggcttcttattatacctcgcgagcttcgacgattccgatgccaatttctcaaagatgtcgttgatgaaactgttcataatccccatagctttgcttgaaataccaatatctggatgaacttgtttcagaaccttgaagatgtagatcttgtacgtctcaacactcttcttcttcatcttcttcttcttatcgccgccggcaccggcttccttcgggagtttcttgccggcttttggtttcttctctgcaggagctttctcggcttttgatttctcctctactggtttcttctctgccggcttcttctctgcctttggtgccattttcttcacacgaaaaaagtttcaaagaaagattctgaattttagaagatggagtcgtgagatcaagttttgtgtttgttgtttagacgattcggtagctcatgtatatatatgaccatgaattagatacagattggttaattctcgtttcacgaggattgatgacgtggaatatattacgtaccgttagattagaataaatccgtcgttggcagtgaacggctaagcatctctcacctttttaaatgggccattaagcagcgaatcaaaattaatttcgagttttatcttttaacgggctaaaatgggcttaatacctaaataataatctgttagtcctagacgtgaatcagttaagagaatgccatcaatgttgatacaaagtccatgtttggttacaaatgggcctaattatgtatcaataatgggcctagttatgtatttataatgggcttagttatacatgaatctgtcccgtgaaagcgataaaagcgaaaaccctaaaaatagttccgtcttctgtttaatctctttttcaaggccaagcgagcaagagacgtcggagcggcggctactacttaggtttcaggttagtaatcgccggaatctccatctctcctctaatccgatgaactgctttattgttttgttggaacaccggcttagttaatctccccaatttgatgtttctccagagaatctagattccaatgtcattttcagagtgtgtaatttttagggaatcgaattcgttccctctgtagatgtttttatgtacatgtcaataagattcgtgaagctgttgatttatgtttttgcagtttttgaaattttgaagaatg

SEQ ID NO: 15530 - DNA, 3003 bp, Unknown
  misc_feature (1)..( 3003): 2750-1469P.txt file - cDNA_ID_1009053; gDNA_ID_2213640; Annot_ID_132241
ataggattttgttgaattagggcacatgatcttcagctatcgtctccaactgtggtttcttagatttcgaaacagagatccgatgaataaactctgccgccgagaactcttctatgtcttcaagattcagcttcggtccgatcagcctcacgtcatcattatcttcattttccggagacactctcctatgaccgcagtttttcgtgcgtttctttccggtgaggtagagcctagccatgtcggaagcgttggctgcagaagtggcacgtgtcatcggaaatgcgacgtacacatgacagcctccaagatcaagatcgtcgtcggcggcgagtgggataaatttacggcctactttcaccgacttggtgtcgacgaggaaatagcttggcatctccatcatgagctcggctgctttcgtcggcacgtggatgtcacgcactccaccgtcagggagaatcacttttgccaacggtgacgatgacgttttgtttagagcgcatgaaacgtagttgcccattgttattgtgttttttactagctatatcaagaaatcgaaagattttacgagtgaagttaaaattaattttggattttgagaagatggaagaagacaaacggaagcttaatatagaaaacgagtggaaattttatgcattataatagaaaataataatagtagtataaaatatagtgaagatggacagcgttgcagatagaggttgacattagatagttgaatccgcgtcttagcatataatatcattaagccgtgttttcagaaatctatggacattatttattttcagtttaacccgcataaaaaggtaatgattaagagatgataatgaagtcgatttcataatgttaaaactaaatttgacatttgtagtgttagtatacttggtttttctgatggtgtcgaatattacttcaaatattttgataaatttatggaaaaaaaattaacattattttcatctaaccaaaataatttggataataaaaagaatgcaaaaagtcaaaagctcaaaattattttcaattagaagaaagttatttttttaatgtgttgagtcaacgtagcttacccattttacacatcgtgaagagacggtgacagtattaataattttgttgtattaactaatataaagttccctaatatttaggggtccaaagtgtgaagggaaaggacgcacaaattattgtactacattattagtttaaccaaaatcaaatattatttatatagtattcgcttactcttccagttgttatcgcaaaatttaaatcacgtgtgggatccacggtcacttcttaagacacctgtgttttcggtttattgagttcaatgacgcgacggttccgttgtctatgggatcggactgttcttgttgcttcaaggcctaaccttttctttcagctaatgtatttcaaatttgattcctaaattcaaatttgaatgtaaacgggatacttgtgcttcttctactctaaagccatcatagctttttcataaatgaggacaaatttacccaaaacacctcctgttacaaattcgtataagtttgatactataattttttgtaaacaactcgtaagtcgtatataaaccatttaaacttcgcttgaaaaatcagagtaagctagtccaatttaaacgatatttaagcactagaatcataacggaaagatctttttatattgttagtgtaactaaaagatcttcttctagcgaaaattattatttcctttttatttcttgtatatttacaaaactctgaaacccgttagaggcttcaccaagattcaagcatcaaagccactatatatatatcactcacacttgttaattaattatcagtatttgtttcttcatcatgatgaaaccattttctctagtactcgttcttgtcctctcatcatctttagcaagtgcaaccgcatcctccttattctcgcctccacttccattttcgctctcttccatcttcggtgggattatcggtaacagtgataatagcgagttagctaggatgtgttttccagacctaggagacggagaagcctgcgtggcggaaatcttcggttcattctttagtcctcaaattacgataggaccagaatgttgcaaggccattgttgagatcgacgaagactgtgctcaagccatttttaaaccactcagcaattctttctttagtagttctgtcaagcagtattgcacttacatcaatagttgattgaattttctttaggtttactttagtgcttgttttgtttaatgtcttttatttgtttcttgttttctatgttttatcaacactcaacagtaacttcattttaataagtttaaacaaaattttgaattggaataatatttcaccgaaggtgttggtacgtgttccatcaatcaatgaataaaaaaaaataagccaataaaggaagaaaagttgaagaatcaaattcgcctttgctgaaagttgacaaagaatattacttttcttggagagcaagtgagataaagagaattcactaatactctacgtgtgcaaatacatatcttgaatcttctatggctttcatcagtacacaatttaagatttcgactaaaagaaaaccaaaatgtattcgctcacatcactttaaaatcatgttttcaatatcaagtatattaaataattcttttcaaactatatgaggttactgaaatgttatgcacacaaaagaaataaaaagacaaaactattcaaaagaaatgactagtcattaatactctcagtaacaaagaattttaagaaaagaagcgagagagagagacctagtagtttcaagaatctccccatagaagaaaaagacaatcattaaatatctcgaattctgtgtgcgccaataatattctccaaagtctaaaccatcaaaccggttattatatacatataaattagactaccgtaatcaatttctacttagagatcatcgagagggcaagagagaaaaatg

SEQ ID NO: 15531 - DNA, 395 bp, Unknown
  misc_feature (1)..( 395): 2750-1469P.txt file - cDNA_ID_1009053; gDNA_ID_1564175; Annot_ID_148984
cgactaaaagaaarccaaaatgtattcgstcacatcactttaaaatcatgttttcraymtcaagtatattmaatmattcttttcaaactatatgaggttactgaaatgttatgcachcaaaagaaataaaaagrcaaaactattyhhaaaagaaatgactagtcattaatactcggttgcaaaaaaaattaagaaaagaagcaagaaagagacctagtagtttcaagaatctccccatagaagaaaaagmcaatcattaaatatctcgaattctgtgtgcgccaataatattctccaaagtctaaaccatcaaaccggttattatatacatataaattagactaccgtaatcaatttccacttagagatcatcgagagggcaagagagaaaaatg

SEQ ID NO: 15532 - DNA, 3000 bp, Unknown; identical to SEQ ID NO: 939
  misc_feature (1)..( 3000): 2750-1469P.txt file - cDNA_ID_1009090; gDNA_ID_1620340; Annot_ID_153924

SEQ ID NO: 15533 - DNA, 3000 bp, Unknown
  misc_feature (1)..( 3000): 2750-1469P.txt file - cDNA_ID_1009158; gDNA_ID_1620756; Annot_ID_49888
taaaagaacatattcctattgtttaccttctaagagtttgaggaaattcattcctggaagacattttggctttgctgcacaaaaaacaaaacatgaatttaaagccttttagaatcgaaatcgtatgtgaaaataacaagtatgacctgaataaaatggtgacagtttaagaaacttacgattattttgtaaatcgagcatttggatcaacatgaaggagatgttgattccggccactgcaaaagggtactcccactttgcccggtcgcctctttgttttaacaatagcctccggaaacaaaccttcacaatttttatttgtataaacacattattttgtggagcaaagaagttcccaaaccatgattattaaaaaaagtttaagtatatatgaacatgtatttacgagtaatttaccggataagttcttgcagaaaatagtaaattttctagagcgataaatccgcaacccctacaaaacaaatgtttaacaaaacaggcgtcaacactaagtatttttccttaagatcttttttgcaataagttaagtatagatcaaatcttacctgaaatcggtagatggattgggaccttgccatcccatttctttccattgttctgttactaaacccgtgagatgaacattcggaaacgcgacgttccacaatgctttaagtgattcctgccattaatcacgcaaatatatttcacagaattcttatagctaaaacaatatatctgcatgttgtttgctcactgcgttaaacatcttactgataaagtgaattcacctacctgatgatcaggacgtgtctcgtcgaaaggtacaaccatacgatcttgcagcctttgaagtctttcctcctatgtatgattgatttacacagatccaaaagtgttacaaactatttataatgtcttgatttcattttatgaagatatatgaaacttgtgattatgctaacctgaagaggagacaaagtgtagtcgactgccttgtcttgacgtctattggagcgtgtgaagagccctcctatccatgatcttgttccaaccatacccgtagctgtaaccactggttcactaatagaaaattatattcatatatgagataatagatctaaattatgtatctaataaactaatcacatgcatatttctatggtgtgtcatttataccctatgatatatctagcaatatatactcactaaaacaaatatttagccaaatgagctattacgtgagcggaactacttgaccgctgccatcgcggctctttgttgcctttttctcgcctttcccacgcttcatcctcctctacctgcaaacgttttcagacatatgtttgcgtataacattagctgcagaacataaaaaaaaaaaaagatcaactctgaagatcagaaagtttgagtgagcttaattcacttacaagttacaaccaaaacgacactcaattacggtacattgaagattaaagaaacgggtggaatacacaagaacaatgtatatgcaagattgcagtggtgtcgttgattactctcaatttgatgataagattcaaatttgatatgagtttggagaagaagaagatgacgaagagatcattacttggcgatgagacgaacaagcaggaaagtattgcctacgcttcctgaacttcatgagatggacacaaatgttcaaagaatagaagataactaatattgatatcttttaaactaagagaacaaagatgtcaaaaccgacataaatgcatggaaagaaagaatttaggtataataatcctacatccaagttatctagtcatcaaaacagagattagttaatgattttgcaaaagctaagacttctctgtagagaattggacagaaagaaagaggaggaagatttttatacagagctaagttgatcacagataagttttagtgttttatttggttgcgtacaggtcagagcttattaatttttaaaaatagaaaaagcattgcgtgactattttaacacgtttaactaaactagacagaattgtgggttgttctgtataaattttgtatttgtatttttatttactcctttgagttaatttagagaatgacaagaagatgatagaatcaaaatgactaaatataaatgagctaaagttctaattcgatttctaaatattcaaaagttccatcatcatttccattttcacttagtcaaattttggtataattgggctcaaaaaggtttctctaaaagttgtagctaacataatagcgcaattaaaggatgttttcttttcataacttttatgtaaagtttaaaactttacaatgaaattacccttgaaaatataattagcaaacaatgatgatcaaatcaaatttcacaagcaaaaatcgttatgattgattaaaaagatgaggggggaaaaagttacctgttataggcatatgaacaagacaatggaggaggaggaggagatggtctagaaaccgtgacgacggaggaggaaaagaaaagagatgaagtagaagaagaaaataaaataaaatagaggcaaaaatggaaattttcattggaattttgcaacttttagaaattgtagaagatgaagagagctgtgtgatccaaaagtgtttttttttctctctcttttttcgtttttgttttctttctcccacctctccattgaccgttaagttgccgccttcttctctcttccaccaaattgttcttgacacatttggacggtccagattcattacagttcacctatcaacggtgatcagatcagttgagagttaacaaaacaatattaaagcccatctcaaggcccaataaacgagagatgaagaatctgaaactagtgatctgattggttgagggaaaaagctgtagcctggaagacacgtgtcactaacccaaaactaccttatcttctgtcgctcctcaattcggggaaaatcgaagacactgtgacactctagcaccttcagttccgtacaacaatg

SEQ ID NO: 15534 - DNA, 3000 bp, Unknown; identical to SEQ ID NO: 15533
  misc_feature (1)..( 3000): 2750-1469P.txt file - cDNA_ID_1009158; gDNA_ID_1620756; Annot_ID_166969

SEQ ID NO: 15535 - DNA, 3000 bp, Unknown; identical to SEQ ID NO: 13279
  misc_feature (1)..( 3000): 2750-1469P.txt file - cDNA_ID_1009169; gDNA_ID_2214611; Annot_ID_187385

SEQ ID NO: 15536 - DNA, 3003 bp, Unknown
  misc_feature (1)..( 3003): 2750-1469P.txt file - cDNA_ID_1009211; gDNA_ID_1620769; Annot_ID_167434
ccagcaaaatgaatgaaacaagggaaacaaaagtaccaataaactagcactcgtgaattaacatcatctgtctctttcaccattccagcttaattagtaactctaaaataatctaaattcctagtgaatcactacaagtgtaggaagagttaaattgacacaacggaacagtttttaacttccgactaatggccgggaaatactagtacgtcaatcgaatctaaaaactccgtctcctattcaccaaggatccaagcatccgataatcaaatccatttcggccaaacgaacaaaaccacaaaaatttgagatactaggaagaaattaacgaaggcgcgcacctgagattgccttgagaacagcttcttgaggcggaccttgatcggattgatcgttatggctgcaattaagccgagtagcccgctcgggaacagatgcaaaaccattgaaacatagactctttggcgccgggaacaaaccatggactggaactgatgctggagaaggagggagaaagaagcatctacgtgcgccggaagtccgtcgtgattccgatacgaaaacggaacgcaaaatcgttttgcaagccattttttgaagcttctctttggagatgagtcgaacgaaaaaaagacacaacgctgcgtttggttatttataaaatttctggcgttggcgagggataaggtaaagacagttatgcccataggtttttgtcttctgttaccattcgctttggggttattagagtctttcactaggcccatttgtgcaagcattttaattaaagttagcaagtgaatctaatctaatcattttaatcaaagttagcaagtgaatcgcacacgaaatcatcttaaagcgtgtttagttaagagtatgtattaaagtacgtaacaaaaagtacatagcatatagttgagaatacagaattgttgcaacgggaaattttctcctaccttctttagagtttcacttctcataggttattcttacaggaagtttcagcatctttctgtaaataagaaactcatagacatcgtgcaacacagataagaagaaaccaaaaaccgatatgaagagacaaaacatcctaataataaagtaaacaaataaatttgttggtactatagtcacaaacggttactcttcaacttggtaccaggaaatgtaactaggtgtttcagtgtgcaggcattatttcttacggaatgctcatcactactatggctttaggctttatctggcaggaggtggagggccaagggattttgccatgccaacccaagcaacaatcccacaagcgagaattatccaaccgcatacatcataagtgaattcagtgttcctcttcttcttcttactactctgctgcaaaagcaaggcaatttctcagagcaaccacgaaaacttataacccacatatgatatgagattctttcactctctgcttatgttcttctgaacatgctgctactagataataagaagatgacacttttcaaaacattggacagcatacttaaacacatgataacttacgctaacattagatgaagccattcctcctccacctcctcctcctcctccacctagtatttgctgtcccattccttgattcataaactgcatatgcagttccggggcctattcacatagacagacaaaaacatgagctcaaatgtaaaagaaatacagaagaagaagatggaataaaatgttctctccttgttattataacagcagcaattgtctccatgattaatgttataatttgcgtacacaaagattgactctgaaaatggaatgttgaaataatacctttagtgaggaatccaaggacttgcgatatgtgtcattacctggatcctgaaataatataatagtaagaagttggtctcacagcactcacaacaacataaaagtttcaaattcaaaagcataaaatctgaaaatgcacctcattttctgctctctggaaatattcagtggctttatcaaagtgctcttttgcttcttcaggatcgtgaacataaaacgcgtgggcggtgtacgcgttggcaatacaccaaagagcctgatgcttccctggatttattgtcaaggcctcttccaacttggaaatagcatctacatgatcaataatatttcgttacatttcagagcaaagatgaatttgaggcgtttattttaagacattaaagaagagatcataccatttaacatgagcttagcttcaggaataggctggaactgtgaaagttcaagtaaagctccaccccatttcagcagattctacagaaaataaaaatgttcgcaaaggtattcttaatatgaccacatatcaaaagaaactcaggaaaaaatgtaatttcagagaaacatataatcaatctcataacataaattataatatttccatcgaattcaagacctaaactacacatagtgacaatacattcacgaaatccatctccacaaaacatccttaatattcgttacatatcaggtccgatcatattaatcgaaatgaagcaatttcacaaattctgaggagaggggaggacaagtagaagaaagaaacctcggaatcaagaggatcgttcttgtactgagcctcagaatttttgcgagcatgttcgaacatgataagcctttcaaagtcggcggtagagaactccatcttcagattcaggtgaaagaaaatctagggttcggtgtttttgttactgagaaaagtctaaagagttgtctcgatgtgaaacaagttccgagggttttagcctacaagtcgggtgttaccagcacataattgggctttttaagcctacttatcaagataagtggcccagaaggcccatatgaacaaatagtactttaatacactagttcaactaatgtattcgccgattagggtttcttctgtttcactatatattaagtgtctccaactactgagatctctatcctctccgtcctctgttcttctcattggccgccatg

SEQ ID NO: 15537 - DNA, 3003 bp, Unknown
  misc_feature (1)..( 3003): 2750-1469P.txt file - cDNA_ID_1009222; gDNA_ID_2214519; Annot_ID_184564
caatattcttgacgaaagaattcaatcatatgaagaaaacaaaaatgcagttgattgtacctgagaggtaggaaatgatgcgtagatctttcaaccaaacagttggaagaacaatgagagcagttaagattccaaataaatgcttagagtcaagtcggaacccgagcaaatccaaggatgtaccagggaaaagcccggtaaggttatctccttccaaaatgatgaattcaacacaatatgactacagaaagtggacagcgaatctagtaagtttaaattatagagacagaaacaagctctagatccatgagtaaaattcggctacaaaaaatcttcacttacatatagttctgtgtacaatagcatctgcacaaaagacacataacattgcagaaaccataagcaactgaaaacagaacaactgatcaaaataatcaaaaggaagataaaatctatggaaccacttacacagataagaatacgaccatatttgccaaaagctgcttctccaatatcaggataagtgataatgccggtcttgttctcgaaacagtctttcattaaagtagcagtgtaacaacaaataacagcaaataagagaagaattaccatacttgcccaaccagcttctttcactgtataaggtgttgagagaagtccaactccagccattacattaatagctgcaaccaatatagagttacacatgttttcttaattaggccaagaatcataatcagtttttagttaccattgaaaatggtttgaatgacgctgcatccatagccaccaatgggcaattcctcagcaaatgagcctttatgagaccaagcagattgtgtagctgaggctttgtctgaatcatcatgcctctcaggaagcaaaggtgcttttgactcaacatctaaattacttctgctggctctatagaaactcggaggattactcctgagcgacccgaagattggtgatgccgcaatcgtataagaatcagtcgtttccctaaaagaaccacaaaacttgtcaatgtttcatcacaaaatctcaaataacaaaactttatgagatgggttacaaggaaagtttcgagctttacaattaattacctgaagctttgaggccattgaacctgggaaatgaaaggttcatcgatgtcgtcgtcacgatcaacagcatcaccaggaagatctccgagatcgctttgatcagtttcactgtcgttctcgtacttactgctgttgtcttctagatcttcgttatcttcgtcatcttcgaacgtaacgtcggtttttttctccttatcattgttcttgtcctccatatttcgaacaaacccaagtaagaatagatctagagagtatcaagaaccttagaggattaaatctcaccgaaaaaggaaaaaaaaagatcaaatctttatgattgattttggttacagagtgggttcgagaactttgcagagaggtggcaaaagactaataaggaaagctgagtgtctgagcacaaaatgtccgtttttttttaatcaagaattttactttttcgaggatttgtgtgatttgattgctcttgttctccgtctctctctgttcgcgagagttgattgcccctagttataaggcgggaaaatagtgacgtggcggtgatgatagagactagaggaaagagatcaaagttgagaagcaatgtttttagacttttgatcgacgacaagtgttgcgttgagatggttcgatatattgatccctcgtagggatgtgttgccgtagccgggatcactaggacttggaaagttatatgttctagtattctccaaaaatttaaaataaatattcaaaacatagaataatttataaatgcctagaatattaagaaatatataaagtttcaatattatggaaaaatcatgtttcttgtaaaatatataaaacggtttttagcctattgacaaaaagaattcataacgcttagttccaatgatatctattgacaaaaggaattcataacctttctctctttatttctttcacgtttaagatataaatggcgaatgataccatgaatgttgctggattcttaagcttattctaccttttttttttttcataggcttagtacttacttaaactcatttgttgttctaaatctaagtgtctcgcaagagtccaaagaaggagatgggagtgactcaaggtcgacgagggaatggggtgtaaatgtaatcgtgttagtgaacatagaaatacattatctctatgtggtgacatgtgaattttctccaagtgtcaaacttccatatgctcattaacaatccaataatttaagctttttgacaaaattgtattttttttggtcaattatctccaatgtggttttaaacaaagatatatattaaataaagatttacatgccttttccaccttgatattttgcaaatcatgagaatctcttccttttaatgttgccagttatataggttaaaaacatatttgcatttcaaaaggaatattaaaaaaacttaattgttctgctacattttggctttcaaaagtcatattgtgagtctaaaactattaaactgtaaacaaaggaaaataaaatagtatttatatgctatatgtaaaatatgaaatgaatagactcacactttttctctagatccttaagttaaactgtcacgcttccggtacgtggcttatcgatcaggaaatgccaagatactgatcccacctcacaagtcacaagtcacggtctccaaaatttatttctcaatattatccttcaaatttgttacgatatgcaaaaaaacaagaagaaggaagttatcacaatatgggtcaagctctcaataccggttcgtcctttctctttctcccccaaaatcacgtctttcattgatgttcacttcattaataaaattatcatttttttgtttggtatacttaattatggaacgaagcaaaaggtaaaggagaggtagacgcgaaagacttggaagctatg

SEQ ID NO: 15538 - DNA, 3003 bp, Unknown
  misc_feature (1)..( 3003): 2750-1469P.txt file - cDNA_ID_1009276; gDNA_ID_1620717; Annot_ID_49128
ttttcatacagacagtgcaagtttaacgaatcaaatatagccttttcattcataactaatgccgaatctaatctaaacgcacgatgatgcaaaatacaatcaaaaccccacgacttctttcaagaattatgaggccatttactttctcttttgtttttctttggtacgtaaatttacaaatgtgattgatttgcctactaaacgaatttttttttatctacccttatgtattctgatagtaaatgttcaaattcaatcttacttcttagaatcaaaaatgtgaagaataaaaaacctcatccacacgtgtgtcgcggtcgttaggattttccaacccaatgctactttttgagggtcaaaggtcaattgaacagctggaagaatcttagccgtcagatcagtccccaccgcacacgcgtatcacgctgacaggctggcgcctaaaatcattggccaagtcccacgtgtgaactaatcatcaacgtcgtcattagttttactacattggtctcgtcttcgtgtcgtattacgatcgagctgcttcacaattatgttcttatggacttatctatacaacaacccgaaacctataaatctttattgtcaaaaggaaatacacattacacactatacacgtacttatattggacccaaaagtggttaggttaaaagtgtttgtatcagttctagtaattactaaattagaatattggtatagttccgttttttttctttttctaaatgataattcaataattcatatcatccattgtatgtaatctgtaaaaagtacggacagaaattcattgatcagaaactttttttttttaataaccaaattttgtggcatcatcattaattccgaacacagagattgatatatcacacttacatatatagattagttggatgattgctatatcattgctattgaaaaattgcaaaaagttcttctaattcagatgatataaaatgtgactgtacatttacttattatttaataaagtcgaatttgtagttgaaaataaatacttgtaatcaagtggtttgtactactagtagtctagtacccacgtcgtatcataacttcattcaaatttgcaagtgtatgtgttggagactttgaattatatactaaaaataaataggcaaaaaataaactgaatttccaaaaattctttaaatgatttcgtacgtgtattattgcttgtgatctttgtttttgtttagatgattttagtgagacgagaaaaaaagagaagaagataaaaatgcatgacatcacatgtcagtggatccagagtattatttgatgacaatctagtcagattaggcattcggtgtttaatcaagtacttgtatatgatagctagctaatcattaagcaaaaaaatgagatccaatgactaattaatatatttgattagcgtgtttaatgaagatgacatataattataatacggtgttgggtgagatatactttgttactcgctttgtacatacaacaagtgtttgcattattttattcctcttgaatatattgaatattacggatgagtctgattgtttctcaatagttttggaatggcaataattttatcaggaaacaaaaaaaacgaaaaacaaggtgataacaaaaagaacaataggaatatgaatgaaaaaaacaaaaaagaacaagaaaaacagaaaatgataataagtaggaaccaagagaaacatagaaatagaacaaaatgattatggtaaatggtaacaaaaaaggtgaattaatatttaatataataattactaaataatcatttatttgaattttgtttattattttcatttaaaattaaagttctgtataaatttaaaataatttatattataaatttttcttcaaaacatttatttattttatagtaaaattttcaattatattacaaagttaaaataagtttcactttaaaacatttatttatactaatttaaaataaattcataacattcattaaattgaaagtttgataaatttttttatatatatcaatatatactaaagatatgtaaaatattatatttaaatataaatattatcataaaagctattttaaatttatttaataaataaaaacgaattttatttttttgttcctcttggttcctctacaattttgttctatcatttttttttttttgaggaatgatgaggaaaaatgtaagacccatatgtataaaaatggaacaaaaataccttgcaaatggtaaaaaaaactgaggaacaaagaggaatacaaactttcctactcattcttttcctaaaaaatggttatgaataggagccaataatttagtaatttacacaaatcgaatatttctatgcgtgagaggtgagacctaacaattcaattcaaatttgacattatttgggcctccttcttaagattcgcctacgtttgatcaatctaatttcatattgggctattaagagttattaaaggctcatatgaggcctgtaatgtttttttcgccgcattatcggaaaaacctcaagaagaagagtggtgacataacaaaaccccaaaagctcccaagcctagagattctgttgttgatccgattcccgctctccttctccggtagtacaatctccgtcgccggttacatcagccaggtaagagacattagtttttattttgtttcgaagtttcatctcttttctttccactttatccccttcaaggaatttgtgctagatctacgcttttaggtcgctggcatttgattgattttggaccaacaaaagctaatttaaatgttcatgaggtcttgagatttgatgattaggcttttattttgtcgagactgatgttaggtcgaactatgttgatttaggtttgggattcgatttgattttatggaattggattccttagatagatcctttatatgcatccgttaggtcctcttttaatttgtaattctaaactgtgtcttagggaagagttttaagagatg

SEQ ID NO: 15539 - DNA, 3003 bp, Unknown; identical to SEQ ID NO: 15538
  misc_feature (1)..( 3003): 2750-1469P.txt file - cDNA_ID_1009276; gDNA_ID_1620717; Annot_ID_165675

SEQ ID NO: 15540 - DNA, 3003 bp, Unknown; identical to SEQ ID NO: 15538
  misc_feature (1)..( 3003): 2750-1469P.txt file - cDNA_ID_1009276; gDNA_ID_2926188; Annot_ID_140906

SEQ ID NO: 15541 - DNA, 3003 bp, Unknown; identical to SEQ ID NO: 15538
  misc_feature (1)..( 3003): 2750-1469P.txt file - cDNA_ID_1009276; gDNA_ID_2926188; Annot_ID_200820

SEQ ID NO: 15542 - DNA, 1011 bp, Unknown; identical to SEQ ID NO: 537
  misc_feature (1)..( 1011): 2750-1469P.txt file - cDNA_ID_1009364; gDNA_ID_1591752; Annot_ID_151470
  misc_feature (886)..(886): n is a, c, g, or t

SEQ ID NO: 15543 - DNA, 3000 bp, Unknown; identical to SEQ ID NO: 2397
  misc_feature (1)..( 3000): 2750-1469P.txt file - cDNA_ID_1009364; gDNA_ID_1620530; Annot_ID_159709

SEQ ID NO: 15544 - DNA, 3003 bp, Unknown
  misc_feature (1)..( 3003): 2750-1469P.txt file - cDNA_ID_1009366; gDNA_ID_1620480; Annot_ID_158279
acacaatatttaccattgtttaacatgtacacatgtgtttataaatctccgtacactataatgcatatttgaaccatatatgacagaaagttttccactagttctaattacattttgttgccctttcctactcgtctattgcctatagaaatattattttagttatgattaagaattgggatgcacattccgaaattaattattaaatgccactatgaagaacccttgaacatagtctaattcaattttaagatcataaggaacattaacagtgacaatagctaaggtctctcgacaatgagacaatccgctttttaaatatatacatataagagataccatattgtatacatatgcagatacaattacaacttgaccaaatttattcaatttctccttctctttatatcaataagaaactattcatgatactggaccagcctgtttgaatcttgtcccatccacaaatctcccaatatataaataaagaaccttcacccgtaaaaccaaaaccatcaacaacttcaaagctttctaagcaagagattgagagaaatcggattttctttctaagactcaaaatatctaaaaacaataatggctttttggtctgctgagaatgctactaaagcctatcttagtacattgaaaacggtaagagtttattcttataaccaaaacatttacccgtgatattgtttcaaattacgataaaagattagttaatgtcacattttgacatatttctctatatgcattttcaggatcaaaggacaaaagaaccaaacgtcgccgaattcatatcagccctagccgccggaaatagcgctagaaagatagccgtggcttgcgccggagcagcaaacgccgacatactcgttgcactaatcgcagcggctaaccaaacgcgtggtcaagttgtatgcgttttacgtggtatcgaagaactaatcatatcccaaaaaatgttggaaccatcagagattcatcagatacaattcgtagtcggagaatctaacgacgacactctaatcaataatcatttcggagaagcagatttcgtcctcgtggattgtaacctcgaaaaccaccaagagatcgttggaaaaatccttaatcatcacgaagaaaacgcaagaaccgggggtggaagcggtgtggcggttgtggtgggttataacgcgttttcgagagggtcatggaggtttagcgatggaaggaaaacgcagtttttacctataggagaagggttacttgtgacgagggtcaatgataatcagaagatgatgatgaaaaatcaccatcgtgaccaagtgatgaggaagagtcgttgggtggtgaaggttgataagtgcactggagaggaacatgtgtttagggttagggttccccgaggagaagccattattgaagcttaaattcaaatcttatagattattgggtacgttagagcaaagatgatcacctctgtgatggttcagacgagtgaaagtagtaattaagaagatgattagttattttgtataagtaattatattaagagagttttgattggctttggagtattttgtgtggtgagaagagtgaaaaagtctatgtttttcgagtaaatgactttttttgtaagtgtaaatatgaaatgatgtgttttggtttaaacttctctctgattttggattttttttttttttttttttgtcttttcttgagcatatgtacacgcattgttattcttcagattttggatgtttagcaaataagatattcaaaaaatgcacatgcatgcatgagagatggcatctgaaactaatataatgaaacattaaagtaagcatatgtatttagctgtcttatacagattctcaaaatagatgtagacgtatattattgagaattgacaaaaaaaaacgtatattattgagttgttgagtctaattttttttgttgacactatttaaaaccgacaagcacgtcaaacagatattagtaatagtatatagggtcttcagacatgtattcgtttgccttaaaattgtattttaaaaagatcttcttctttttttcatcaccgttacctttattataaaaccaagaagattaatatatagtgaaatccgtaaagacgaaaaattaacgtagttcttatattgaagatgaactaccaaaatctaattaattcttatgtgattttgttaatcattgtcttggaattcactatataatgaagttcatcatctctaaggaatggttttactttggtccgattctttcgacttttggtcgttccatttctcattgaatcaaatctatgcccaaaggtaaaacataatcttctacagtacttttagatatatgatccaaattctcatcgacctaaacttataagtcattgaattcaactaggcttgtgcacatagctgggaggcaccaaataaactccttcttcgaagtagacaactcgtaatgaatgtatattatttttatcaaccgacatctccgttaagaaaatagataacaatttgaagagaagagtcgttgttgacaatgatccgttcattaatataaagcattgtcacaatctctatatgtcccataaccttcccctatccccatgaatgaccacccccatctcttccttatccatcatctcccacacctcatcactctcaaagacaacgacatttttcacccataaatatatttacataacaaaatttattcgaaacaacattaatcaacaaccaaacattacattcacacaaagtaacaaaaaaggttcaagggaaatggaccaccagagagacttatctgatctcaatagtttagtgggcttatgttttaatgtagtatgggcttttttaacgaagcccattttgtcaaaagccttgtagtgttcttcatcagtaaacgtaacaaatcattcctctgagaaaccctaagaaaaaccctgcctgaaaatctctgttttttttgacgattctttctttgtgatcggaaaaaatg

SEQ ID NO: 15545 - DNA, 3000 bp, Unknown; identical to SEQ ID NO: 6126
  misc_feature (1)..( 3000): 2750-1469P.txt file - cDNA_ID_1009437; gDNA_ID_2926131; Annot_ID_196945

SEQ ID NO: 15546 - DNA, 3000 bp, Unknown; identical to SEQ ID NO: 6126
  misc_feature (1)..( 3000): 2750-1469P.txt file - cDNA_ID_1009437; gDNA_ID_2926131; Annot_ID_138761

SEQ ID NO: 15547 - DNA, 3000 bp, Unknown; identical to SEQ ID NO: 6126
  misc_feature (1)..( 3000): 2750-1469P.txt file - cDNA_ID_1009437; gDNA_ID_1620847; Annot_ID_50946

SEQ ID NO: 15548 - DNA, 3000 bp, Unknown; identical to SEQ ID NO: 6126
  misc_feature (1)..( 3000): 2750-1469P.txt file - cDNA_ID_1009437; gDNA_ID_1620847; Annot_ID_170240

SEQ ID NO: 15549 - DNA, 123 bp, Unknown; identical to SEQ ID NO: 106
  misc_feature (1)..( 123): 2750-1469P.txt file - cDNA_ID_1009520; gDNA_ID_2689; Annot_ID_145859

SEQ ID NO: 15550 - DNA, 3003 bp, Unknown
  misc_feature (1)..( 3003): 2750-1469P.txt file - cDNA_ID_1009528; gDNA_ID_2214576; Annot_ID_135179
gcacaattaagtacacgatattaatcttctagctgcaaatctcattaatttcccatcaatccaatgcaggttgaatatgtattaatggagagaaagcaggaagatgcatataaagaagccatagaggagtatcgtgctgcttctcaagcacggcttgtgaagctttcatcaaaatccttgaattctttagccaaggcacttccaaagcgtcaaatttcaaactattttactcaattccggaaggtaattctcagctactaatacaaagccccttttgtgccaaatgagtgtgttattcatgtgttattaaattttggttgtacagattgcaaaccatccattgttaattaggcggatatacagcgatgaggatgtcattcgcatcgccaggaaattgcacccaatcggtgcatttggatttgaatgttccttggatagagttatcgaggaagttaagggtttcaacgatttccgtatccaccaggtaaatgtttctctttccaaaagcagttgaatatccattaacaaacatgttatgcaattgaagaagctaactaacttgtttctttccatagcttttgttccaatatggagttaacgataccaaaggaactctctcagacaaacatgtcatgctctcagcaaaatgtcgggtacgtgatattcttcttcatttcataagtcttctttgtgaaactgattaagtataactaaacctgtgagcgatctaaatctccctttatgtatcagacattagctgagcttctcccttcaatgaagaaatccggccatcgtgttctaatatttagtcaatggacatcgatgctcgatatcttagaatggacacttgatgtcatcggcgttacataccgaagacttgacggcaggtaataaaagaaaaaagagtaatttgtcacatttttgacgattctacaaaaaggaagaagcttaagtcattttccttttgttttcaacagtactcaagttacagatagacaaaccatagtcgacacattcaacaacgataagtcgatattcgcatgtctcttgtcaactcgagcaggtggacaaggtcttaatttaaccggagcggatacagtcattattcacgatatggattttaatccacagattgatcggcaagctgaagatcgttgccatcgtattggtcaaacaaaaccagtcactatcttcaggtttgagctttaaatccttgaatcagtttagataactttcagaacaaaattgtggtttggattggtttatgtgtgctctgttttgtattctcacatatatctgtattaactctggcaatgctggtgcagactggtgacgaaatcgacggttgatgagaacatctacgagatagcgaagcggaaactagttcttgatgcggcggttctagagtccggagttcacgtagatgacaacggagacacgcctgagaaaaccatgggagagattcttgcttctcttctcatgggataacattattgttaccttttttgttttgaggtaaaattagtcaagaaacgaagttaatgtgttattctaaacatgtgtaaccactagctattattagacttaaatttaatagatcacgatagttatattttcttctacgcatgtaaattataacccaaaaatttccttctttagacctaaaagtcacaattgttccaaacactaaaatgtggatcagtgatcaaatgaagtgaaccttcaggatagtttagtcttcgatcatcaaagattgtataaaggagtgacttagctgtatttgtaggtatcaaaattgaaaacctcacgcaatgattaaaggtctcaagtatctttattcgtcagagttgtataagacacaaatctcactagattgttttcccattgtctttgccgaaacctaacaatgaacaactagttctattaggattggttcaagaatgtcacatagtataagtttttcttagctgaaaaattctagataacttggaataaattctagatagtcttttttttttgctacatttgaagataaatatctatgaaaatgttcaaattcatgattatattattgcgattaaataattgaatatgactatacaaaataattcactagtaaatcaaagccatactaagtttggattctttgtggtaactgccattgccaagtcacgttttgaaggtgttctcatggtcaatttacacttaaaattgaacctgaaaactaaggccaaccggaaacttgttgaattgtgtgaagtgagaaaatgataatcgtgtataacttataaagtcacatgataaagagaaagcaaccagctttttgtctgccataacagttctttaaaatatagccacaattatactacttaatttagagtaactaatcccaaatattacttatctaagtaataattagaaaagtattcgatatttattatcaattgcgttttaacttgctatataaatacaaagtttaatttttatataacccactaactttttcattttggtatatgataaaaatactctatcccgtgactattccacttgttgttactttttagttttttttttacatagccattatcattgtggactccacaacatccgcaaactcaattatttacttttctatacgtttatttgtttttttctgatacaaaatttggtgcatgaatgacttctcgaaacggtagatggactccacaacatctgcgtgtcttgtcaccttacgttacggaccacaatttacacctatgaaagtgtcggtaaagcaaataaaatcgagaaactcacaccactcttattcaaatccaaagtgaatactccaaaaataaagtaaatgatatttatccaaaaatatctaacaaacgcgtaaaatgtgaattatcttgaacgttttaatacctctttactctctttatatagtgccattttcctcactagcagcaacacacttgaacactactttcgaactctctctttatctctcttgcaatg

SEQ ID NO: 15551 - DNA, 3003 bp, Unknown
  misc_feature (1)..( 3003): 2750-1469P.txt file - cDNA_ID_1009643; gDNA_ID_1620448; Annot_ID_157366
aaccaagatgatccactgtgttcactactgcctttgctgcatactctttcaacgtctctatcactctgcaatcattcatcaaaatcactcgccacaacaaacacatggactagttcaaaaatactatcgttagtatcaagaaagacaagtaagattacgtttctttgtgttctgctttgccataagatgtttcgaagtactcagctgctgagtataactgtttccgcagattctttaaatccttaaaacaccaaaacagaacagaagatgaatcttgaatgaagacaaaaaatcacaattgcctattgatcaatctatgtttgaggagagaaagagatagagagaacgatcatacaaaccttgagggtttctgagaattgaagagtttgcttcatgaagagttcgtcatgattggaagattgatgaagaactatcgctaaagatgtagagctcgccattaatgagatgagggaaagagagagaagaagataatggagtaagtaagaaagatccaagtggagacactatacacacatactcgacacattccatacgttctttacaagccaattattttcttttaaatgttagtaactaataataccaaattacatttcattaaagactgaaaaataatatattaaatttattacgaggatttaaaaattgaaaaaagcagtcgacaaatcaaaacataatgacccggaatattgtatttagagcacacttttcaattatcaaaatgctttttaagaaattaatttataagttattaatgattccatcaattattaaatacacaagtcaagaaaaaatcggaagaaagatttgtagttggaaaattaatggagcagaaagtagagaagaagaattatttaacattttgttaattaaagagaaaacaacttctcaacaattttgatattcttgtccctctttcttgaataaaaaaaataatacacataatatatttacaagcagtgggacacaagaatcaaaattcaatcacggactcatttaatggagttgcctttatgagccagaaatcattcatgtgaccataacatataagttgcattataaccagacgacaaaagaaagaaaggacagagctaaattatctgatgaatcaaatcaactgtttgggaaaatactagtgatgactgaggcgtgtaagtcaaacaatggtaacacttgaatgggatttacaagatacgctcgagctctctggtgtaactgagagtctggttgatgagttgaagtgacggtatctccttgcacggtgcggtttctctggttttttggaagacaactaacccgtctttaacttcccactccgggtgctcctcgttcacatatgttaacagttgttgatcagacgagaagagtaacatcttacaaccttcactgattgagagatgatcgtatgctttctcactgcatccagctatttcatctctacagataaacaatgatgttttaagtcacggcaatgagctaaagaagagaaagggtcaaatgacaaatgaagcctatttacctaatggtttttgccaagagatccatgaaatagacgtaagtctcatcaggtgcggtttgtctagcactcaacacacggttataagcaccttccatgaaggattgctcgagctccaccgcatgcttgatgcaaggattctccaaggttgcagatgaaagtaatcccagttctgtgtggaattcagctattctgttctgaacaagcagtctcagtaggttcaaccccatgattagattctcttgcggagatggcggaatacgattcctggtacatagaaaaaacagagcacacgtaagcaaaagcaatgcattcagtgagagtgatataagataatgatcaaacaactctaaatcaattggttcaacttaggctctctactcattaataaatcaaatctatattaaactttgacattgatatattcaaggttttatctattgatccgcattgaattagggctaaaaggaaacagtaccttaagctgagacaagagactggaacaggtatcgaaatcttttattataaacgcagctttaaacctctcgaactgctgtgaaacctccattagttgcggatccatctctttctctatgaatttttctctgtcaaactggcttcaggaagaagaagaattgaagaataagattgccttttctaattgggccgtacatgggcctgttgaatcagtaattgaatgggcttaaagtggggaatgtaacccaatagaagcttccggggaattttaatacgtgttatacagagtcgaaaacttgatgctgacacactcactgtctttctcgtcaacgcgtttttggtgtttggtccacaatccttagcctctaagacaaatcaacccaaattttcaaaacataaaattaattagttttgaaaaaaacaatattttaaaattagatatttgttactatcggcacaaataaatctcctctcaaaagtctgccacgtcataattgcaattgttccgcgtctctgctgctacatgctcattcactcgcaaatcgcaattttcttcttaaccaaatttttatacaaaaaaaaaagctcagacagaagtactaaatggtaaatttgacataattaattggtgtgtaattttataaatacagaagtacttgtgtcttgtatttattagtattccttatttaataaattacttttcacttaatcatccaactttgtcagattcacacgcaaccttgaaaaaataaaatagaatggtattgtgactttcgtggaaatttctacttagatgacacagttgctccaattaaaagcttacaactttttcttcatctttctttatatttctcacccatttttcaccaatttctctccacttaaaaccaaccccaattctcaccaaaaatcgcaaaaaagatttcaactttcgataaacccagatcgaaaaatcagatttttccagatcaatcagagagttagagatg

SEQ ID NO: 15552 - DNA, 3000 bp, Unknown; identical to SEQ ID NO: 12033
  misc_feature (1)..( 3000): 2750-1469P.txt file - cDNA_ID_1009988; gDNA_ID_2214528; Annot_ID_134225

SEQ ID NO: 15553 - DNA, 3000 bp, Unknown; identical to SEQ ID NO: 12033
  misc_feature (1)..( 3000): 2750-1469P.txt file - cDNA_ID_1009988; gDNA_ID_2214528; Annot_ID_184841

SEQ ID NO: 15554 - DNA, 529 bp, Unknown; identical to SEQ ID NO: 291
  misc_feature (1)..( 529): 2750-1469P.txt file - cDNA_ID_1009988; gDNA_ID_1563421; Annot_ID_147652
  misc_feature (256)..(256): n is a, c, g, or t

SEQ ID NO: 15555 - DNA, 3003 bp, Unknown
  misc_feature (1)..( 3003): 2750-1469P.txt file - cDNA_ID_1010051; gDNA_ID_1972177; Annot_ID_180044
gtagtgcgtttctttttccctattcatgaatttgtcttttgcttatttcaattgtgcattgatttggtttcaatttgttatggcattggctaaagcttgattctttatgattggttctgttgtgctactttgctccactcattggataaaacattaatgacttgttttcctcgtctgctgtttattcatagtgatgaatttgttatggtaccaatatttacattgcattgaaacttttatctctctgattgcagtgaaggtggcttttttaatgcaattatgtcgtttccggagaattatccagtttcaccaccaactgtgacgtttacctcggagatgtggcatcctaatggtgactgatttttctggaaaatatatctctttctcgagcttttaggatttagtcttctgatgatttatactcttttgactgcagtttattctgatggaaaagtttgcatttctattcttcatcctcctggtgatgatcctcatggatacgagcttgcctctgaacgttggacccctgtccatacggtatgttttttcttttaccgtttagcttcagtactctggtaatttgtttgcagggttgagttatctatggcttcgaatatcttggggtctgctttatagcctaacattcttcgaatacagctagctttctcttgtgtagatagcttgtagaaacagacatgttttgttcgatattgagcttatacagtgattgcttttcaaatgttcgtggaatttataagtcaggacttaggaatactctggaggatagtgcaacttagattgaacctctgtcgttagggtgcttgagtggaatatgattcactttctgatttatctgccctgtaccacctcttaatcgatagtgttcttattagatcatgaggaaagaaactagaggtacattgaagctaatgttgggtctgtgtatgatatgcaggtagaaagcattgtgttgagtatcatatcgatgctctcaggtcccaacgatgagtcaccagcgaatgtggaagctgcaaaggaatggagagacaacagagcagagtttaggaagaaagtgagtcgctgtgtgagaagatcgcaagagatgctatgaacatctctccagcgtttttttcgtgttgtagaaatatcgattctaatcttcttatgagaaagcctaagcagaaccaaccatcttcaagcagcagccagatgaatctgactttgcaaaagcttctctttctttttcctttttgggttttgttctctaaggtttggtttggaatattggtgtggaatcaaatccgctccatattttaggattatattattgcactcgttaatggattcgtttgatctggctttttaactttattctggttttgggttacaaaatacttgcctcgttaattatctcaaatttaactgatggtggtttaactgcaaaaggccagaagttcgaaaagagtattgttattcagttggtatgcaacaaaaaattgtggttaatggtttcaactgatgttgccgcggtcataagaaacaaaacaaaaaatattccttgaagattgcggggtctagcacacgagctcacacataaaataagataagagcaacgagaagattatatttttaaatgtcctaaccatatataatttaacaattaagggatcaatcataaatttattcgtatttcagttacatgactggttaattatagcccaaattttttacaattaactattattatattcatatgctaggtttctttcttactcattattggtccactcacatcttccccaaacaattgtatttaagtttttttcttcgaaagttatcacttttagttagatccgcaaaatcgtggatctccaaagctaaaacgaaaaaaaagaaaaatagtctataagtaaaacatgataccgaacaaaacaagagtatataacttatagactataagtaaacaattaaaacaataaagaaccaaaatatgtgaaccaaattaaaattagtgttaaattttgttttggttattctcgtgaaaaggaggaatagctcgaacgtcattttcacactttctttaacgactccactccagcattaattacccaaacagttctgttgcaaaaacatttaaagagagaccagcaaaagttttgagttattgtctcttttgtgtgtacctaatccattttttttttttttaaagaagtaatattacggagtatattgctttcttaatgatatgtcagaaatgtcccgtgtaagtaatatgaaaaccggttttcaaatcaaagtgcactttctctagctcacctgtgtttggtcgaactcgaatccctctgaccactactaacgtaaaaaagctcattgcattaatgtttcgaccgtttcatcgtttattatactgtcttaaattaaaatcattaagcatttaattgatttgtcatttcgaaatttatgttgacaaaaatgactttacgatcaaaccggtttgattaagtaacgtagactaatgctattatggtgatatatatgcaaaagataagaatagtttatcaacgaaaggatctataaattatgcttgttcgacttcttagcatagaaaattggtaatttatttacacctcatgccgttaaaaaatcacaatcacaagtattcataacctaaaattcaacaaagaaatcaattacgtattcttcatttttccacattaaaccagaatcttaaaccaaaccaatccaaaaaagcgacatttaaaccaatccggttatcaaactatctctctctcactcacacacctttctcttttcgcatcactttccctctcattcttctttcttatctctctctctctctttctctgactctctccttgatgcctcgtgactgcaaccaaagcaatttaaaaccgccgcacttctcatgagtcttcttcctcatcatcatcatcatcaccgttaactgtaatttatcttctccgatcttcattctccgccatg

SEQ ID NO: 15556 - DNA, 3000 bp, Unknown; identical to SEQ ID NO: 12760
  misc_feature (1)..( 3000): 2750-1469P.txt file - cDNA_ID_1010079; gDNA_ID_2214570; Annot_ID_135044

SEQ ID NO: 15557 - DNA, 3000 bp, Unknown; identical to SEQ ID NO: 12760
  misc_feature (1)..( 3000): 2750-1469P.txt file - cDNA_ID_1010079; gDNA_ID_2214570; Annot_ID_186139

SEQ ID NO: 15558 - DNA, 3003 bp, Unknown
  misc_feature (1)..( 3003): 2750-1469P.txt file - cDNA_ID_1010115; gDNA_ID_2214654; Annot_ID_188731
aatattttctccacggttgatctctcaggtaccatcctcggccatgcttccctctggctgctccaatacctgctcaaaaacaccaccaacgagttgagatatgactcagctaaagatttttgtaaagaaaatgaaattcaagattgattgatttactgcggcgtgcatcgtcctctgtgtctggtgtagatgaaaccaggcctcgtcgccgatgaatctccggcaaagaagcagaggaggaagaaggtgaccagaacgagtcgactcggagaacaaagtgtgtccatgatatgcatatggttaaaacagcattaattaatcagcccttggtcttgggactcttgggtcttcattaaatcgctatcaagaatctgagtttgcttgagttatcggtctcctctagttgcctattgctattacctcggaaaaagagacatactttgacgcttttacccttagaattcaaattaacgtgatctttttgtcaaagtggatagagtgaatataattattagggggatataaacgtcatttttgaaacgcacatgagtttgtctgaatctgctgctaaatacgtattctttttattatttttgctgcatgtcatcgtcagtcctcacgtgagctacgcacggcgcaccatgtgcccacaaggccacaagaggtccgaacgattttaatcctaaaccagtacaacgctattttgtattaagaaagtcacataattttaacagattagtttcgtcagtcgattatgattccaactttgttaatttttcatgtttttaatgggccttttcttatagtcatgccctacgaggatttttccagttccagcccaaattttgcccatgccaatgtcatgtagagcagtttcgttgttataatatatatgacccccacgttgcctatcaatgccagactatattcgactatatacacgtatccacatcattttaaatacagaaaaatgtaaagatattcatgaaccatgaccagctaacattttcaagttgtttttgttgttgtgtaatctaactggtgaaccatgagtttgtatactatatacgatatatattgccctacaaatctcttatgatcttatcggatgtgggatacaattctatatatatatatacattttgtcaaccttcttatagtattgttttgcatttcttaattataaacattatcgtaaaatgtagactaagttgttaaaaacaatggatcaacttcttttgcaagtcacgcatacatgtcgtcttaaatctctccttaaaatctttctatataatacctaaagggttagctctagcacaagcacacacagagagatagagaaaaatataacaaattttaagccatgtcctcgtcactattctcttatgttgtcctcttaatcttccttttcaccatcccatacattcaaagccagcccactgctccagctccaaccactgaaaaaagtcccatcaatctcacagcgattcttgaagctggtcaccaatttaccacattaatacaactcctcaacacaactcaagtcgggtttcaggtaagtgtacaactcaatagctctgaccaagggatgactatatttgccccaacagataacgcattcaacaagcttaaacccggaaccctaaacagtctgacatatcaacaacaaatccagctcatgctctaccatatcattccaaaatactactctctaagcgatcttctcttagcaagtaatcccgttagaactcaggctacgggacaagacggaggtgtttttgggttaaatttcacaggacaagcacaaagcaaccaagtgaatgtttccaccggtgttgttgagactcggatcaataatgcattaaggcaacagtttcctctagcagtttacgtggtggacagtgtgttgttgccggaggagttattcggaacaaagaccactcccaccggagctcctgccccgaaatcctcaacttcatcgtctgatgccgattctccagctgctgatgatgagcacaaatctgccggatcaagcgtgaagaggacaagtctagggattgttgttagctttgcattgttttgttgctcggttatatatattgcttgaacctttaactaaaagcgagggaaacgttcccgaaaaacaaacatttatttgcatgattgatttgattcatctatgccttgatatttcttttttgaaatttcctttataaaaatacatgtattatttttttgaatttaaatacatgtattattaaatgatgaccaattttgaaccaaagtaagttatcaacaaaataaccacatcatctatatctcactttatataagttaagaaatttcatttaggtttagtagtaaatcatcaagaagtttagagcctttgcagtttgcaacaaaatatgggtttgaaagttacatttttgaaaagtgataataattaatctactatctattaatcaaaatgagaattatttcttttgtatagaaagtaaggaaatgtcaaatatggccgtttatatattaagaaaaataaataaaaatcgtttactaaaaaaaaaatatattaagaaaaataaataaattagtgaattcactaatgggcctgaatacaaattttgggcccaaagatctctagtaacagaaaatgcgtgatcgaccaaagcgtcaacaaaatcctgatttctgagctttaaaccctaacccctctcttctctcttctccacgccatttccagaattttcaggtacttcctctcgccattttcattatagatcgaattcttagtttaagcgagtaaagcttcagattcttcggcttcaattttgtgatctaagtttttgtttcgtttcagctaatttgcagattatctttgtctctttttcgttgatccaagttttccttgggtctaatctacaaacgcatttcgtttctctatttatctgtttctgccttggattttgattgggttccaaatttgcaggtgttcgtgaaaagatg

SEQ ID NO: 15559 - DNA, 3003 bp, Unknown; identical to SEQ ID NO: 15558
  misc_feature (1)..( 3003): 2750-1469P.txt file - cDNA_ID_1010115; gDNA_ID_2214654; Annot_ID_136482

SEQ ID NO: 15560 - DNA, 3003 bp, Unknown
  misc_feature (1)..( 3003): 2750-1469P.txt file - cDNA_ID_1010209; gDNA_ID_1621133; Annot_ID_56495
tttccaagagttgaagaaaatcacagaaagccttagcacagagaagagagattgaagaagtcatggatgtttcaggaagcttgaattgcgttgttgtggcggtagatggaagcgaggtgagtatggaagctctgaggtgggctctagacaacctcaagctctcttcgtcttcttccgattcatcattcgtcgtgctccacgtccagccgtcgccttctgtagccgccggcgtgagtcccggcaccatacctttcggtggtcccagttgagtctcgttactactaattttgtgattgtttaatgtatatatgatctcgaccatgtggtgtttgactctgggaattttgcgattaaggtggtcttgaggttcctgctttcactgctgcaatcgagcaacaccagaagcggatcaccgacaccatcctcgaacacgctagtcaaatttgtgctgaaaaatctgtgagtagagttatttcccttgtgtcccctgtgagaatgggatattttacctcatagtccagatctagtagtgtaattctataagttttatggattagaatatttctctttcactgatggattagaatctggagcaattacttatgtgttatctatagaagtgtatattgatttgagggtggtcattcatgaccaagttgtgatggtttactctcaggtgaatgtgaaaacacaagtggttattggggatcccaagtataaaatctgcgaagctgtagagaatttgcatgctgatcttcttgtcatgggctcccgggcttatggccgcattaagaggtaccaaactcttcttccagtactctagtatcttgctatgttgaacactgatgaaagcgctgtaaatcaaattccaggcgtttgatcttggttactatgctgaattagttgttccatatcggtttactctagtttaagattgtttcgctttcgcttgaaatggcatatagatatctactgttatttttttcaactcgtgcggtcaaataacagaagaaatgtttagttaatctttgaacttgtgtgaagacaaatctctgctcaaccaccaagtagtgcttcgaggaatctttatccctttgaaaatgtttataccatatcactgtcactgtgtgttctttagtgagttaaatcttatttagtgagcaaatgccagtgttgaatccagtttgttctttctttcaacagaatgtttctgggaagtgtaagcaactactgcaccaaccacgcccattgtcctgttgtgataatcaaaccaaaagaggattcttctgcataaagaggtaaacaagtttagcttcttgcaagtcacttcattcgatgttcaccatgcaaaagtttgttaagtcatcaatcagaacccacatgatctacttttcatatccaaaccaacctcaataaagtttactactctcttttggtacaagtagcctatgtaaccgagtatcaaaccatcttcacttctcaggatatatatgtacatatgcaaagggatatcaagaccatctgtaatcttttgaagttttgtgaagctatagaagccaagcaagaattctaccagattacttcccaaataagtggtgtgaatgtaaattaataagagctacagaaacattgattggctcagtgtatgtgttgtattcatattcgttgttttattttatacggttgagaattgaataatgttgttgcatcaaatcactatgaaggacatttacagagccaactggttgacaatgtgggctaactcaccctcgttgatatgttaattggaccgcaggcatggataagtagttgagagaaacaaagaattcgtgtaagaaaaatctgaaccgatcaatcaagcctcgcctaaaggtccaagattttcttgggacttttggcctgcccttagtgatcatttttccatattatgggccaaaaaaaaaaaattgcaatatctgctacacttaaatctttgaaacaaaacttatccaaattgcttggaatttagttggatgtagatgtaaatgtatattctactgtagcgacaaaaggtaaaagaaagattatgacaattttcaggatataaatattatgacaattgtagatgtaagtatttcagaggtctcgtgaacgaacaatgagagtaaatgacgaaagaggcatcgtcggtttgtcactgtcaacacgataagggaggctcacgagtcacggacttaaaaatattaaacactgttctttttcattagagcaccaagatttttatcttagcattgtaccaagataagtgttaaaatttaacatcaagaccctacaaaatttaaattgcgaatcttgagaaacaagacgtattatgaaatgtatagttcacttgtcccaacccaaaaataaaagaaagaagaaaccaaataacagactgttatagtttgtcctggttttggcagcacaattatttggttttgttttttttaatcactatccaaatcacacttcacttcacatgcaatattcctttaagctcttgaccgattcactggctacttcacaccacactccatgtcccctcgtgacttctctcaactctcaaaacttacctcagcataggaaatgtattcaagattttactatcccccctcaatcgaaataacaacatttattcaaaacaaaacaaaaattatcagcaagctaattaggtgttaaaactataatgaaatcagcggatatagtgaaccaagtcagaccatttttgagaaaattacgaaagaaaaatattataccattttatctcacacacatgcgaagaagatgtgtagacaatagaaaaaaaaagtttacggagtagtagtactattgccagatagaccggaccggatcccaccaattataaatcgaattcgagggacattttcgcattttcaatacctcgctggccatatataaaggccacatcacactcgaagaacattatctaaatatctctacacaatcacattagccaaaaccatg

SEQ ID NO: 15561 - DNA, 3003 bp, Unknown; identical to SEQ ID NO: 15560
  misc_feature (1)..( 3003): 2750-1469P.txt file - cDNA_ID_1010209; gDNA_ID_1621133; Annot_ID_172547

SEQ ID NO: 15562 - DNA, 3003 bp, Unknown
  misc_feature (1)..( 3003): 2750-1469P.txt file - cDNA_ID_1010265; gDNA_ID_2684224; Annot_ID_191890
atatttgacaacactggaaagctaacgacctacctacgataaatgagtttgtcacctacagaggttaatgtggatgttatcaccaaatcttgaaaaatgtttgcagctgtttccgtctccggaagtcctctgacccagtgagcaaccatcctttttaaagggccaccttaaaattccaatagagcttttatgcagctaggaaattaaaaaccatgtcttatatcaccaaaactcacatgttaatgcatagtagtagtaaacacttgagcttgaccagagttttgaaagatgcttttaccattgtgtggcgtgattttaaataaaggggaggggccattggcttgtcagagttccaaaatcagcgaaaagataaatcaaagctaacctggaatcaagcttagcacggaaggaaatgcaagattaagttggtctggcaaggctttaaccaggggagcaagatgttgcagcgaagaatgcccaaatgatgtagctgcaaatgcaacaatactctttagatcaaatctagacgacgtgataagactaatgttcaaacacatacaaatgagaaagtcctaggaaataagaaaggatcaacgtcacctgggttagaaagaatcaagacaagatcaatatcagggttacaggctgcaacagcgagtgcaatgcaggcgccgagagattctccaacaagatatatgggtttcccaggtgatcgttgattttcatatttgacagttgtttcaaccatggcgactagatctaaaagcatccaaagtgttagagaatcagataaaaagatctaaaagagttgaaatagaggaaatacctgtgaaagaagagcgattgctcgctggtatgtgcaagcaccagatatcaaacatccttgtaaaaacaaacatcgctcagccgaatcaacaaccaccgctataagaaaaactaaaggatagaaacgtcctttgatcactcactgtccaagtttctggtgctgccttattagcccgagtccatttccgtcgatacctaacgacagtcatttccgaattagagaaagcaattgcacatttctaactaactcaattaatcgggactaaccaggtaggaagagaaggagcggggcaccgtcacatggatccttgcttctttcgaggggagagaaccagcgagatgggccgttgtcttccggtctgatgaaatccttagccgcctcgaggtagttccagaagctcttaacgaatggctgctcgtagtccacaagcctcgagctaaaaacggtgacagaagcggagaatcggcgtgccgggggtagggttactccaagggggtgcttgtgcttctctccgttgaataatccgacggcagagagcgtgtgaaatccggtggccgccataggcaaagagaagctagtagtagttgtggtggttcgtccatggagaaagaatttaaaccaaagatttttgtgctttctttttcttttcctttttccagccgaaacgaagatctcatgacttaacggtctctcctctccccccttgtcgtgctgttttcattttcaacgaggcgaatgtgtgatgtttcaagctttctcaaacagcaagcagttgctatcttatatagctaaaccacatacatacacttaggcaagagagtagaggctcaagaataattgatttcggcctttaatgggcttttagtttggcccatgagtgactccatttgtcttcaaacaaatgaaacttgttgtagacggagaaacaaatatcaccatttcaggaggagttagagaggaaagaaatagtacatctctgtttggcaattagcgagagaataaaagctagaacggatttacatagctctttggagactccatggccgggagaaatgaggagagagttgctatggcggatccaaagagctgagtgagtgagagatctttctttcttcttcggccttattcggaattctcttgactattctccataatgcccacatatgacattaaggcccatgggcgtttttctaatgacccattaaagcccttgtctctcaattcatacaaaccaactgcctcttgttgttcccgcgctgtttaaatactaactatatacatatcgccatgaatcattattaccttcactatttaattcatgcaataatcactatataaaataaaattttgctactttcctttttttcgtctctcgactttaccgtcaaagtttgttagatctcatcattgacattggacgtccattatctatttgagtatttctgatatcgattgtttattcctctagtgaatgtaattgcataaggaaacactaaatgtggaaattgttgacaatacacctgatgccacgtattatgcagtttgtatattattgctaatttaatcaaacaaaatatgtatatctatgagtaggtggccacgttttttcgatttaccatttgctaacaccccctcaacctcctaagggttcactaatggaatttgtagatgtcacgttttccaaccaaaaaaaaacaaaactttagttaaaacgactagtatatatgtgctaaaccaggagtttgaattattattaagcagattcatattttggaaaagaacactgaagtcgaatgatcgttcgattctttcctttgcctataaacatttaacatccgagaccgagttcactccgcagccgtctaatctttttagcttgggatcttgaccgtctacgatactcgtcttgatacatagctcggagcttgtccggctttgtatcaagcaatcgtgagccctgtcaactggtatataagccaattctcaatctcctctctgcaagatccatttttttatttattcatgcatttagccttgactctgttttgcttctacggatcttcgtttcaggtgtgcgcactaagcaagcatactctattatttgtcgaaatcacaagagccagccagtctctctgagttctatcacaatcttcttcttcagagcttattgagtaatg

SEQ ID NO: 15563 - DNA, 3003 bp, Unknown; identical to SEQ ID NO: 15562
  misc_feature (1)..( 3003): 2750-1469P.txt file - cDNA_ID_1010265; gDNA_ID_2684224; Annot_ID_137526

SEQ ID NO: 15564 - DNA, 3000 bp, Unknown
  misc_feature (1)..( 3000): 2750-1469P.txt file - cDNA_ID_1010331; gDNA_ID_2910742; Annot_ID_193705
aaaaggtatctgattctctctttaaaaaaaaatgtacaaaactgtacattagattcattttacctcacacactattgcttctatagcttcttcaataatttactttcaaaaactttttcaagtgaatatagttaatttgaaatgggttttgtcaaacaattagcatggtgtgccaaaaagaaaatccactttgaatttcgcattgaggtgtgctctaaacggcaggattatggacatcttggaactcttaaattatgtttatgtatatatatgatgcactaactaataatcagttaattaacaactagtcaattattttttgcttaaaaataatctgaatccgttgccgcatataattagagtataagcctagctatgcatgtatcataattacttattttgtgcaatgttatagaatattcatctaagttttggcttgtgggctcattcatttgcttataaatactgtcccctacttctttatatgttttttctaactaataaatatatagttgatgattatacatcctactacgccctaataacgacaatcaaaaatatcatgtgaatatatggactcaaacttgagtttgaaggaacgctaatagaagtaatcgctaaataaactttttttttgtatatatattaattaacgatctcttacctcatatgagtttttagtttttgatatattatacactattattttacaaggtataaacttcttcatgtttattttctcagatctctgaagactttgggacatataatttgcggatatatttattttattttattttaagagcaataaggaattttcggaagaggtgaaggaggaatttatatgctgatgatgatgttgctggggatatgaggagtttgatagtgaaggggcacattgatatgacagtgtctccaaatcaaaagccctaactcctatgcaataaacacatatgtttgggttttagggtttcactttttaactctctaaggtagacaaatcataaccttatcaactatctaaggtagacacatcaatgaaaccatcctctctctcatcaactatcgcatttctcttgttcgcactaatttcagccgcttcttgccgttttcttcgtcggagaccagtggccggtggcttccgtagcattggaactggtctctttgtccttgtagtttatgctttgttttgtagtagtagagatctcgtccttgattcagttagttttggatagatgtgagtaagtgcttggttgattctgcagatctattggccctcgtttggagaatttttcggtttgtttcaagggatgacttttgtttcgttgaggttgcggtaagagcggttagatctgttgatctttttccgtttaagtggttagcgtggtatctttgccgttgttggtttatggtggtgggttctcgttgagttggtgcccgaaccttgcctttccctccgtctcttgtctccttgcttcagccatcaattcccatttggattgccccatttcttttcagaggtttcgttatgtttttgttgtgatagtcttctttgttggcagtcggtctctcctccttagtgtagtttgttgtggttgttagctttctcctacctttgtggtgttctctcacgatgaaggttctcggaggctaggcttctctccttgtcctgcttcagatcttttctgatagctttttgaagacttctatttagatgtaattagacgcctcagtcatcaccgtcgcacccggaggcttgttcgagtttattccagtttggttggcttgctgggttatgaagttcttggttctggtttcgagagattggctctctttatgataggaggtggcagattttttttcggggtggccgtgggcagccgaagtaagtctcttcgcaagtgcttctgaggaggaggtcttatttgccgcttgtagctattgttttctttggtttttagtcttgttgtctctgtttatgtatttgggttcgttctcttacgctttagggtccaatttttgctgctttgtgttttagtttcttttgtttccctttcatagggctatgcttccggagatatcttcgttttcctccggctttatctctgagaactttaatttcgttcgtcggctttgcttccattgtttgggcatcgtgtaattccctggttccacatcaagtttatcaatcaaatttcagtttgagtgacaaaaaaaaaagtagacaaatcataaccatatagtcttaagcaatatagggaacttgtagacatatatatccactatatgtattgtctttttttgttctagagggaaaaataattaggtttattgtaacggtttagagagggaaaaaaagaagaaggttaacggtttggtatacgagaaaagaaggtcttatattttcgtaatgacacatatagttgggccttgttgggccaacactgaattgaataaaagatagatatacacgttgcgtccatactggatctctagcttaaagcgaacaaaacaacactgcttttaacaagattaattctattttttggtccataagaggtaatgagttgagtttccccaaattatgaatttttggtaatacaaacagttaattttttttgtcattccccaaatttgtactatcctaaatattacaacaggataacatatatctataatcctcttggactaaaaatttcacaattgatttagatatgattagaagttgggaactacagttataaagtttgtttgcttgcataaacttttaaagttaatggtatttatccatttttcgtttggtcaaaatttgtcacaaaatcgtaattagaaaaaacaataatgtgcctatgatttgacgatctgcttgaacaagaggaagcgaaaggatgtgttaccctttctcttgttttcgtatagctattgaatgagtttcatccgatccacgattccgtctctgagctcagaatcataaaagcggaatccgaatctgatctcatg

SEQ ID NO: 15565 - DNA, 3000 bp, Unknown; identical to SEQ ID NO: 8327
  misc_feature (1)..( 3000): 2750-1469P.txt file - cDNA_ID_1010357; gDNA_ID_1971748; Annot_ID_175254

SEQ ID NO: 15566 - DNA, 3000 bp, Unknown; identical to SEQ ID NO: 8327
  misc_feature (1)..( 3000): 2750-1469P.txt file - cDNA_ID_1010357; gDNA_ID_2926195; Annot_ID_201400

SEQ ID NO: 15567 - DNA, 3000 bp, Unknown
  misc_feature (1)..( 3000): 2750-1469P.txt file - cDNA_ID_1010421; gDNA_ID_2926239; Annot_ID_142840
aaatggacggttgagatgaaaacaaatgggtcataatggatcctgcatcagaagaagcatcaacgaaacttccaaatcctttatataacttctcacaagtcaccaccatttctctctagaaaatatcagaaaaacaaaaccatctcaaagtttcttgagaagaaaaaaagggtcaagaaagatgcctaaagacaggaatatcggaatcgccatggatttctcagagagcagcaagaacgctctgaaatgggcgatcgagaacttagcagacaaaggagacacgatttacatcatccacactctaccactctctggcgatgaatctcgtaactccctctggttcaaatccggttctcgtaagtttctttcttcttatggtatggattctgaaaagaaatgatctgtcggtttaatccggtttaatttggtgcttgcagctctcataccgttggcagagtttagggaaccggagattatggagaaatacggtgtcaaaaccgacatcgcatgtcttgatatgctcgacactggttcgaggcagaaagaggtttttatccgaatcaacaatacatttttgttcaaagactctttggcaaagacaataactaatggtggttttgttgaaataaaaaggtgcatgtagtgaccaagttatactggggagatgcaagagagaagcttgttgatgctgttaaagatcttaaactcgattctattgtcatgggaagcagaggactcagtgctcttcaaaggtaatttcttgctctctttttcttttttatgtaataaattccattttatattcttgccaaaatgccattattgcttagtgtttactgtttagtattgctgtatatgaaattataaaatgtgagatacaatagggccattgatataatttggtgttggaacaaatccatgattaaaaaacgctcgttacctaatttaaggcaatgtttaataccaatggctttgattttgaatccgtggtttaatttattaaaccatctcgctttactttgaacaattttggttgacaaattatttttgtctttttggtctatctaattaaacatatatacttttgaggaatatggtaaattcaaaattttgatgacaattacttctcaacgaaatggataaggtctagttgaaaatgacaatggtaggttttagatttagctttagctatggattaggttttaggtttagctttaactttgaattttgtctttatttcataattaagaaaaaaacaaacatttaagattgtggttacacctttgtttttagcacacttgtctttttttttttttttgaataaacacttgtctttgatttattcttgatatttttaacgtaacaattatcattggtaatcttttagtgatgaattcttctaaactttaatcttttggtctaagtgaaatatctagtgactaataattgaaaataatgaaacaggataataatgggaagcgtgagcagctttgtgatccaacacgcgccttgccctgtcaccgttgtcaaggataacgaataaacgattctcactacaaaaaaaaaaaaaaaaaaaaactgtctttatcttataagtcctaccaaataatcatcgcaatttatgctttttagtttttattaataaaagaatctttatgttggttttatttgtaatttgactacaacaaaaaaagaacccagagtgttttcatcttctagttttgagagtttcttgcttatttgtttcatttaatattccttgtgttttgctggaatcactccatgtgatttgcttgaacatgtggtgggctcgattaaaaatagtttgtatatccaatatattgcttaaaaataagtttgtggtacagatttcacatgggcaggttggattcattcacattgatcattgactaaatattagaatatttcttaaggaaaaattctacagaaagatatttacatcaaatattaatattctactttttttttaataaatagatagatcaccgtggtaattatatttatttattttgcacgatccatttcgaaatctgataaaacttactagaaacagagacccaagacaaatcgtagaaagtttagaagatcatcaagacagaagaagaaaaacaacaaagtaaagtgaaatatcagaaccatgggccgaagttatacgggccggtgggattgaaacccaatttctagtttcaacggaaacagagcaaaaactttatcaacattactaagaacgcaatccgcttctgtaacgaacccaactaaaccattaaccgattttgtttagtccttgaatttgatttaccttagtttatgccaaaccctctgcccaaatcttggtctttcaacacaatagatagacagagccagtctcacagttgtctgtctctctttggttttcatcctctatgctctttatacttatgtaattaacttgtggtacaaggtttttgacttgaataaattcgagcttcttctcagaaggtctaacatattcaattctcctataaggctaaaacacagtgttggaccatcttagtgatactaagcatccaagattcaaagttgttaaatagagatcaagaatgtttcatccgtttcacttcacattaaccaataataataaaaaaatcaatacaaaactcatttttaatctaccccattagcaccattttaaaagccataaggacggtgatgacacaactcccacaaatccaccatccgatttgataatcccaaataagaattatgaggtttgttcagtgatccctaagacatcaacacctggaacttatgttgttggtaagaacactacctccctcactcaactcaagtgcttattccactatctcttcagtgcctcaaatttccacacaattttccgctatataaaccaaacattcactaattgaattcaaacacacaactaacaaacaaaaaaacacaaatcttggttcatttaaaatctctccaagaaacaaaatg

SEQ ID NO: 15568 - DNA, 3000 bp, Unknown; identical to SEQ ID NO: 15567
  misc_feature (1)..( 3000): 2750-1469P.txt file - cDNA_ID_1010421; gDNA_ID_2926239; Annot_ID_204011

SEQ ID NO: 15569 - DNA, 3003 bp, Unknown
  misc_feature (1)..( 3003): 2750-1469P.txt file - cDNA_ID_1010431; gDNA_ID_2684110; Annot_ID_190586
taatatcattatagaaaagttataaaaagaattccacctcgattctcaattgtcttttttttacaattttaccttatacaatttttctttcttttcgatcacaagtttcacaaaaatcaaaagattataagaatgtttatcaaaaaaaaaaaaaaagtttattagaagcgacggcatagcgtttgactaaagaatttcggagagtttttgggcctatcggcccaattatcccacctgatgggaagcgttgccctcaaagtaattgtttgcaggtaattaattgttcaaacaaagtgacaatttccttccgttgtcatataggaaaaaagttgcatcaaaatgatttattttctggcaaacttgtgtcattgttaatttatatgggatttagaataattaatgacgaatgaaaagagtatatgaaccaagtaacagatcgtgacaaagcgccattatgaagtttctactgattttaagataaaagtctaagatcccaaagttaacaaggatttcaaaacatcaaaaagcatcttctaactcaaaacacaacatagataaatttaccctttcgaaaaactcattcttcgaagcttctgttttctgcattgatcaaggtcttcctcttgggactggagaacgactgttcaatcaaaaacattacataagaacatcaatgggacttgagtgaacagtaagaagccaaagccatttttttttttttttaccttctgtatcggtcataaccagggctcctttgtctaccataatcagaactccttcgtccataatctggactcctccgtctttcataagctgctggacctttgtatctgtcgtattctgggcttcgagcacgaccataatctggacttggacgcctaccctgaccagggcttggacgcctgccataatctggacttggacgcctacgatacacaggactaagagaccttctcgggctacgaccaccatttcgatcatctctttcatcgtcatctttcaacgcatactccacggaaacaaccctatccaatattttgctgaggaaacaaaaaggggatgtttttagagaggcaaatgtactaaaagtttgacggaaaaagtaactagaagaagtgttgttttaccttctttgagtagcttcaagggcttttgtagcatcctcttgtgtttcaaactgaacaaatgagaagttgcgtctgatacgcacgttggtgaccttaccatagggctcaaagtgtttttcaatgtcgtgctcttttgttctaatggggtcaaagttaatgacaaacagtgtctttgtaggcttcagatttgaaggggctttcgcgtcaccacgaggcctgccacgttcaccctgaaaaccgaaagaaactttaaaaggtttcttaaatatgcggcatagtgcaagcttcaataaaaaccagaaaaaaatttatacctttgcccattcaactgataacctgcgtttctcatatccaaaaggaaaattgtcgagtttgcgaatagcgtcttcagcatcacgttcatcctcaaagtacacaaaagcatatcctgcaacaaaagaaagcacaaggattacaaaacgcaacacaaagagtgacaatcctcctgtccattaacctgctgcatatctcgtttaccctagaaaataactaaatagatatacaacaccttcatataagtgaaggctggtgaatatgagagatgtagaggcattccatgatgtagtagaaaaacaagatttgtagcataacacaggaattcaggatttttatttttaaaaacaccaattttatattaaaaaatctgagtgatttgccaggcatgcttaaacattctgagtggaggagttcagatatggaaggcaaggcatggcaatgatggattcaatagacttccatctgaagcatcgatgattggtaatagacagacaaattccaaagtttctctagagtcagtgaagattggtaggcacaagatgataaaggcaggtatgaaaatgtagaaatgattttgcaggaagaagaagaagatggcaaatcttgttcctttgaagaaaagttcctgcgaacaaataaacactcaatacaaccatcctctctactgcataaaccccctaccacacttaacacattcgggaaaaataaaaccaatcttttctatgtaacggtactatatataaaccttcaaatcatgtatgaaactggaactagttctaagtatccagaatcctaggtcaagcagaaactaaacctaagcaaagatgatttatcaaccagaagacgaattcgaattcgagacggacaaacaacaaaatttcaccggcgtataacttagaagacactttaccagatttcatgtccactcggtcgactctcccatacttgtcgaacaaccgttccagatccgactggcgagtttcatactcgaaattgccgacgaacactggcctcatctttatcttaattcgcaattcctaacgatccaataactcgaaattagtaacatgtaagggataaaataaggtatatggacatgagcaagtataattatcggagaaaagttacctctgaacaatcggagaagaaacgaaaaacaaaccctagacgacgacgacgactactacgctcatcgaagaaaagcagagcctggttgacttaaaaaagcccgtcataccatcatgggtacattcggaaattcaaaaatcataatgggccttctttataaataggcccacaataagttagccccataccgaagaactcgttggagtcttttcttatagaattaaatttatacatgtttatatacagacccattttccgtcggtgaagaagaaaagaattaaagtttatgtaagtgtccagttttctgacacgtggagattcaacggagttctcttatctgttttggttcgatcatttttgcggtttaggatgtctctattgtttcttcttcactctttttgccacaatctctgttccaagaatcgcgagtatg

SEQ ID NO: 15570 - DNA, 3003 bp, Unknown; identical to SEQ ID NO: 15569
  misc_feature (1)..( 3003): 2750-1469P.txt file - cDNA_ID_1010431; gDNA_ID_2684110; Annot_ID_137137

SEQ ID NO: 15571 - DNA, 3000 bp, Unknown; identical to SEQ ID NO: 13568
  misc_feature (1)..( 3000): 2750-1469P.txt file - cDNA_ID_1010471; gDNA_ID_2214637; Annot_ID_136153

SEQ ID NO: 15572 - DNA, 3000 bp, Unknown; identical to SEQ ID NO: 13568
  misc_feature (1)..( 3000): 2750-1469P.txt file - cDNA_ID_1010471; gDNA_ID_2214637; Annot_ID_188167

SEQ ID NO: 15573 - DNA, 3003 bp, Unknown
  misc_feature (1)..( 3003): 2750-1469P.txt file - cDNA_ID_1010520; gDNA_ID_2926278; Annot_ID_205405
cattactttttcaagtccccgatgttctttaaattttgtttcttgatcaataattcataaaaatagataattgatcaaatattcaaaataaatatttaagtttgttatttactaatttgatggtgatttaaaaccggacgatggcaaaacggaatgtcaaattgtttagttgtgattttgggtcgtggataacataacagatcaaattgttgggttaaaactgacaaatgtcaactattctacgacgcagcttaatataatgtcgtgatttggaataacaaaatggtggatgttatgtagtaactgaatacaagattattaattaatttacaagtgtttattaaaaatcatccacattctccgtgccaatacatgatcggatcaaacaagccgaagcagtgaccataaccgccgcgaaaatcgaaggcacaaacaaatcaaaacgcgatctcttcaccatattagacggcacgcatatactctcccctgcaaaatccatcggaatcttcacgaaaccatctcctcctccgcacgaagacgacaccgtagacacaaaagccatctccggagcaaacgaagcgacggccaccgtgaacattagaagcaccgtccacgtggcagcctgagcgatgaccggccaacggtcagagacactccgtagaaacggctccattagcgatggaagacggtgatacatcttgatcagaagaaatggggattgttttagcgtggatcaaaagaaattaggtgttggtttgcgaggaaacgaaaagattgtgagatcgatgagcaaaaaccagagcttgtttgattggtgcggtttatgtgtttggaaacggaaatgaaaatggaaaggctgcttctttgcacgtttaactaactactcttctttcccatacacacacacagagagttgttaattacgaatttacccttccctttgaactcttctcttcttcttttgcccttccgggtcgtctccttcccctttgacactcccacgttttcagcaatatcaatttttgtttaatcgacggctgtattagttggttgttaagaaatttcagactcgttcctccataattcagatataggaggagaacataaactatattatatgattatggagtgatttatgctttatgttgttcaccaaaaactattcattaaaattaagcgggttcacctaaatctgatgcttatagcctgcttgtggcacaacgataacgataggtaattcaactactaatcttcaattttatctatttcaatgactccaatcatatcataattagactctgttcgttataagaaggtaagaaagcaacatcattgaaggaaaagtaggccaatttcgcgtatcaaataatataaacacacacatataacatatacttcaatagagacacatttcaatatagtgattaggtaaatgaaattgaaatggaaaaaaaaatcgttaaaaatatataatccaacattgaaattcataaaaggaaggaacaatcttctctacttcctagagttacaaagccacaaaatacgaagttaagcgaataatgcatctaatttcctacaagtactaaaaaccaaaccgaaattgaaatccctaaaaaccctaaccgggtctcttcaagagctagtaaacttggtaaccgccttggtaccttcagagacggcgtgtttagcgagttcaccggggaggacgagtctcacagccgtctggatctcgcgagatgtaatggtcggcttcttgttgtacctagcgagtttcgaagattcctgagctagcttctcgaatatgtcgttgatgaaactgttcataatccccatggctttgcttgaaattccgatatctggatgaacctgcttcagaaccttgaagatgtagatcttgtaggtttcgacgtttttcttagatcgcttcttcttcttgtcaccggcttcctttggtggcaatttcttccccgccttgggtttcttctccgccggagccttttcagcagccttgttctcttccaccggtttctcagcggcggtttttttctcggcgggcttcttctcggctcttggtgccatcgtgaattttctttctgattttctcgggaaaaggaagttgattgaagtagtttagtggtgaatggtgataataggtttactcgacgcttttagattttatagagaaggaacaaacgtattctattggatagaaatcttcacgaggatcattgacgtgtatatttctcattcgttaaatttatcaatgctcaaattagatctgacggctgagagaaacatcattcattcatttttacaggttcaagttatagctttgataggcttcaatggtcgtgacaaagaacgccattgggcctgaaatgaagcttgagacgcagcgcataacacatgtcaattggtttctttgattttccctagtataaaaagcgataagaaaaccctagctcaccttctcttcttcctctaattgcttttctccgtcactgagtaccttgcctctcgagctcccaatcttaaggtacaattgatcttcactatagtcgttcagaatctgatctgcttatcgaaatattcagaagtgtgagatagctgctaattggtctttaatttgtcttcttctcttgcttcacatcagaaaatttaggatcttagagcttttttgttgatgtaaacatttcatagtgaacttaagaacgcttttcgaattagttagtcttagctctattttgtctgtgtgtgtattttctgacgtattaaccacgagacctatgtttcaatttctataagtgatttcgttttacattttaaaagcttgatttattcccattgaaatcaatattcatgatgcagaattctgtgcatttgtatcaaattctaagtgctttgcagattttgtttgggttggtatatttgacttttgttttaactcaagctcttgtttcttgtttgacttgtttagtagaggattgagcttaaggcaagatg

SEQ ID NO: 15574 - DNA, 3003 bp, Unknown
  misc_feature (1)..( 3003): 2750-1469P.txt file - cDNA_ID_1010536; gDNA_ID_1620821; Annot_ID_50700
cttcatctcagccatcaaagacaatgaaactccatggtttatcaccctgaaacatccccatctctcactggcttcacggattttctgattcagaatcttatcagaaacctcttccaagtctatagtcggaatgatgactccgtttagttcccccatatcttcaatggagaggttaacaaagaaacctaaggccaatattatagagaaagaaacatcaatagagagagtgacgtaatcaatgagatcagtgtagaaaattactttgaagaaagacaattctctctgatcaaatcagtaaagtggtctgaattggacaatgacgttcaacgaatcagaagaaaaagtttaaaactttaatagcttaaattggctaatgatctataaagtgacgattcaaccagctaaaacagtctaaatcgaagaaaacccggtaactaattaggctgaattaacaagataattcatcagtacttcttctggataaacttcaattacgtttaaattgaagaaaccccagtaatagttaagctaaataaacaaaagatgatttgtcacgtttgcttattctgggtaaacatcaaagagttttcagaaataaagagtaccttaattccgtggggaatcttgcctctagatttttatcgagaaatcagaggagttgattcagtgtagagttacttattgaaggaaagaaggaaaaacgaaatcagaaaattggatacagttttttttttttttttcgcgttcacagaagtctactttattatagaggagaagaagaagaaaaatgacgtcaatatgtttgggcaacgatttccacgcgccaaatttcgatttaatacatggacaaatgacacacaaaattttctaacttaaatatacatacgatatacataaatgataaatctaatattattccattatcatataatattttgtatgtgccaaacatcacgactttttttaattgcaattttgaaattcacatattacatttctatggaatattttattaatctcttactttttaaaatatttttttgcttaggatgtccaatctaatttaatcaacaaaaaaaaaatgataaatctatgggcctacacttttgggcccaaatttatataactcttctcgcgttaatcagaaactgatgctacttctcaaggttcttacaaaatgtgtaacaactaacaagtaagaactaaagaacacaaatctcaaatttgcttttccagtttctcaggtctagaaggaagagattcctgccagcagtctaaacttctcataggagacccaaaacacgaactgccacggtccaagccttgcccatgtcgggaagaaacctttccacaaagctcttattccttcaaacttaaccgtcttcaccaaacagtcgtaagaatttctgtacacagcattttcaccctggttcatcatcctcgtcttcaccacatcagctggacaactcaaacttgtcgaagcaagacccgacattatagaagcaagagtgtgcgcaaaaatgttatcctcagcaatcttcttatcgatgacaaagtgtttggcgtgatcatagcaagctagttctcccatattcactagaaatgctctctggatgtttggaagaacacctttccataacccttttactccttctgattgtaggattttggtaaaagcctcgattggtcccgagtacctcggtttcaggccttggctcaccaatctaccatctgcttgcattctcactttgaccaaatcagctggactagccactacctgcatttctagtatggacacaataagaagcattttagtgtggtgtaggtataaacaacactcaaatgtcaattctaaagatatcaacaacctaaaagatagctacatttctcacttcagtagcgtaaaaacaattgaaaatccttaataattaacttcgccggaaatctacgagtttccataggtaatcagtgatctgagagaacttaattgtaacacataggagacaacaagcaagcacaaattttggattaaggatctgtgaaatacattgagacgtctatgactaggatctgcattggttcttatctctgaaccaacctaaagtagcagctaactttggaatgaaacgaacattgaaagcctataaaacttgaaacaaaatctccttctaattaataccttcttctacgaaacatattcaaaggaaactatacatagagatcgattgttcaattcgaaatgttaattctactctaagcaactgttaatccagatccaatttacagtcaaaacatgactctaaagatttaccggtgaagaaacaccgttacctgagctataacaccagaaaatcctccgacgagagcctttgtggcgagaggaagagactcgctattgttagtttcagatctgacgatgagtcctttcaaattctcgtatccaatgattctgataggcgtgtagaacaggtgtctgataatcgccggagatagacctttgtagagaccaatcactccttcctttctcgcaatctccgatacgactccgaaagcgccaatccgatgcgcaccagaagcggatcccgaaccatggagctgcattctagtctttgtgagatcaatcggaaacgtaactgactctgcaaccatcgcagagagtgaagcaagcaggatcctggttccggtcggtgcttctctggtcactcggctccgctccattttcaccggatttgattaccactaacacaatgtccatcacagagaacacaacttgattctatttcgtagtcaacgacatcgtttcggtcatcagagtgtatttgacgacgtcgtttccataatattgggctttaaagtcttatgggcccatgttcacaaattctaaaatacaaaactttagagataacagccgacgtggcaaaacatgaaagaccgagtagacattatagttttgagctcctcccatttcatatccttaagaaaaacaaaaacaaaaatcaaatg

SEQ ID NO: 15575 - DNA, 3003 bp, Unknown; identical to SEQ ID NO: 15574
  misc_feature (1)..( 3003): 2750-1469P.txt file - cDNA_ID_1010536; gDNA_ID_1620821; Annot_ID_169483

SEQ ID NO: 15576 - DNA, 3003 bp, Unknown
  misc_feature (1)..( 3003): 2750-1469P.txt file - cDNA_ID_1010567; gDNA_ID_1971906; Annot_ID_176994
gaagatcggaaaaaattctgagagtttcgtctaagggtttcgaatggacttttcgagcggaagatcagaaaaaattctgacgagagaagacaactacaagagaacggtggacccacattaggctttcgaatggactttgctttttgggccctttttgcttcccaagcccaacaaggtattttactttcctcctttcttatttttgtttttctcccttttttattttcttactaaaactataagtttttcttttataagtgttaaattttaaaattttgtgtaaactaattgttaaatttttataagtgttaaaatttttgtgtaaatttttataaatgttaaaattttaaatttttgtgtaaatttttataagtgttaaatttttaaattttataagtttttcttttataagtgttaacgtccatacccctaagaggcgtcatcggttcaatatgatttacacttaatttaattttttaacatttatttttattttattcaaaaatatttttaaaactatattttatattactactagtaaaactataaggtttttaaactataaagttttttcttatatgtgttaaacttttaaattttgtgtaaactaattggacacaatgtccaaacccctaagcggcgtcatcggttcaatatggtttacatttaatttaacttttaacacttatttttattttattcaaaaatgtttttaaaactatattttgtattactactattaaaactatattttgtattattactattaaaactataaggtttttaaactataaatttttttcttatatgtgtaaattttttaaattttgtgtaaactaattggacacaacgtccaaacccctaagcggcgtcatcgttttaatatagtttacacttaatttaactttttaacacttatttttattttattcaaaaatgtttttaaaactatattttgtattactactattaaaactataaggttttttcttatgtgttaaacttttaaattttgtgtaaactaattggacacaacgtccaaatccctaagcggcgtcatcggtttaatatggtttacacttaatttaactttttaacacttatttttattttattcaaaaatgtttttaaacctatattttgtattactactattcaaactataaggtttttaaactataaagtttttcttatatgtgttaaatttttaaattttgtgtaaactaattggacacaacgtccaaacccctaagcggcgtcatcggttcaatatggtttacactaaatttaactttttaacacttatttttattttattcaaaaatgtttttaaaactatattttatattactactattaaaactttataaagttttttattatatgtgttaaaattttaaattttgtgtaaactaattggacacaacgtccaaacccctaagacgcgtcatcggttcaatatatagtttacaattaatttaactttttaacacttatttttatttcattcaaaaatgtttttaaaactatattttgtattactactattaaaactttataaagttttttattatatgtgttaaaattttaaattttgtgtaaactaattggacacaacgtccaaacccctaagacgcgtcatcggttcaatatatagtttacaattaatttaactttttaacacttatttttatttcattcaaaaatgtttttaaaactatattttgtattactactagtctactattaaaactataaggtttttaaactataaataatttcttatatgtgttaaatttttaaattttatgtaaactaattggacacaacgtccaaacccctaagaggcgtcatcggttcaatatggtttatacttaatttaactttttaacacttatttttattttatttaaaaatgtttttaaaactatattttatattactactattaaaactataaggtttttaaactatcaagttttttcttataagtgttaaatttttaaattttgtgttatctaattggacacaacatccaaactcctaagaagtgtcattggttcatacctaatttaaatttttaacacttatttttatttatttaaaaatgtttttaaaactatatttttatattattactattaaaactataaagtttttaaactataaggttttttcttataagtgttaaatttttaaattttgtataaactggatacaacatccatatttaaaaatgattttaacactatatttttatattaataaaacttcttataaatgttaaattattaaattttgtgtaaactaattggatataacatcaaaacctcgaaggaggtgttttaagttcaatatagtttacatctaattttaatttttaatttttaatacttatctttattttattttaaaaaaattttataatatttattgtatttttgtgtaatttacacaaaattttgaatccttaggattgttgagttcacatttggtttttgtataacactcacatcgattgtagacttgtagtgagtttgtgagatgctctatgttctccctaacttttttttctgtctctaggcacgatttcacgaaaccggaatctgtggaccaaaagttacctagagagtgattatttttgagaaaatagtcttcttacgagtatgttaaatctaaaattataaatgaatgtgatttttatccacacataaccttgagtactaaatacgaattttgtaaaaatgaatcttttctttggaataagtttacttcaaaatttacagtgaaaaaattataaaagatccactgaaccaatcaaatattgtatctattaccgtatatcatcgaccggtttaaaataatttgtaataggtaaataacagaacgacgtcgttttagagaaccgtgtaaaccctttgtagttaaaccctttccgccgcgaacttcatctctctgctttttcttctccatcgcgaaaataaaaaatcagtgagagagatg

SEQ ID NO: 15577 - DNA, 3000 bp, Unknown; identical to SEQ ID NO: 1071
  misc_feature (1)..( 3000): 2750-1469P.txt file - cDNA_ID_1010577; gDNA_ID_1620355; Annot_ID_154461

SEQ ID NO: 15578 - DNA, 3000 bp, Unknown; identical to SEQ ID NO: 11165
  misc_feature (1)..( 3000): 2750-1469P.txt file - cDNA_ID_1010640; gDNA_ID_2214481; Annot_ID_133267

SEQ ID NO: 15579 - DNA, 3000 bp, Unknown; identical to SEQ ID NO: 11165
  misc_feature (1)..( 3000): 2750-1469P.txt file - cDNA_ID_1010640; gDNA_ID_2214481; Annot_ID_183351

SEQ ID NO: 15580 - DNA, 3003 bp, Unknown
  misc_feature (1)..( 3003): 2750-1469P.txt file - cDNA_ID_1010644; gDNA_ID_1621202; Annot_ID_57717
cgtattgcttccgtagaagttgacaatgaggtgaatttccattttgttctaacttcgaaacattcgaccattttaaccattgttactatcaggtggctccagtgccaagtaagaaaccggcttcagaaataccaacacctcaatttgttattgtggatacatatgaaagggattattctccgacttttggtcagcctgcttcttatctacgtgcaagaggaggtaccaatttcctctgatttggttttgtattcattggcaatgaaggtggtttctttgttatgtgcagactataagtttgtctgtttgtttatgcagctcggtctgagcttggagaatttgtggagtatgatcttgacaatgaggatgaagactggctttatgagtttgataaggataagaaagaacttccacctgaaaagtaaagtaaccaatccaactatccttatagctcttcttcttcggatttatcatcatcatcagtatttttctgttatcttgtagctgcatcatgctgatattttaaacgttgaggcggattgggttattcagactctctgcgtcttttagttttgtactgttgctgaattagtttgctttattcactagaaattggattctgctaaaattgttaaaaccaaaactcttagtgaaatagataccgaaagaagaatcgttccatttgatgcacaacacaaatgtgttaaattgtttgatacaggcttgagatcatcatttttaaactagaggtgttggatcacaagacgcgggaaagagcaggagttattacacctactctcggctctccagttcctgtgcttttgcagtttgatgctgcttctgatgtatacctttacttttggattatatatctcttgttattataactctacactcattttagaagcagtacaaaacatttgaatgattagttctgattcttattgcaggtgctgcaagtactgtccattaattatggaaccttccaggcgatcttcaactactggaaagaaaaggtttgaaataaaacttatgtgattgttacaagttttctggatacagacgttatgttgcataggttaatgatcttattttacggggtgagataagacggtttaatagattatttgattcgtgaaacctatgcatagttcttgtgaatgacaaagcagttccacatatggagtacctttggctgataatacttatgcatatgtttcgttttctgttttttatgtgaacttagcgtaaaagatggcagaagcctatcttacggcgtttacaggtttgtattatttatttccatttgaaacgatcaaggcctatgttggaaaggcatcttacctcgattatttagttaatgttttgcttcattgtttggaacagcctcccccaccggttaatgacaccaatccctataatgtgtttaggccaagggagaaagttcacagactccacacaagaagggtaggctgtcttttttatgcatgtgcgacattttttctattaaaatccaactggagaaagaaaaatagtgataaggctttacttcatcttcagatgcagaggagagaaaacaatgtgcagtcatttgaaaagcttcgacaggtgagtgaggcacctgaacctttatggttctttaatttcctgaaatctgagcaatttacgtttacagtgccttcttttagtttctctctggacaacattgttttttctgcttgttaatgatctgttagtgattcttttatggttttctattggattctgaatacatgggatatgttattatcaggttagacgcaatctaggccaagcacagagcattctggaggctctcattaaggtgttctatatgacagttttagtgtttatcttaacaagcggattgcattctccaaagttgctaatttgatgttacccattccgtagagagaagagaagaagagggatgtcatggacagtgaggttagccttcagagaatccaactccaatacagggtacttacttctacttcctctaaaactctctgttttccgttttccgggtctaaaattgtttttttttttgcagcatgaaacagagctcttggaagatagcttggctatgcctggatttcaacccactacaacatcatacaaatttggctcaagcgatgatgaactgatggactctgatgatcacaccagtactcgtgtacgtacaagacctgcggttattcctagttctcgtttcaccaacttaaatctgaatgcatctcatcccggaggcatcaaacaagaagttagaagacgacagtcacagcatggatggcttcacagactggtaaaaccttctcttacaacacctaagctctctctagctactataatcaatcatttaagcaaacctgtaatgattttgttccttaggatcctaatgaaccggtaatgctattcacaaaaccgctggttcccgataaactggcagctgcagggattgttcctccaacaccggattcatcaccaggtcaacctccaagtcggtttcaggggaggattgggcgtggtggccgaattattttcgatagatggaatccgttgatgcaatctcacattaattgtggaaactcttattacattgctccaaatcaccggtctaccaacttcgattgagatattttcacaatcttgctttgtaaagaattttccatcaccaatggtgtatgcaataacgattctcagctaaataagttttagcactttgtaactaactggttattgtgtgtatttctgtttattttcggttaaggaaagaatctgtttaattcaaaatccggttctatcggcggtttggaaaaccaaaaactattgtaccagggaccaaattgtaataatatcttcaactcaaaggacaaaataggattttagggctctttattgattttaatcggaagttcaggtttgctcatcaatcgcagtgaagaaggaaggaacctaaatcggaatttgggtgctccatcaatg

SEQ ID NO: 15581 - DNA, 3003 bp, Unknown; identical to SEQ ID NO: 15580
  misc_feature (1)..( 3003): 2750-1469P.txt file - cDNA_ID_1010644; gDNA_ID_1621202; Annot_ID_174983

SEQ ID NO: 15582 - DNA, 3000 bp, Unknown; identical to SEQ ID NO: 8333
  misc_feature (1)..( 3000): 2750-1469P.txt file - cDNA_ID_1010681; gDNA_ID_1971748; Annot_ID_175259

SEQ ID NO: 15583 - DNA, 385 bp, Unknown
  misc_feature (1)..( 385): 2750-1469P.txt file - cDNA_ID_1010681; gDNA_ID_2926195; Annot_ID_141257
gcgttccgagaatcgaactcgggacctctcgcacccaaagcgagaatcataccactagaccaaacgcccttttgataaaagtctggtttacttatatttgacttataaacattgcctccgagaaccaaactagggttttgcagagaatgtatatatattaacgcatcgacataaatcataacttaactccggcacgagtctcgttctcttctctttaccgccgtcatctaggtctgctaatatcaaggtgagcttgaatcatctctttacaaaccaatttgccgttctttgttcttcaatctgtgtagcccttgttttaccgcttcatatatgttgtgttactaaatgctttcttcttcaataatcagtgaaggagctcgaaatg

SEQ ID NO: 15584 - DNA, 385 bp, Unknown; identical to SEQ ID NO: 15583
  misc_feature (1)..( 385): 2750-1469P.txt file - cDNA_ID_1010681; gDNA_ID_2926195; Annot_ID_201405

SEQ ID NO: 15585 - DNA, 3000 bp, Unknown; identical to SEQ ID NO: 8333
  misc_feature (1)..( 3000): 2750-1469P.txt file - cDNA_ID_1010681; gDNA_ID_2926196; Annot_ID_201436

SEQ ID NO: 15586 - DNA, 3003 bp, Unknown
  misc_feature (1)..( 3003): 2750-1469P.txt file - cDNA_ID_1010722; gDNA_ID_1621154; Annot_ID_56976
tgaaaccaaactaacagcatttttggggtatataagtaacagagaggttgttgtgcaggtcggtttatatcgtgtacacaatgctaggggatgttagcatcttccttgttggcaaagacgagtatgatgaacttgcttgtaagcctaacctactatttctaaaataactgatctctgtttcattcagagtttgattctttgttgtgttttttctcgtggtgcagtggcagaaaccatctatatcataacagcggctgtgaaagacgtatgtggaaagccgcctacagagcgagtgtttttggataaatatggaaggatttgcttgtgccttgatgaaatcgtttggaacggacttctggagaacaccgacaaagacaggatcaagcgactcatcagattgaaacctccttctgaagtttgatatgctccaaccaaccacacattcttcttctactcattttaagagctttctcattctccaccgattgttgtttgttgaatcacttctctatatcacatattcaactatcaactactgctgttgttcgatcagtccatcttgtagtgttgttttttaaatcttcagtttttagtgttacataacaaagaacaaatttctatccaaaggcttttccctgcggtctaactttggtgagttgttcaaagacctcaaaaattgattcgtgttcttatggcagtatgccagtatatcaactcaatatccagagactttccttttaccgtggaaaagaagaccaggtaatcccgccatggttgcttgctggtagagattaagatgaagatgaaggttgaactctctcgaacaaatagttatacaatagaagatagaatgtgtcttgaaattttgaagtggaacctcctgcatagcttgtgtgtctacaaaataagcactttccatttgtttgttaaacgcactggagctgtctgcgtctggactatgttaatgttagttgaaacaaaactatttaaatcaaatttgcaaatgagggaaagaaggttaaaaagctttatcaaatcttgagtttgatcatcggcccttcgacaggagaaaaggctagctatagatacaaaagtaatactaagcataaactaaagagtaaatttaaaacgtgctggtgggtgtatagtcgaagtaagtgaccaatctacactcactgaaaattttaatatcaaaatttaaagctaattcagcatattataaaattatggagtgcgaaactataaaatgaaatcataaaagatcatgcgagattaggtggaacttagcaatcatcctaaattacaaaaactcgatcaatgtgagttgatgtatactgtcatacgactaatagattataaaaagaaaaaagacctaaagcatttttattggaagtctcgtaacaatgtaaaaaaataatcatacaactaatttattagaattccataaaagagtttttagtttgagatatccataaaaaaaattatcttcttaattaaaacactgatatatatatgtactctttttaagtgttttctatttattatttttacaaattataaagtaaaatgatatgaatatcagttaaagagtttatatgtttttttttttggtttcattttaaatcataatataaattatctatttattaacctccattatgcataactctaaagatatattagaattattttaattagtattaattaaggtaactacaaaatatttgatatgtttagaacaaattaatacaatgaatatttttaagatgtaatttgatgaaaattaataaaatattaatataatattaatgaaaattttaagattaaataatattaaaatagtagtatcttaattaaggagatactatggatatcacaccaataggcatgctctaacatatttttttccttttcggaggattctttttatatatatatataaacaaataattaaatagcatcccaatatatacataaacaaagtttaaatcgttttagctatgcctgatttttttataactttttaagaattagataaataataaagcaacatgtctaaatactattctaaaaatatatcaattgttaattgggacagcccaatttgcactggacacggcaacaaatgaccaaattctatacacaaaaacaacaaacgagtaacgtttaaaaatgctgacgtgtcccaatatgatcttacctttgatatcgtttttaaggaaaagttgtgattgtctgagtcagcttgtatgagttcctacgtgttgaactaatcctgacactacctgagggaggtaatcacaacatttttcatatataaccgccccaatttcactgatttcaccttttccttttaccaatcacatcatcccaattatttacgtacttagcttgactagttgtcgttcattacaaccatcttaggtttcttataatcattcctgttacgtagtaaagaactattttacgtaatagataagattagatatcagttgaaattattgactatatagacatcctaattttatttccattgttaaatttgttaatatatctaactatcaaaacctaaatcgacgtgtcacactcaaacttataaagactaaacctattacaagaaataagatcttataggccgaatttgtttggtacgttgatgatccaaatataaataatagtttttctttttctttttaattatgaaaggttaaaaattcataaaaaaaattacccatatttgcttaagacgctagcttttctataaatacagcatagccatgtgtaattgatcatcagataagttccgtggttatcccattaaccttctttctacacaacacaaaactatatataaagatcatacatgtaataacgtcctgcaactattacaatcattctcgcttgaattaacgtggacgtcattgtttttggattgttaatcaaaggcggcgttacttttttttaatataattgtttctttaggatctttgtctctggaaaatg

SEQ ID NO: 15587 - DNA, 3003 bp, Unknown; identical to SEQ ID NO: 15586
  misc_feature (1)..( 3003): 2750-1469P.txt file - cDNA_ID_1010722; gDNA_ID_1621154; Annot_ID_173406

SEQ ID NO: 15588 - DNA, 3003 bp, Unknown
  misc_feature (1)..( 3003): 2750-1469P.txt file - cDNA_ID_1010729; gDNA_ID_1620702; Annot_ID_165124
agaggaagatgacgacgactcattgggtgatcagattcgtgaactaaaggtcttgttttttgttactgtcatatagctgcaaatatcatctgttacatatttgatgtgagtttgttgtatatactgacatttgaggaatcaatgttttgtaatttggttggttacaggaagagctcataagaacaaagtcggatgggtacaacaaagctgatgcaagtaagagtggacactttgcacgtgacagtttaagtcaattgagagtcagtatcaacaaatctttactcatgtcgtgtccaaaaagagatgaatctgagggaaaagaggtgatcgtggatggtgaagatgtgctggaattgaataaacatattgagaagcttcacggttcttatgattctgttcactcctcatttgcaagtgcttcatgctatgaagccgactcgatgagtggagatgatgaggatgtctgctcagaagacttggagaaaccaatgcatggaaaccataaagatgttgactttgtagataatgatccaagccagctcgacaatgttgaattcgatacaacgggtagtggcatttcaatcagatcacagcttcctagttgcgttctagaagagccaattttctcagaatctccaaagtttaagaatgttcagaagagtgtagctgcatcgacaaagttttcagcaaatcctaggaatgtgtctgaaagctccaacattggagacatgaaagtcaatcagattagcccgtgtatgtcaaagaaggtttcaggtcctacagattctctagctgctagtcttcagagagggctgcaaattatagactatcaccaagggagctcactatcaaaaagttcatctgtttccttctcttttggccatatggcattgaaaccttgcgcagaaggtgagaatcttaatgcttcagtccaatcttttagaaaagataaagcttcagaaggtggattgtcgtcgattctcctatgtctttcatgtagaaagaaagttgaccaagaagctgaagtatgtccacaaaacctgagatatttgcctactttctctatagctttaattttggtaattctgtttcgttacttatcttataatctcttctatatcaggtaacagaagaagctggttcaaacgaaaaacatctcaagaacatgtgtatggagcaagcagctaaaattgaggagctaactctcctggtaaaaaccttgtaaactttaaagaatattagtgttataaaaccttgaatcagattttcaaaaattagttttgataattcttaacttagaccaatatacaacatagctgtggaagagcctgtgaagttaccagttgagtttcattgacgatatttgacaagaatggcaatctaaattgaataaactgtgttgtggccttgtttgcagcttaggaaatcagatgatggagaagatggaacagagttcatcaaagaaacatatgagacgaaacaaattagtgaagagtttggaaaaacaaactttgaggtaagtgaaaaggaagctcttctcaaggagattgcagacctaaagagcaagctgcagcctactaagtccacagacaatctgagatcctcgttactactacgatccattcaaatgcgcaaaagcattgatgttagcaggaatggtgagaacagtgatgatctagcgaaagaaagggagatgtggacagaaatggagagtgagtggatatccttaacagatgatctcagaatggatatcgataaccatcgcagtcgagctgagaatctagagtttgagctcaagcaagagaagctagccactgaagagttgaatgacgcgctcactagagctgtgcttggccacagtagattcatagagcagtacacagagctgcaggagacgtacaatgaacttggggagaagcacagtgtgatgatggctggaataacagatgtaaagaaagcagcatccaaggccgctatgaacggccgccatggaaagcgttttgccaaagccttttcagatgagctttctgccatcagagctgagaaagagaaagaaagagagctcttgaagaaggagaacaagaacctaagaactcagctgcgagatacagctgaagcagtccaagctgctggtgaactacttgtcagacttagagaatctgaacaggccttacaagtctctgaggtaaactaagctcattcataagatcataacactctcatgtggaaaatcttggtttcattaaatggctaaacttgaactcaaaccatcattgcaggaacgattcagcgtggtggaagaagagaaagagaggctgaagaagcaaatggagcaactaaagagcaaacacaagacagaaatagggacaatgaagcaatacttagcagagagtaaattaccaggatctgcattgttgcagccatggtacaaagatgaggaagatgaaatagaacaagtatcagaacatgaaaccggagctgtcagtttcgatgactacgaggatgatcaggcttggagagcagagtttggagctacatatcaagaccaccattactagtctttgtttcagacaaacgacccttctcgggtcatttactatgatcctccttagtacttttgtactgttatctttcattttgttgttctattgtatctgccattattgaaccgctaaaaagatttgtaacggttggaaacatttttacatgtattgattgattcatcttttcctgaattccagtgaaattcccagaagaacagaaatctaactgaaaccgcaagaacttactgtaagcccaattctgttaatgataatgttaaatgggctataaaatgagccccgtcatcagccgctgaagtgaaacgcatcgtttagtatcgtcgtcttctggggaaaatatctttttttttaaacactatcaattcgactggaaaaaggatatttccagattaggtagagagagagcaaaagtactttcattcagacttcagtttaagctatg

SEQ ID NO: 15589 - DNA, 271 bp, Unknown; identical to SEQ ID NO: 2999
  misc_feature (1)..( 271): 2750-1469P.txt file - cDNA_ID_1010729; gDNA_ID_1620620; Annot_ID_162234

SEQ ID NO: 15590 - DNA, 3003 bp, Unknown; identical to SEQ ID NO: 15588
  misc_feature (1)..( 3003): 2750-1469P.txt file - cDNA_ID_1010729; gDNA_ID_2926189; Annot_ID_200897

SEQ ID NO: 15591 - DNA, 3000 bp, Unknown
  misc_feature (1)..( 3000): 2750-1469P.txt file - cDNA_ID_1010763; gDNA_ID_2684256; Annot_ID_193127
cacccgcaattattatttaagtcccctattcgaactttttatctctagatattattagttctctcatgatcatgttcaatcctatccacacagatatatcatatttgttgatgattcgatatagaactatcgagatgtctctaatttttttcattatcttttgtaattcctgttatcttggaaacgttttaaagctatgtctgatatgtttatcaaataaaggaaaaagggaaagaaaaaataactatgcctgatattgactctccgacgaaaacttggtgagaagaccattcatgtcatttaaatggaacacacgaagaagataaatagtgaaattcggttggagctaggtccccatacctatcactagactaccatctaattatatatgatatatattatataaaaccacatttgatatgatcttataaattaatattatacaataattttgacttttaataatttatcgctcatttaccatttcaaaaattgtgaaggtatatatacaatagtaggagtacaaaattttgtatcattaacattatattttgttatcgccaattttctaccgtttcaatgagctagtgagaaatggagttgaaaatttgtacaacagcctacagcagtacaattaagttcttctagaagattttactgaaatggtcgctacttttcaacatacaaggaatttgcatttaatgaatcaaaagtaaattgcattaccatatatttctccaatgtattaaaatctgagattttgtgtttcgtcctccacagctcactcttcgagtttacattttttctttgtcgtcttatactttctctttttgaaacatatctccttattttcttggcttattttaactatataagaaagtacgtaatttttactatacaagaatttgtagttttcacttttcaggctcgaaactacaaggatctcagaattattataaaaaaggcgtaagaaatacaaagttggcgaatatttttctctgtaaactattgtcctaacattcgttacaaagaaaaacaacgaataagaaaatgcagaggtagatatgggtctaaaattttggattgttgacgtaacaaaaatatctaaattttaaccaatatatatctaaacgacttctgtgtattgatacaaaaaataacaaataaagataaaatattgatgaaaataaattttcctcaagtttccaaacgataggcaaatgttggttttaatatttgctgttaaaatcattttagcatagtggttaaattaaaaatgcttttagttagaaacatttagtgaatacttgttgttgttaaagaaacgttaagtggatacggtagttcaatactttaagtatgtttctattctcttttttattcttattcatcataatttttatattttcctgttttctcttttcaataataatattaattcataattaacttagatacattttctatatctttaggcctatgagtttctaaatacggccctagctacgtgtttttgtggtgcagctgattagtgcatatagctaaataaataactaaacaatgagatgaccgatgaagtgttcaacgtcggtcggtgcaagtgaacgcgcctcccgaaatgccacgtgtgtgttgttttgttgatcaaagaacatgggcgtgtgtgtgatctctttgaccagtcaaatcactcatactttggctctttcctcatacacacaaaatgtatacgtatattaattaaaagaattactgtgtgtagattttttcttatacgtcgtcatgtatttttttttaaatttggtcatgtatgtttttttatattctgcattaaaaataccaaaacaattcttatattagagtagagggagtaaaaaaacaaaaaaaaaacaaaacaaattgaattacattgttaattaaatttctttttttttttttatataactaattggctgttcggtcatttttgataaaaacacactaaaaatgcttcagaaataatctgattttgtattgtataaaatgccggtttaaataacaatgccataaattataagttggtagtattaaaaaaaatataaggtacatgtgtggacgtggtagagcgaaatcccaaacatcgataatgtgaatttgtatcttaatagaagttgtgtttcgaggaatggataggcttattttacttataaagtatatataaaaaaaaaagtataatactttcttccttgataaacgcacaaaattcagttcaatatcttctttagtttaacattactcaccacagaagtaacaatactctaccatctttataacctttcaatatatacaaatgtttatttctgttacatgacgtccatgtctgttcgtataaaataaaaaatattaaaatgtttcttttcacttcctatttttttcgtaataaaaaaactaagttgaagatatataaattattaaggtaatgaagaatgttaaaaatagaccttagaagttagaactctaatatatgaactgcaaggtccgagtgtcaaattcaaagctcgaaacatattaataaattttacggtatagggtaatttttcatatatgttttggctagattcaacgatatatattattatacctagcaaatttagatctatgtacatttaaaatacgagattctctgaaatcgttctattataacaaaagttgtcaggagagggggcatataattcaatatttgaaaaataagattcgcaatatatttttttctaactaaaataagaaagcaattttatatatttttcataaacaaataataaaaagacctacataaatacaaccgtcacttcacttgtttccttcatactatcaacttttctctatctatctctctctcttctttttccggcataacttctgtgttaccctaaactccataacctgtttcaccgataaagtgcctttgcttctatctctgtcactcttactacttgttgaacaatattctacaaaaaaatg

SEQ ID NO: 15592 - DNA, 3000 bp, Unknown; identical to SEQ ID NO: 15591
  misc_feature (1)..( 3000): 2750-1469P.txt file - cDNA_ID_1010763; gDNA_ID_2684256; Annot_ID_138102

SEQ ID NO: 15593 - DNA, 3000 bp, Unknown
  misc_feature (1)..( 3000): 2750-1469P.txt file - cDNA_ID_1010785; gDNA_ID_2214471; Annot_ID_133096
ttcttcaagatctgcttttacaggttcgattcctcttctatctcccgtttccaggctaaagaaggttcctttctattcaattcaactgttttgacttttgggtttgatcaaagaatttagctattatatttgtgacatcagagaatctgttgcaatccgtgattttggaaattttttatcatctgaaccaacatttttcatctgagtaggaggatcaaacatagaacggcgacgagatggttaaaaaagcgaaatggctgaaaaacgttaaaaaggcttttagcccagattcaaaggtaccagctttgccttttgttctaatcactatattgatgtgaaattcatgtcttgttgtggcttatcaagtcctatatttgttgtcttttcttatagaagttgaaacacgaatctgttgagtgtcaagatagtgtaatctcttaccctgtcttgatagccacatccagaagttcttctcctcagtttgaagttagagttgatgaggtcaactatgaacagaagaagaatctgtatcctccttcttcagattctgtgactgctactgttgcacatgttcttgtagattctcctccatcttctcctgaatctgtccatcaagctatagttgttaatagatttgcaggcaagtcaaaggaagaagcagctgccatcttaatccagtctacgtttaggggccatttggtatgttgtggcttgatcagaacttgtctgcttagtcaatcatgcattatacctttggttgaattttttctatctttgagatacaatgtgagagaacagggtttctttttcaaatgtaacgttttacttctatggtttctccaatgcaggcaagaagagaatcgcaggtgatgagggggcaggaaagacttaagttactgatggaaggatcggttgtacaacggcaagctgcaattactcttaaatgtatgcagacgctctctcgtgtacagtcacaaatccgatctaggagaatcaggatgtcagaagagaatcaggctcgacataagcaacttcttcagaagcatgccaaagagctaggaggcttaaaggtctcactctcttgtttatctcagatgcagttttcatttactactaaaaaaactcctttcaaactacataaattggttgagtgatagtaacattctactgcattactcgtgcttaaattcgctctttactaacctgcagcttttcatgcggttgtttaaatttatcgttgtctcttctgatgtaatctggtaatgcagtatcctgtgatttttttgtttattgctaagactagctctttcttctgtagaatgggggtaattggaactacagcaatcagtcaaaggaacaagttgaagcaggtatgttgcacaagtacgaggcaacaatgagaagggaaagggcattggcttatgcattcacacatcaggtacttccatgtatacctaactcaaatttctctgcataatggcatagaaacttgcaagaacctgaatagttgcccttgttgacaaagcagtccttaaatgttgcttaagattcctgaggcctgaagtttgatatctatctacataactctagctaacataattggatatggtttaatgcttatgattatatccgactcatctttgcagcaaaacttgaagagcttctcgaaaactgcaaatccgatgttcatggatcctagcaacccgacttggggttggagctggttagagaggtggatggctggccggccatgggagagttcagagaaagaacaaaacaccaccaacaacgacaactcctcggttaagaactcgactaaccgtaattcccaaggaggagaaacagcaaaatcttcaaaccgcaacaaactcaatagctcgactaaacccaataccccatcagcatcatccacagccaccagaaacccgagaaagaagcggcccatcccatcgtccataaaatccaaaagcagtgatgatgaggccaagagctcggagaggaaccgtaggcccagcattgctaggccatcggttagtgatgacgagaccctgagtagctcaactgctaggcgtagtagcaatctgattcctacaacaaaatcagcacgaggcaagcccaagtctcaaacctcatcacgagtagcggtgaccacatccacaacagaggaaagcagtatattaccggagaaagcaccagcaaagaaacggctctccacctcggcttcacctgcacccaaacccagacgatcctccgccccgccaaaggtggaaaaaggcgttctcaaggcagagagaacgccgtgaccaaccgaggtatagtaattcatcattatatgattttttgtcgcaatgaatatggagttatgagattgtgtatcaagtataagcaatgttggttacaagaaagtgttacgttgattcatttgtgcagtgtaagtctctctattgtttatttcactctttcatatattaaagaaaactagaataatacttacaacttgaagaactctcttgtagtcttgtgtcattatgatcgtgttggcagtgaaacgcatattttgttgacgttgccaactacttcttcattctcaactctctattagttctattcaagattttaacaccaagtttttgaaagataaagagtatacacaactctcagtactaatggatgcaaactaaatgtaactgatccgaatttaaaccataccaaaattattgatttgataaaaccgaatccaagagaaaataaaccggttctgtttttatttttttccatatcgaaagaaatctaaaacccactaaaagagttagaaggtttcgactactatttacgcaacgcaaccaacctatctgggccaagtccaagcaaaccaggaaatagctaaaaccctaatcctcaaattgatcgacaaaatcgaacactgaagagttgtttcctatcagatcagatcgtgtttattttcagtacactgtctagctcaaatcctctacaacaatg

SEQ ID NO: 15594 - DNA, 3000 bp, Unknown; identical to SEQ ID NO: 15593
  misc_feature (1)..( 3000): 2750-1469P.txt file - cDNA_ID_1010785; gDNA_ID_2214471; Annot_ID_183034

SEQ ID NO: 15595 - DNA, 3000 bp, Unknown; identical to SEQ ID NO: 2861
  misc_feature (1)..( 3000): 2750-1469P.txt file - cDNA_ID_1010811; gDNA_ID_1620610; Annot_ID_161881

SEQ ID NO: 15596 - DNA, 3003 bp, Unknown
  misc_feature (1)..( 3003): 2750-1469P.txt file - cDNA_ID_1010815; gDNA_ID_1620581; Annot_ID_161150
atgtgtgtataaattcacgtaaatgtatatgcgatgtgtttgaatatagcagaagaaagtcacagaaaaaatattttaagtgattgaaaatgcaaaatgtgctataattatccactatcatgagaagtactgattcaaagtacattgtattatttattcagaagccatagtgcagtaattcgtgaacttagtcgaaagggacaaccaacaagcagttaagtactttatagcacattcacatttgctctgcttcaagtgttctttccattttaagaaaaaaatgagtttcatcgccgtcatattgttcaatggaattatcagttctctcaaggaaaattaataagtagatttactaggactgaatcacaaacataaccaaataatagctcaaatgcgcagtttgataaagattacttataattggatctacctgtacccctcttcatatgcctgaagtgctcctgtccattccccaatacagtccaaaccattaccaatattaatcttcgctagtgcttgaccctacaagagaccaccataagtgaatattagaatcaggaaagaagaatagctataatattgacaaatccaagaaaaggtataatcagttttccacagaaaatgttcagtagaggcctaatgaattatttctggttttgtgaatcaaattctgatgacagtagtgaacataggtttttataattaatcgtgcaagcaaacaaatctcacctccagattaccaattgcttcatgtccctcataacttcttatgaaccacttcagggactttctgaaatttctgagattttggtaagattctccaacaatcatgaaggcatcactcagcttttccttgtcacagagttcatctgatattttcttcttcctttttgaatattgaagatgctaagacattcaaagaagaaatagcaaccctttagttgcatgcaaacttcaaatggcagcctcctacttaactttcaaaactatatcacaagtcattgaaacagtgatgcagagacttggatcactcagtatccgtatgatacagaataatcatcgttttgccacataataactttactttgcaagttcagaacaaagatattatcccagcattcaaaagataggttttcttgagagaacaagaatcatgtaattctttgataatatagtcttcctgactgatctgaaaagacagtgtcaatagcagaagttcacaaaacttaaatcaaatctaagaaaatagcatatttttcctactccatactacctgatgaaatctcacaatgcttattcatcattaaaaacccctacgatggacaactttaacttctggaaacttttcaaataaatgcgaacatggggtggagtgataggactaaaaaggaaggagtgtttaagttataaaactcaccttcagccatgcgaataccatgctagatttatcaataagacttccaagacaagcatttacttggagcatagactttcgttcctccgaagtgcctttggcatcagtcatttctgcagacaacttcttaagcataagctcttcttctctcaattcttccataactttcatggatttcttgactatcttggtattatgctctatctgttcaaccaatgcactctcgtcttgcatagatttcgctagactagaagctttaccataacataaaagagcatcaatgtacttttgggtcttgttgtgtaattcagcgagattgatataccccttcgcttctccttggacatgattaatcttatgacagatattaatatccatctcaatgtgtttctttgcttcatcccaacttctcagcgccataaaaacgtttccaaggttatgatgaagcctactccgagcagcatcatactctctcacctcctcttcatcgcaaatctgcagccctttcttaagaatagtacgggctgcttcaggattatcaagatcaaggtcaagcataccgatgttgttatgtgcgttaatatactcctcaaggaatccgctagattctccaggaggtggtttctccttgagaatctgtgcaagttccatggctttcttaaagtactttttagcactctgaatggcttcacaatcatcctcagacttcaagaacatttcatggtaagtacgtccaagttgagtacatgctctttgcttctccacagtgtcattagcttcttcagctagctgtaaatgcttcttctgcaaccaccagaaaaaaacacaaattcaaaatgaaaaactcaaacaccaaaattattcacggaaaattcaggaagccaacaataaccaagtaggaaaaagcaattgattcaagagggcttacctgataaatcaaggcttcttcgaaattttcgaggcggagatagatctcgccaagagactgacaagtaggtaacaaatctttcccaggtaaatacttgacggagatatcgtaatcaatcctaaaccacttgagagcatcaacgtactctccatgattcttaaggatatcgccgacattgttagcccacctcgcctgttctctccggtcacccacttcttctgctttccggtacgctctcttcgccgcagctacatctaatcgacccatcggatgatgatttctccgttcttcaattgaaaggtttttgttttcttccttccgattttcagatttctcgaaatttctttctcagtgattttgattttctcattttctccagtcgccaaatttttggtcccatcccaaactatcccgccaaaattcaagggtaaattagaaattttcataccctaaatcctgaagttataggccttttagtttgggccttgggtcgagtttattttgggcttcttatatcctcctgtctcctgacaagaaaacaaaaaaaccctaagggttctaaggcactcgctatataaactatcattttgcgccgcccgaacccgaagaagaactctctcttgtaaacctgcgatctgaatcttcccggcggtgaaaaatg

SEQ ID NO: 15597 - DNA, 3000 bp, Unknown; identical to SEQ ID NO: 4155
  misc_feature (1)..( 3000): 2750-1469P.txt file - cDNA_ID_1010997; gDNA_ID_1620687; Annot_ID_164663

SEQ ID NO: 15598 - DNA, 2756 bp, Unknown
  misc_feature (1)..( 2756): 2750-1469P.txt file - cDNA_ID_1010997; gDNA_ID_2926209; Annot_ID_202503
gatcaatggccctttactgtgtctgattgcttcaaaacgtgcagccaaaatatcatagtcaggcagttttgggtgaacctggtgaccgctcgagtcctgtctggactcaccggactgaggagcctgaggcggtgctcggtttggcgggagagaagaaacacgaccctgtgatggttcatctggctctgtctcttcctcgtagtagtctgactcatcaaacttgatctcagaagttgcaggaggaggaactgatcgagggttgtagctgtgtctcctcctcattgtttcttttgcttctgcttcggtattggtatactcttcctcgtagtcagattcattaatacccggattgttgtagctgtgtctcctacccattcctctgttttctgcaccaggttttgcgtaataggaacttgtttcggagtctcgtgattgtcttcttgaacctggatgatgatgatgatgatccatgtactgtgaatccttctggtgtgttgaatgatcagaagatacagagaactccttgttgctgctgtctcttctggtagctaataaggaggctacttgtgctgctgcaactgcctgtttggctaattctgtagctgcttccgctgctgactcggtgtcatgataatgcgtgttgatgctcatgctactagtcgatctgatgagcaaaacaacaataagacttcattgtttcagatcccttatttcaagctaacgactggaatggatacataccttggcactgctttggtaggatcaataggctcgttgatagctgcacgattaactggtaagcttgaagcgctaacaaacttacgtggcccgtcctgcaagaagaacacagcttctaagattctgattttgaataatgaaagaggaagttgagaggggagattaagagacatactatgctttcttcttgaggtttgagaagttcttgctctgtctctgtagtatcccaatcaacctggaattcctttgcaatttccttcatgattttcagtttgtattctccaccgggatttctaaccgaaagcttatcaatcaactacaaacgcacaagaaagaagaaaacaagttcgatttcatcttgcatctaaaaacgaatcacagttcaagttagactaatcagaaacatgaatgatttagttaccatccggttaacaccgcagctaggacgcaaatcagtagcagcagatacaaaatctttcccatatttcttcgcaaagatgtctctaagatctccaagctcaggaatttcagagcatctaggcgcagcaaaaatcaaactagcaataccttccttaagatccacaggacattgcctaaaagaaagccaaacacatacacatataagaagccaaactgaagcaaagcaaagagacaaatgaaaactgatagtagatatgaacatacttttgcttagtgatgatagtgagacgagaaacaataagttcacagaaaagctcaatgatttcgtttgctgcctgaatgttctgttcccttatcacatgctcaacctaaatttgtcaaaaaaagcaaaatcttcattgaattgaacgatccagggaaaactctaacaaagtgaaccaggaaagtgaaatactctgattcgagcagtggcatcttgaccggattgaagaagaacagcgatgtcacgcctcatttgcttcaccacaactaatctcttgttccttataagctttatacgagccacagccatcttcgccgccgttttgctttttgccgattgaaaaaaaaacagactttaatcagatacttacatcttagaaaagcccagatcggaaatttctcaaacacagatcaaagtttttgtttttttctacaaaattaagaaactgagaatacccagaactaagaagcatcaacacactaaaaaaacctaactttttccaacttcccaaaatcaaacacggaaaaaacattcaatacaagatttttcttcgcagtgtagcagattgagtgaatttaggaatctaagaagcatcaaatcaaataaaattgagtaccatttagaggagttaaagccacgacggaagagagaaagactaaacttcatgagcttcttggtctgcgcagaagctacttcggccgccgtcattttcttttcaccacagcgtctctgacacagaagaagaaagagatgtagaagaagacgaaggctagtgtgtgcgagtgtgtatgtaacggtccgctgaaattaggaaagtaacgctcttttagaggtcccacaagaacacaccgacttatgatagctggacttggaccatgtcaaaatatagccgttgtatcttacacacgttgccaaaaacccaacgagcagcatcctaagcaacaccgtggcttgttgattgattacataatgggcttagatgggctttggtaatgggcttcttttgagtcaaactaactttttaaaaacttttatcaatacagcgaataatttgaagatcttctcattaatagtagaaatcttattaggtaacaattgtcaattggattgtcgaccatattaggagatttgatcttatcttatctcattatcgatatcattttaattttcaccacaaagcaacaatttgatattaatcttcctaaattagtacactttctctgtcctataaaaaacgttatacaacattgtctatatcacatcgttttcttcaccaactctttctagtaagtctaaaaaagttatcaagaagaaacataatctttctacgacgatg

SEQ ID NO: 15599 - DNA, 3000 bp, Unknown; identical to SEQ ID NO: 4155
  misc_feature (1)..( 3000): 2750-1469P.txt file - cDNA_ID_1010997; gDNA_ID_2926210; Annot_ID_202530

SEQ ID NO: 15600 - DNA, 3000 bp, Unknown; identical to SEQ ID NO: 2057
  misc_feature (1)..( 3000): 2750-1469P.txt file - cDNA_ID_1011058; gDNA_ID_1620482; Annot_ID_158374

SEQ ID NO: 15601 - DNA, 3000 bp, Unknown; identical to SEQ ID NO: 1360
  misc_feature (1)..( 3000): 2750-1469P.txt file - cDNA_ID_1011462; gDNA_ID_1620391; Annot_ID_155605

SEQ ID NO: 15602 - DNA, 3000 bp, Unknown; identical to SEQ ID NO: 1148
  misc_feature (1)..( 3000): 2750-1469P.txt file - cDNA_ID_1011560; gDNA_ID_1620363; Annot_ID_154723

SEQ ID NO: 15603 - DNA, 3003 bp, Unknown
  misc_feature (1)..( 3003): 2750-1469P.txt file - cDNA_ID_1011820; gDNA_ID_1620729; Annot_ID_166059
tcataccgtcatcgattacgcttgaactctctaatttcgtctccgatgtgattgaatcagttgattctgtatcagagccatgatgaagaagctcccaatcatccatgatgatcgaattcgaagatttcagattgggattgcaataatcagaaaccctaatggataaaaccccaaatattggaaaaggatcgcaacaaattagagcggttgatgatggaaaagaatggttcttatccactttgagaaagtaattacgtggaggtatctaattggttgcgtgtcaatctcagtcctcaactaaattttttggcattaaagtttagtagattcagagaactatagtatttattcattttgttctttcatttttattttattttttaaaacgatttaattaggattcggcaataaatcgtatggtgcggatcaaatgaattaaacaaatatgtatcggttaaaatagagtagacgatgtaagaaaaatatatataatcaagattcaaacggttgaggtgggttttgcaaataaatccatcggtagattgaaatattttcttatttattatttatagattagtatttataatagtactgaccaaaaatatagaaaaaaaaaatcggtaaaaactttagaccgattttatatagaaataaatttagtttataacggattattgtccgctccaaaattaaatggtttagtctctaatagtttagtttgtttcgaaaagaatggttcttatccactttgaggaagtagttatgtagaggtatctaattggtcacgtaacattctcagtactcaactagatcttttgacattaaaggttggtagattgagagaagtatggtatttattccttttgttctttcatttttttggtttttcacaatgatttaattagggttcacgacgaatcgtatggtgcagatcaaatgaattaatcaaatactagatgatttacccgaactatgtacagggagaaatagttatatgaaatatataaacaagtttttggaaacagattttatattatcacttgatatataagtgtgaatatttgaatatgatttagtaactgatatattttggagattttattagttaggaattaggatattctatatttggaataagattttaaattaaaatattgacccaaaagaaaatctgaaatatcattcctataattcagaaatatattcgaatattttttgtattttataagattttattttggaaacaattcaatataaaaactgaaaagagtatgaataattatgttttaaacgtaataaatttttgattatcttttattattcttcataattctatgtagttaggattgatttattgcatatcccttattttattaatcaatttatattgttacgataaggttttgggttgtaaataaattttaactaaaatgagtaaatgactaattaaattgaataaactgtgtaaaagttttaataaattgataaggtaaaaatttgaaaagaaataatattgaaagtaatcagtaagcggatacatttttaacatagattaatattgaaatattgttcatagtgaatgtgtaataaatgaaatgttactaactaatttatgtaaaactatgttccgaatatattcaagaatcatatgggctcacatatacatttagattttttgcaatttataacaaaaaaatagaatgtcatatatgttaaaattctaaatgttttctataaaacctaaaaaaataaagtacgaaacatataataaacatttatattatatgttgttcatcataatttatgatatatactttttacttgtttgctcaaatatatatggttttttgattaattttctttattaattgctactctcttaaatgtagaggaaaaatatgcataagtaccactaatggcattatatgtaattagtctagtaaatattggataactattaagtttgttgaaagtttttctggttacgacatgtcagcatgatagtcttgtaaatcacacgtgaatgtaaggttttttatttaaaatacttctcaattaatatataggggatgtatcagttaaaatagagtagacggtctaaaaccatctccaatgcacacctctatttttttctttcattttagagacaaatttattttagaggaaattagattttgctccaatgtattcttctaaaatagtttttttctccaaaatagagaaaataaatagattttactctttatatagattaaaacgtaagattcctttattttagagaaaaatctattttagagacatatattgaagcaaaatgtatctaacatagaatcacctctaaatggagaaaaaaaatagagatggacattggagatgtttagaagaatatagattcgagcggttgaggcgaataaatctttctgtagattgaaatgtttattatttattatgaataaattatcatataatagtgtaaaccaaaaattatagaaaaaaccccgctaaaactacatacccattttctagaaataaacttaggttacaacggattgttgtctaccccaaaatttggatggtgtaatctgctaatggtttagtccgcttcgagtaacatttaagcaaatcgttagtataaaatgggtaaaataagtgatactcaaatacatattaaataatgtcaactttaaaatattttaaatatttttcatgtttcaaataattttcttacaaaatatatcatttaaattcttaaagaataaacaaattttaacaagaaagtaaacgtgaaccatacttcaattcttagtccaaatgtagttcatacaaatatgacaataatttaacaaaaaataagaaaaagtattcttccgggttaaaaaaatagattcgatcaaacttaaggtcttttttgttaaagtcttcttttcgcaaaaacctaaaatctcctctcctttgtactctcaagcttcgttttttcttcttctccgtccaaatttctccatg

SEQ ID NO: 15604 - DNA, 1539 bp, Unknown; identical to SEQ ID NO: 9876
  misc_feature (1)..( 1539): 2750-1469P.txt file - cDNA_ID_1011923; gDNA_ID_1974096; Annot_ID_180696

SEQ ID NO: 15605 - DNA, 3000 bp, Unknown; identical to SEQ ID NO: 8019
  misc_feature (1)..( 3000): 2750-1469P.txt file - cDNA_ID_1011951; gDNA_ID_1621183; Annot_ID_57410

SEQ ID NO: 15606 - DNA, 3000 bp, Unknown; identical to SEQ ID NO: 8019
  misc_feature (1)..( 3000): 2750-1469P.txt file - cDNA_ID_1011951; gDNA_ID_1621183; Annot_ID_174330

SEQ ID NO: 15607 - DNA, 3003 bp, Unknown
  misc_feature (1)..( 3003): 2750-1469P.txt file - cDNA_ID_1012003; gDNA_ID_2684224; Annot_ID_191884
actataaggaaagtcaaggtttgttatctttgaccaatgcatttataaacttataagttctaaattaagatgcttaaatgattcatcgcatacctgacgaccaatatcttcagcaattgggctggttccatccatgtgaagtaacaatgatgatttcagctgcagagaaatttaaaatcagttggcatttaaaatctatctacaaataagtaaggagttcgaagaaacaggaggaaaagaaaaaaaaaactttaaacagatcacatttgtaactagcttaaagctgaatcttgggaaagagagaaagaacagttgggcgtttacctgatttcgtgcacgtgtcacatcagcgtctgaaactcggtaggccagcttggttacctcatacataatggcatatgataaatcatccaagcaatcggcctgaaaaaagtaccttacaagatgttaaaagagatataatacgaggcattcatgagatgaaactgctaatattgacaaatacaagaaagagatgaaactaagatagctatggagttctgggttgaccttggcaactgcataaacgccgaacagtccagtatccttgtagttagtgttgaatgccattatgctttctgctatttcattaatggcaaccctctgggtcaggtcagaactgcacatagaaccataatgttcatcaacacattgcgaaatagcttttcattaaatccatcattagaaatattagccagagagtaaactcaccccacgtgttttccaccaccaacatttttgttccacgaacccaacatagtttgcataaccataagagcaacggaatctggatcagtccaagatgctccctcaaaggcaacagcaaattgtgcaaggggtaggtcgtcatcaatcattcggacctgagaagaatttcacggactaaagaatttagaaagatggaacattgcatataacaaaatcatatggttgtgtccttacctcagaaccagtaaaactagcaggttcattggcaaccagttgagaagtagttgttggatcagacgacaacttggtaaatagcttcttcacttgctcaacaacttcctcatgcttaacagctcctgcagcagcaatcacctgaaaatgttttggatgaaccaagataagaatcctaaaaaattcaataagtgattgtaggaaatgataagaagtaaccaaaatctataccatcctggaagcagtgtagtgagtcttaatgtagttctgtagatcctctctggtgatcgatttgacgttctgagcaggtcccaaaatagttcttccaaggggtgtgtattggaatgcagtggcatgtaaatggtcaagaaccacttcatcggtttgtccctccacctacgaccaaaccaattatcaaaaaactaaagcttaatgtgtattctatctttaactgattaaagaaacaaataactctaaccaacacgtagagcagagtaccaagcgctctagtatctcccttcatgcacatttcccaacaacaatacgaccaacatatgactaagccaataaaaccaaaacatgcgagagataatccaaaaacagaacaaagttttcatttttagagcaatggtttatataaacacaataacatctctctatagaacatgtgcttatgccaatacaaccttaaaaaaagggaagataacttaagaacatactaaagttttcatttttaggcaggcacacgggaaactgaaactaagggtattgatctaaaaaaacacaaactacggtccatagtaccacctcactaaaaaaaaacgaaagataaatcgaggacagaacaaaaagtttagttttttaagtacagagataacaaatacatacctcttgcatttccctgaggatgacatctcgttcgcggttaattctctgttcctcgaacttagaattctgtaggatatcagccaagacatccaaagcctggttcacattggaatccaaaaccttagcataataagtggtctgttccctcgatgtatacgcgttcaggtgaccaccaatatcttcgatctcttcctccaacgctctcactgtacgcctatccgtgcctttgaatatcatatgctccaaaaaatgagccgttccgttggtctcatcggactcaaaccgagatccagcgtcgatccagactccaacggtggcggtcttagccgagagatttgactcagtagcgactcgtagaccattgggcaaggtagtgacacgagtctccggagctgacaagatgtgattgtgggaagcgaggatcggatgtggagatgcgtatttaaggaacctcttatcaggattctcgagcttcttgatcttattttttataatctcagccgcgtggtcgtatggcataagatgcggcggcggtggagatagagccgtcggagatgcggaagccggcaccgaatcgatagctgaaaacgaagaggaagatcgtgtggcttgagtgaggaataaacgcctctgagatcggcgagctagggacagtagattcttcatcgccatggctgatgatggcttctcttcgctctctcaatctctctagggtttgattaaaaagccaaaaatggcagagacgacttgagatgcgaactaatagccagtggttaagcgattataaaacgacgtcatttaatgttactaattaagaacggtgtcgtttaggacataatactagtcaactgatataataaggccgtagtaggcgcattatcgtatcaaagaacattattcatactggttagatagtaaggccgtatgaagaattaggcccattagtgtgggctgagaacgggttggattttttgacccggatatggggagaaaaccctaatcgaaatatcgtggccgtatatataagttttgttattggagaataaaaaccctagtctttgcggagagagattcagctgcgttgggcaaaatcccagacgaagatcagtgattagtcttttgataacttgagccatg

SEQ ID NO: 15608 - DNA, 3003 bp, Unknown; identical to SEQ ID NO: 15607
  misc_feature (1)..( 3003): 2750-1469P.txt file - cDNA_ID_1012003; gDNA_ID_2684224; Annot_ID_137520

SEQ ID NO: 15609 - DNA, 3003 bp, Unknown
  misc_feature (1)..( 3003): 2750-1469P.txt file - cDNA_ID_1012056; gDNA_ID_1620622; Annot_ID_47051
ttgaccaatgcacggcttaagtgtatactgtaatatctcataccagacctagcagcagcttctagttcaagaaaggatgcaactacgacacttcttgccaattctatatcagataatagctttgttatccactcctcaagagagcaccttctctgcaacaagatcaaagctatcacttatgaaacaaatagtttgcacgaataattgtaacattattgttgggacatgctttccgtatattaatccacctgaagtctaccactaatctgcataattcgtacttaatcttggttggacaagatttggagaaaggggaaataatagcactaaatagaaatatattgaaagtaacagcagttacacaagtgacctcattcagttagcctcaagaaaaaatgcatacctcttctaacactgctctgcttttcatacgcaacagccctttggggggagctgatgggaaaccttttctaggaaatgttcttttaagctgtaaggaaaacatgagtgtgcatatgctgtcaatcacattgcatttaaaacatgaagaaaaaatgaagagttagatcggcctatattcagggagaacaaaatcttacatccgttaatagctttagaaaatcattaaatcgtctcaacactcctcgcattgtggtaataccttcaggggattgcacacttacctgaaccctgtaaaactgttcatctaaaatgttatatatgtaagcaagttcaactatattggaataacgtatgacatgcacagcaataaaactcttcagcagcaaaaaaacaaaaaaaggcacactccgctagataattaagttagtccaggaacacaaatatatcactgttgatgttgaattttattgatccgcagacgttcaagatatggttgacataaccagttcagctaatttgctacaagtcgataaacattgaaatgctcttgcaagagataaacactgaagaattcaattaccacaacaggatctgaatttcttgattttggaaggacaatccacgagggtattgtaacgcaataactccatccagttcgagggtcatgaggccaaacagtatctctaccattctgcagaaataaacataaatatctcaaaatctccaacttgtacatatatggaattcaatcgagtagaatgatactttatagtctggagctatccaaagctgcataaataaagatttagctacccctgatgttaaacaaaagataaactaacaattcaatagagggcaacaacagaattcaccaattgtaggaaatgacttctaatgccttatgtggtgagtctaccattggacttgctggtaactacactagctatccccatagcttgggactaataacaaagacatccacatttatctcaagtcccattagaataaagcaggcaactgaagaattctagcacggcacttccaaaaggtaacgtggtaaagtccaataaagttcgaatttttggcaacaaaagaactcacccatttgcgcggtggaggactccaatccattcctaatggaagcggcgatgttccgtcatgcctgtgcttgggcggactccgtctctgcatcatctccaccaaactttacctaagtctctctctatctccagctctccggaatccgaatttgatattccgatcagaatcaatcggagacacgatcgagtactaatatcccgatcgagaaaccacaaattacgaaatctgagcaaaagatgatggaagagtaagcagagcgtagggtttatgaagatcgtcgtgagatcgaggagagagagagaggacacagatggaggcaaaagaaggaccagatggcgtctctcagggtcttctctgcctctgggttgaattcccacagaccacggtgattaacggcggtgttgtgacgtttactttaacggaaaagccgagaagaaacaacacgtgatttgacggaggcgcgaagcttaccgtgtatatatgtgtatatgtcccactttttcccgtgagattcggtttgggtcgtgaaccacgtcttggtttagagttgggaattgggattttatatctgttgtacattttgtaaggcttatctctggctatgtttggtttaggctcagctcattggatgtcattttcatttttctgcctttaattttccttttttttttttgtctttggctaaagttagtatattattcactcatatcttattcaaactcgaaacccaattttgacccaaatcgtttcaaaccagaaggaaatagaccgctttttggttttgtttggtacgtcactaccacactaaaaaaaaaaaaactgatttaatgatgatttgaacacatccctacattttatccttcatattcgtaaaaatttacactttaaaatcacatcttcttccacggataaattacaattattcgatctttttgctcagatttctctatttgtttgaaactgatagaatttgtttgttttctttgtatttcttataagtttgatatcaaactaatttagcgttaaccattaataatccttataaaacaattcacggtacaatattttcgaaactgaagcaaattgttttcttttcatatttatattttttacttattagaactaaattagttccgacaaaacaaaaagaactaacttagttttgcccgtgatattttgacaaaatttcattttgatccttataataatacagtattttaaaaataaatcaacgtagctatccgaaattaaatatttgtaatcagcggaggcgaaaaggtctccagctccagctaaactccaagaggagagagagagaaagagattcaattatatgcagagagaaaaagaagccaattggttctctctctctctctctctctctctgattgattgatccagcgattcgtctggctggctcggtttccgcgggaaaaccttcttcttcgttgaccttacacgagttttgttgattcggcagggggatcgacgacggagatg

SEQ ID NO: 15610 - DNA, 3003 bp, Unknown; identical to SEQ ID NO: 15609
  misc_feature (1)..( 3003): 2750-1469P.txt file - cDNA_ID_1012056; gDNA_ID_1620622; Annot_ID_162340

SEQ ID NO: 15611 - DNA, 3000 bp, Unknown
  misc_feature (1)..( 3000): 2750-1469P.txt file - cDNA_ID_1012056; gDNA_ID_2926201; Annot_ID_141525
accaatgcacggcttaagtgtatactgtaatatctcataccagacctagcagcagcttctagttcaagaaaggatgcaactacgacacttcttgccaattctatatcagataatagctttgttatccactcctcaagagagcaccttctctgcaacaagatcaaagctatcacttatgaaacaaatagtttgcacgaataattgtaacattattgttgggacatgctttccgtatattaatccacctgaagtctaccactaatctgcataattcgtacttaatcttggttggacaagatttggagaaaggggaaataatagcactaaatagaaatatattgaaagtaacagcagttacacaagtgacctcattcagttagcctcaagaaaaaatgcatacctcttctaacactgctctgcttttcatacgcaacagccctttggggggagctgatgggaaaccttttctaggaaatgttcttttaagctgtaaggaaaacatgagtgtgcatatgctgtcaatcacattgcatttaaaacatgaagaaaaaatgaagagttagatcggcctatattcagggagaacaaaatcttacatccgttaatagctttagaaaatcattaaatcgtctcaacactcctcgcattgtggtaataccttcaggggattgcacacttacctgaaccctgtaaaactgttcatctaaaatgttatatatgtaagcaagttcaactatattggaataacgtatgacatgcacagcaataaaactcttcagcagcaaaaaaacaaaaaaaggcacactccgctagataattaagttagtccaggaacacaaatatatcactgttgatgttgaattttattgatccgcagacgttcaagatatggttgacataaccagttcagctaatttgctacaagtcgataaacattgaaatgctcttgcaagagataaacactgaagaattcaattaccacaacaggatctgaatttcttgattttggaaggacaatccacgagggtattgtaacgcaataactccatccagttcgagggtcatgaggccaaacagtatctctaccattctgcagaaataaacataaatatctcaaaatctccaacttgtacatatatggaattcaatcgagtagaatgatactttatagtctggagctatccaaagctgcataaataaagatttagctacccctgatgttaaacaaaagataaactaacaattcaatagagggcaacaacagaattcaccaattgtaggaaatgacttctaatgccttatgtggtgagtctaccattggacttgctggtaactacactagctatccccatagcttgggactaataacaaagacatccacatttatctcaagtcccattagaataaagcaggcaactgaagaattctagcacggcacttccaaaaggtaacgtggtaaagtccaataaagttcgaatttttggcaacaaaagaactcacccatttgcgcggtggaggactccaatccattcctaatggaagcggcgatgttccgtcatgcctgtgcttgggcggactccgtctctgcatcatctccaccaaactttacctaagtctctctctatctccagctctccggaatccgaatttgatattccgatcagaatcaatcggagacacgatcgagtactaatatcccgatcgagaaaccacaaattacgaaatctgagcaaaagatgatggaagagtaagcagagcgtagggtttatgaagatcgtcgtgagatcgaggagagagagagaggacacagatggaggcaaaagaaggaccagatggcgtctctcagggtcttctctgcctctgggttgaattcccacagaccacggtgattaacggcggtgttgtgacgtttactttaacggaaaagccgagaagaaacaacacgtgatttgacggaggcgcgaagcttaccgtgtatatatgtgtatatgtcccactttttcccgtgagattcggtttgggtcgtgaaccacgtcttggtttagagttgggaattgggattttatatctgttgtacattttgtaaggcttatctctggctatgtttggtttaggctcagctcattggatgtcattttcatttttctgcctttaattttccttttttttttttgtctttggctaaagttagtatattattcactcatatcttattcaaactcgaaacccaattttgacccaaatcgtttcaaaccagaaggaaatagaccgctttttggttttgtttggtacgtcactaccacactaaaaaaaaaaaaactgatttaatgatgatttgaacacatccctacattttatccttcatattcgtaaaaatttacactttaaaatcacatcttcttccacggataaattacaattattcgatctttttgctcagatttctctatttgtttgaaactgatagaatttgtttgttttctttgtatttcttataagtttgatatcaaactaatttagcgttaaccattaataatccttataaaacaattcacggtacaatattttcgaaactgaagcaaattgttttcttttcatatttatattttttacttattagaactaaattagttccgacaaaacaaaaagaactaacttagttttgcccgtgatattttgacaaaatttcattttgatccttataataatacagtattttaaaaataaatcaacgtagctatccgaaattaaatatttgtaatcagcggaggcgaaaaggtctccagctccagctaaactccaagaggagagagagagaaagagattcaattatatgcagagagaaaaagaagccaattggttctctctctctctctctctctctctgattgattgatccagcgattcgtctggctggctcggtttccgcgggaaaaccttcttcttcgttgaccttacacgagttttgttgattcggcagggggatcgacgacggagatg

SEQ ID NO: 15612 - DNA, 3000 bp, Unknown; identical to SEQ ID NO: 15611
  misc_feature (1)..( 3000): 2750-1469P.txt file - cDNA_ID_1012056; gDNA_ID_2926201; Annot_ID_201869

SEQ ID NO: 15613 - DNA, 3000 bp, Unknown; identical to SEQ ID NO: 4497
  misc_feature (1)..( 3000): 2750-1469P.txt file - cDNA_ID_1012082; gDNA_ID_1620711; Annot_ID_49012

SEQ ID NO: 15614 - DNA, 3000 bp, Unknown; identical to SEQ ID NO: 4497
  misc_feature (1)..( 3000): 2750-1469P.txt file - cDNA_ID_1012082; gDNA_ID_1620711; Annot_ID_165438

SEQ ID NO: 15615 - DNA, 3000 bp, Unknown; identical to SEQ ID NO: 4497
  misc_feature (1)..( 3000): 2750-1469P.txt file - cDNA_ID_1012082; gDNA_ID_2926156; Annot_ID_139514

SEQ ID NO: 15616 - DNA, 3000 bp, Unknown; identical to SEQ ID NO: 4497
  misc_feature (1)..( 3000): 2750-1469P.txt file - cDNA_ID_1012082; gDNA_ID_2926156; Annot_ID_198409

SEQ ID NO: 15617 - DNA, 3003 bp, Unknown
  misc_feature (1)..( 3003): 2750-1469P.txt file - cDNA_ID_1012088; gDNA_ID_2910745; Annot_ID_193741
gatgaaaaaaaaaaaacgatattgctatttgatttcctatatttttgtatgaattgattgtagaggattcttcttcttctgaacatattgtagtaatatatatatttttaaagaaatattagatcgaatctcacaaacggaagaatctttccacgttttgaggaatacggtctgtcactgtcacctacacatatgaaatataagtctgtttagggtttttagcgtcggtcttcagattttgttggaataggatgtcctaaacatcaaagatctaaaaattaaatcaaaattgaagaaaaaaccttagatacagatctatttttggacatttagtcactcttttggacgcttctttggacacacaaacacacataccttagacacatttttcaaacatttaaaattttagatcctctatatttggatcccatcattggacaatgtcaaatataaatctagttcaaatgtctatttgtaaattttttattgtaaaatatggatcccattgttgtagatgctctaagggaaaatacgtatggtcaattttgtcaagattgagaaagaaaagttgaaccatatataatataacttaacattgattatgtttttcttgtggtatgttttgttgttttgttgtttttagttgtagttttcagtcttactctcttctttgtttgattgtttccctattaatcgctgatgcaattcaaaaatggtataaatatttaacgttataaattaatataaggtgagcaggaaagctttatatttctttattacttgcaagtttcattacttgtatttcatttcaatatttataggataaagttttataacataaaaaatatagtagcttcaacttttgttattatatagtctatgcaaaaccattttaaaccgacagataaatgcacacaactgacaaatttgttgttggttgaggtatggattggcagcaaaaaggaacttttaaaaatgtgaactttgactgtgaatctcccaaaaactcccaacttcttcaccgtcatcgtcaagcttacgccaaccacttaatttattacacatagactatcatttttctagagacaacccataaacaataaagctactttttcaaatgtaacccccatattctttttgttttgctttgtcaataaatgtaaagccattttttattttgtaactgaaacattttcattactatttggctaaattagctaaacttttcttcaatcgtttggctcacgcttctttttttttttttttaacgcgtgcgtttaattaatctaaatgcaaaccataaatctataaatactttttactaaagagagtcagttactcaaatggtgaatagctttatcattcagtagctacaatttacgggaaaagaagtaatggtatccaaatatttaatttatagtgctctgaaagattcaccatatattgaaaaactagaaatagaatttttctattaccattttaattatggtagacaatgtaaagctcatgttttttttcttcccaaatcttgaaaatgagttgtttagatttttaaactaatagatgtagtattttttccaaagtcaatagccatggtttagttacagaaaataaaatggctacgatttggtcaaatgatttatggcttgtagattaatattcgatatttaaaattacgaggatcataaacaaatggattgaataggactataggagtgattcattttctaattttcccattgggaaaatagcaactaggtcaacgacaaagaaaagtcaagacttgtttatttctgaattctgaccgtatatcactccacgaggccaggctcctgcaactcaaacgtctggtttcagtttggaccaataaataattttagagtttatatcttctaaaatcaaatgtagaatttgcatggattatatatggagatattactagtttaagatatcctataataccaaagtcatcctcaaatgtaaacactgaactgtttccatttattagtatagactcattgattgaaaataatggaaaactatagatgatgataaataaggaaacatcaaagagctaagtatttataatagctaataattaaaaattatatccatcataaacaaaattcaggaattcccatgtgaaaagaaaagtggaccgacaatataatagtcaatcatcacaaatagtaagaacgtaacatagcgttagatgcgtattcatataacattatgaaatgctaactgattgattttttctctttttaataaagtggacatctttgtcaacaaaatgggtagatttttttttaatgaactgtaacgtaaagtaaatgtgtcactgacaaaacctaattaataaaagccgtggactatagcgcgtttcttctctcctttttcacaccttcccctgcactcttcacttttggtttttgtttttcttctattataatggtttaataaaatatatatagtctatataatataatataatatgtaacaatgaagttttgtattcgagtttttatccaacaaaaatcaggaaaatagctaactgttttttactagtaaatttctgattacaacttttaaaaaatatataacacttattgtttactttgaattttcatatcaaggtgacctagtagggattgaactgaagtaaacttataaacacataattttttggaaacgtaagaacttgaatttgtgatctatccaattgtttttttttcaatcaatccaacttagaagagactctactctccactagttgtaattaaaaaaacaaaaacaattaataaaatgaagaaataaaactttgtatatctctcataaagtcgactatttagacttttagaggtaaggacaatatcttctttgcttacataccccactcttgttataaaagacagtaacctttcttgagatcactctttcttatttgtgtgttagtgcattgagagagagagagagagatagaaagagaaagaaatcgtcatg

SEQ ID NO: 15618 - DNA, 3003 bp, Unknown
  misc_feature (1)..( 3003): 2750-1469P.txt file - cDNA_ID_1012102; gDNA_ID_1620763; Annot_ID_50053
tgatgcctacttccactcatcacataaccaagatcctcaaacttctgaatctcttcagcgttaagacccacttctcctctacgtgggatacgtttaccttgctgaacatactgtgcaatggcgtctccttcaccgggtcttaaagcaccaccataactgatgtgaccttcagctttaggtaatggcattggaccaacatcaccttcttcttcctcttcatcaacagctgaagatttcttctttaattcaatcatctctttgaacttcttcaactcttcttcatcaagttctagctcagtgttcttcaccgtttcgtctacttgcatcttcgaatcttcctcagtaccatcgctgtcactccctgacttcgtcttctctcccttgcttcgttttgaactagaatccgaagatttcttccgcctcttgctctttgacttggtatcttcttcctccccagacgaagaagcactaatctcagctttactatcttcatcgctgctctcatcagagtcactgtatttcgtctttctcctatgacttcgctttttcctaaaactacggctgcttctactcttcttcctcttagaagaactcttcctccttcgtctcctatcttcctcttccgaatcactctcactcccttcggattcactatcgctgtcataagatctctttctcctgcgcttagacctcgagctcttactcttcctcttcctagatctcaaaccatcagattcagattccgagtcagatttacctttcctttctttccctttcgaattatcatctctttcgccgccgttcttgtcctgaatctcgtcggcgttctcatcggaatcctcgttctgatctctaggtggactcggtgtgttctcccaaaagcagaacttggctgatttcctcatcttaagccgtttctgcctcctatactcttcgtgactcaatcccttcaattcttcatcggaatctgaaccagatcgtcttccgtttcgataatctcgatccaaatagccatgattcttcccaaatctcctcggaagcgagttcatcgtcattctcgaatccctaattcactccgacgacgacaatgaagaaaacaaaatctaagcagctgtctgataaattagggctttgattcatatacagtatctgcgcctttttacttattgggcccttaacgaataggcccaatatttatcattattcaccactgaaaatcatgttttgattttacacaaagcaccccacattttaattagagtcaatcgagtcctctatccttatcgtcgtcttcagatggcaagtctctccatgtccgccgtgtctctgtcgccgtttcggcctcaaacagagaatcttctttcaaaactcagtttccgaacgaacttacactcgttcaatctcaaaccaataaggattagtacgaaagttagaagttttggtgggaatcggagagagccgaaggattcaagatttgtcgatgaaaaaggcgtagttgatgacatggaaggtttcttagacaatctctctctcgaatacgactctgtttgggacactaaaccctcttggtaaatctcatttaagttcccaacaattttatttcaagtagtttggatttggtcctaagacttatgaggaatcgtatttgttggttgtgaatatgggattatagcttagatagagtcttaagttcacttttaagtggaccaatccttaatctttattagcattttcagtgatttatgcctgcccaagaacttttttgaatcatatatgaagctatatatttattgatgctacttaaaacaagacttaccccattacagtttcatgattgtgtgttgtggtttagaagatagaaagaaaaagtttgaatcttttggttaggaagatagtgaagaaccaaaatacagattatgtaatggtaattgggttaagaagggtttaacatttcgacctcagcatctacagctttgaatatctattgatctggtgtgtatttgcaatcaagaactttacggttcttcttagacgttttcagggcctagtgttcttccgtatggttttgaataagcaactggctatgtttctcaggtgtcagccatggacgataatgttaacgggtctatcaatagtggcatgtagctgggtaatactacactcggtcatagtttcatcgcttgcggttggtgtaattggtgcttggtggtacatattcctttatagctacccaaaggtatgattttcccttccatcatctaacaacctctccttttcattcccttactaaagaaatgttcgtagctctaatttactaagtctaagttaaagtaaaaatcctgtttaaacatcttcagacaatgctagtttctataatcttagtgaacaagactttactttggtcttgtctttgagattctggtggttttttcgtgtactttggttcagtcgtattcagaaatgattgctgaaagaaggaaacgagtagctgatggttttgaagatatttacggcaaaaacaagccttcataggatcttctcaatgttcaaaattacattcgtttcttgcataaatcttcccttctgttgtgtgtataatataaccatcatctatggatttatctcaatttcattcacagatgtttggatacataaatcttgatttcagagtcctctaatgtagtgggcattaaaatcgaattgaaccgattatacaaaccgaaattaacccaaatataccgaaacctcattactgaaaccaaccgaataaagtgccttcgaactaaataaaccaaacgaaccggaccaattttagttcaacaaaatcgacaaattcaaatcgaaccgaaccgagccgaagaaccaccaatacgagaaatgaggaatgaagggtaaaaatgtaattcccaagaggtcatggtcaacggaatgtatatatatgtaacggtgagagattcattgagatcatctccactctgctaaatccgacgagagacgacgatg

SEQ ID NO: 15619 - DNA, 3003 bp, Unknown; identical to SEQ ID NO: 15618
  misc_feature (1)..( 3003): 2750-1469P.txt file - cDNA_ID_1012102; gDNA_ID_1620763; Annot_ID_167228

SEQ ID NO: 15620 - DNA, 3000 bp, Unknown; identical to SEQ ID NO: 4993
  misc_feature (1)..( 3000): 2750-1469P.txt file - cDNA_ID_1012102; gDNA_ID_1620751; Annot_ID_166778

SEQ ID NO: 15621 - DNA, 3003 bp, Unknown
  misc_feature (1)..( 3003): 2750-1469P.txt file - cDNA_ID_1012102; gDNA_ID_2926194; Annot_ID_141177
gatgcctacttccactcatcacataaccaagatcctcaaacttctgaatctcttcagcgttaagacccacttctcctctacgtgggatacgtttaccttgctgaacatactgtgcaatggcgtctccttcaccgggtcttaaagcaccaccataactgatgtgaccttcagctttaggtaatggcattggaccaacatcaccttcttcttcctcttcatcaacagctgaagatttcttctttaattcaatcatctctttgaacttcttcaactcttcttcatcaagttctagctcagtgttcttcaccgtttcgtctacttgcatcttcgaatcttcctcagtaccatcgctgtcactccctgacttcgtcttctctcccttgcttcgttttgaactagaatccgaagatttcttccgcctcttgctctttgacttggtatcttcttcctccccagacgaagaagcactaatctcagctttactatcttcatcgctgctctcatcagagtcactgtatttcgtctttctcctatgacttcgctttttcctaaaactacggctgcttctactcttcttcctcttagaagaactcttcctccttcgtctcctatcttcctcttccgaatcactctcactcccttcggattcactatcgctgtcataagatctctttctcctgcgcttagacctcgagctcttactcttcctcttcctagatctcaaaccatcagattcagattccgagtcagatttacctttcctttctttccctttcgaattatcatctctttcgccgccgttcttgtcctgaatctcgtcggcgttctcatcggaatcctcgttctgatctctaggtggactcggtgtgttctcccaaaagcagaacttggctgatttcctcatcttaagccgtttctgcctcctatactcttcgtgactcaatcccttcaattcttcatcggaatctgaaccagatcgtcttccgtttcgataatctcgatccaaatagccatgattcttcccaaatctcctcggaagcgagttcattcgtcattctcgaatccctaattcactccgacgacgacaatgaagaaaacaaaatctaagcagctgtctgataaattagggctttgattcatatacagtatctgcgcctttttacttattgggcccttaacgaataggcccaatatttatcattattcaccactgaaaatcatgttttgattttacacaaagcaccccacattttaattagagtcaatcgagtcctctatccttatcgtcgtcttcagatggcaagtctctccatgtccgccgtgtctctgtcgccgtttcggcctcaaacagagaatcttctttcaaaactcagtttccgaacgaacttacactcgttcaatctcaaaccaataaggattagtacgaaagttagaagttttggtgggaatcggagagagccgaaggattcaagatttgtcgatgaaaaaggcgtagttgatgacatggaaggtttcttagacaatctctctctcgaatacgactctgtttgggacactaaaccctcttggtaaatctcatttaagttcccaacaattttatttcaagtagtttggatttggtcctaagacttatgaggaatcgtatttgttggttgtgaatatgggattatagcttagatagagtcttaagttcacttttaagtggaccaatccttaatctttattagcattttcagtgatttatgcctgcccaagaacttttttgaatcatatatgaagctatatatttattgatgctacttaaaacaagacttaccccattacagtttcatgattgtgtgttgtggtttagaagatagaaagaaaaagtttgaatcttttggttaggaagatagtgaagaaccaaaatacagattatgtaatggtaattgggttaagaagggtttaacatttcgacctcagcatctacagctttgaatatctattgatctggtgtgtatttgcaatcaagaactttacggttcttcttagacgttttcagggcctagtgttcttccgtatggttttgaataagcaactggctatgtttctcaggtgtcagccatggacgataatgttaacgggtctatcaatagtggcatgtagctgggtaatactacactcggtcatagtttcatcgcttgcggttggtgtaattggtgcttggtggtacatattcctttatagctacccaaaggtatgattttcccttccatcatctaacaacctctccttttcattcccttactaaagaaatgttcgtagctctaatttactaagtctaagttaaagtaaaaatcctgtttaaacatcttcagacaatgctagtttctataatcttagtgaacaagactttactttggtcttgtctttgagattctggtggttttttcgtgtactttggttcagtcgtattcagaaatgattgctgaaagaaggaaacgagtagctgatggttttgaagatatttacggcaaaaacaagccttcataggatcttctcaatgttcaaaattacattcgtttcttgcataaatcttcccttctgttgtgtgtataatataaccatcatctatggatttatctcaatttcattcacagatgtttggatacataaatcttgatttcagagtcctctaatgtagtgggcattaaaatcgaattgaaccgattatacaaaccgaaattaacccaaatataccgaaacctcattactgaaaccaaccgaataaagtgccttcgaactaaataaaccaaacgaaccggaccaattttagttcaacaaaatcgacaaattcaaatcgaaccgaaccgagccgaagaaccaccaatacgagaaatgaggaatgaagggtaaaaatgtaattcccaagaggtcatggtcaacggaatgtatatatatgtaacggtgagagattcattgagatcatctccactctgctaaatccgacgagagacgacgatg

SEQ ID NO: 15622 - DNA, 3003 bp, Unknown; identical to SEQ ID NO: 15621
  misc_feature (1)..( 3003): 2750-1469P.txt file - cDNA_ID_1012102; gDNA_ID_2926194; Annot_ID_201281

SEQ ID NO: 15623 - DNA, 3000 bp, Unknown; identical to SEQ ID NO: 15221
  misc_feature (1)..( 3000): 2750-1469P.txt file - cDNA_ID_1012148; gDNA_ID_2926087; Annot_ID_196481

SEQ ID NO: 15624 - DNA, 3003 bp, Unknown
  misc_feature (1)..( 3003): 2750-1469P.txt file - cDNA_ID_1012209; gDNA_ID_1620315; Annot_ID_153140
tcttcacgagtttgtaagaaaaaatacttagtggtgaatttctgatttgatctctttgtatttttagggactaaaacggaaacgtagtgatgcagccgttgcaaaaagcatgtaacaaaagcagctttagatttgcttattctaattgacttcacaaaccatctgcctgaaactgaatgttacttgaataatttttttctttttgggataagcaaatgtagtcatgtcattttggaaatatcaggtattatatttgttattgatattcgatatgattaggtcacacataaatatgtctttatgagtgtgtacatttgatggttctttcaaacttagtctcattgttgaagataaatcttctaagactatgtacattgacttattttttcaacatcctaatttattgtttttaacactccccattatgttctttttcttccacctaatcattcaacatctatttaacttttaatctttacaattgtttgtttaataaaattcaacatcataccccattattttaatctcatattcttttttttatttttttggttatatattaataaaacttatcaagtagaattaaattaagattacttaacttttaacaagattttttgtcttttatgagagtgaatgatggcgtcaagacatgcgtgttggcggcaagagaaggtttagattttctttacaatatattcaaataaactattatatgattaaaatactataatggtaaaaattaaatgttaaagtatggtttgcccttaagattataatgccaaatataaaatccattgtggagttagataccgtgtagctttttttgttattgttaagttgatattgagcaaaacaaaagtttggtttgcacgaaaatgtcactagacctagacctagtaagtatggtttgtccatggacttgtttcaaagtgtttgaactaaatattatgggatcatttatccttagttgggatcattttcaaactataatgtagaattttacttaatgtttcatttattaactttcatttttataagaaaaaacaaatctttatgatagcatatgaaaagtcatttaaacttcatatcagtttttatccttttttctctctttagattaaaaaataaataaattgaatggtctaaggacattttctttgattaatatcagattatttttgttagctaaataaataggagatagccacggttactatcttgcatctcgaagtacggagtgccatcaattttatctgtaccaacacctattgaagtagcttaataaagctacaaatcacaagtttattcacaaaccaaaaacaaaaaaattctcacaaaaacaaagagaaagaaacaattaccactccaaaaacattttcagattcgatcccaagatccttaagagcatgtctcgcatcatccaaagatatagttgaatgatataattgcactttgattaaaaaactgcaaaatcaaaatcgaaatatttagctagagaagtttaactaagtcaccttgatttcacaaagtgtaactattcaaaattatatgatctattatataaaaaaggcattattatgtcatgggactattacaaagaaaaatccatttttgacataccgtttttcaaatatgccattttcccaataatctttcaaatttgccattttagccatgtaaaaaacctaaagatttaagaaattgttttcactaaacacatacttaataacaaaaactataccctaaaaaaattggaacttaataaatgcaagcacttttataggccaaaactgaaaacctaagttgatatatatatcattaatgataataagattatgatttgatcatttagccaaatgctaccaaaataaatacaagcgcttttattaagtctacttaagttccttgattagggttatgttttttgttataaagctagcatctaaagaaggtttacatatcattttttggataaaaaataataaatttgaaggttgatgatcataaacaaaatcagtaaaattaaagaacaacacctgatacaagtaacggctactttagtagttagcgggtgaaaaagaagaagacatgctaacggtcaattccagcctggcacttaaattacgaaagtaccctccaacttttttctttatcctttttaaatgatacgctcctttagttaaataaaataaacatttgtctctatttctcttataaaaattcaataattgaacctcctctctctctctctcttctctcccttcttcttctccgatttcgactttgaatcatttcttcgagagaggtagcgagaaagggatcgccttttctcactctctgcggattctcaattttgggcaagaaggcaagaacgtatgttgagatttctgatgaaaaatccattcttttattctttcttgaaatgatcgacttgggatgtgattcgttgctttctctcacatttcgtcgatttttgtatttagcttagcctcaatttggtcttatgagttgttcttggaaaccctagagtctctgtctccgtcaattgcggtagatcccaaattgattcgttttagggttttctttgattcatcaattggttggctttgttcttgtttcttggatgcgtttcgttcttatcaaggtctaatttcactaattttgctttactctcagttaattcgtgtcttcactctcctccaagagtttcaagtttagatttttgtacatagattttgctcaattgccttacttttaatagttcatttctggtgtggaattggatttatgatttgacggattgatatgtcgatgaaacgttaatggatattgttgcttagaccacttagtatgaatcgacgcattaactttttgtggcttttgcagagtttttatcgcaattgagtcttgaagaccacaaggatttgatcacattggtgcttctgcctgtttatctgagtttgaggacaagaacttctggggcgtttataatttgccatg

SEQ ID NO: 15625 - DNA, 1110 bp, Unknown
  misc_feature (1)..( 1110): 2750-1469P.txt file - cDNA_ID_1012213; gDNA_ID_1591294; Annot_ID_150794
tgaaaggaacgttcccgacgtatcttggtcgtccttggaaggaatattcacggacggtgataatgcaatcggatatatccgacgtgatccgacccgaaggatggcatgagtggagcgggagttttgcgttggacactctaacttatagagagtatttgaatagaggaggaggggcaggaactgcaaatagagtgaagtggaagggctataaggtaattacaagtgatacagaagctcagccatttacggctggtcagtttattggtggtggaggctggttagcgtcgaccggttttcctttctcgttaagtctttgaaattaaaaggttgacttattattttaataaagattgtatttctctatctacatgtatcattaaatcgatgttcataggttatcattctcaagttgaaccaagtcaatgcataactcgggctggtatagttttaaggcctaaataaccggactttacggggtttattgggttgattacttgattbtaattcataaattaagataaaccgggaatcaaacmcaatgttggtgttgtgtcacttgtcggcattaaagcccgaaagagatagagatagggacgccacatgttagagacgcacatggccattttaatatttgctaagataatgttctttgttttcttttaatttgtagacattttcatgtgtttttttttggttctctccaatgtgtatgcttgaaaaatataccgaggaacccatagaattgtaaagaatgttcgctttctatggacctactacggatgtagacgactttgacatatacataatacataaaaccattttttgtctttaaaccaaattacaatataatcaagttgattaatcaaaataattacaacgttatcatgaatcttcacatgcaagatcctacacacacacttagacgacaagaagtcaccgtggaacaagcgcgtcacgttcatcattcacatttacttaatcccacttaaaaaggcaaacaacaacatgtcttctctaacataaacaacagaacataacaaagcccaaacaatcttagtaataatcccaaaaaccagaaaaaaaggagctttgcttttgtaggaattaatg

SEQ ID NO: 15626 - DNA, 3003 bp, Unknown
  misc_feature (1)..( 3003): 2750-1469P.txt file - cDNA_ID_1012219; gDNA_ID_1971974; Annot_ID_58708
tccgccacaaatctatgtacttttcttctaatctcaatcaaactctctgccagtcctttcttaattcctctctgcttcaccgaatttctcaacttctccacattctcccattctcccttaaccccatacacattcgacattaacatgtaatagccagcatgattagattccaattcgaaaagcttctttgcaacagtttctgccatctcaccattctgatgaatcctacacgcgcctaaaagagtacccaagatttgaggtgtcggtgaaaaaggcatccgctttgtgatttcaatggcagtatctagatctcctacacgaccaagaagatcaactaatacagcatagtgttctaagttgggagcaagtctatagtcattcaccatcaatttaaatattctcaacccctcatgtatcaaacctgcgtgactacaagcagataatattgagagaaatgtcacttcattaggcttaacttctgagctcttgaccatgtgattaaatgtttccagtgctttagtgccctttccatggatgccataaccagtgatcaaagatgtccaaaccacagtgtcctttaaagcaatcccattgaatactttagaagcattgcctagactcccacacctcgagtaaagctctacaagagaagctccgatgaatgggttactgtcaaatccatatttgataacataactatgaaagcatttagcttgttcgagaaagcctaactccgaacatgacccaagaaccttcaccataagaatagcatcaggcctggtattattttccagcaacatgatggaaaattcctcaattgatctgtgagccattccatttaatgtaaagccacttatcagcgcaacccaagagactacatcttttcttggtatcctggagaatacagcataagcttcttcaggggagaaacacttcatatacatatcaactagagcagtagagactttcacttctgtctctaaacctttcctaatggccaattcatgagtcttcctaccttgctctaaatcatgagcagctgcacaagcttgtaaaacacagagcacggtagctacattaggttctgttccatcatccatcatatcattgaagacaagcaacgcttcagcggcagctccattttgaacgtagcaagcaatcactgtgctccaagatataacatctttctctgctatcatcttgaacaaattaaccgcttccttgaaagctcttgactttgcataacaattcaatagcgaatttaccaaagacaagtcatttgaaaatcctctcctaatcacaaaaccatgcacacatcttccaagccttgaattcgaaagctttgtacaagcagaaactagtgtgattaaagttacccgatcaggagtaacatcggaagccatcaccattctcctgaaaaactctacggcctgatagggagacccgtttttctcaaacccagaaaccatagaagaccatgtcactatatcaggcttctccaattcatcgaacatcctcaaagcttcgatcattcttccacatttgatatacatatatatcagagaagatccaacataaaggtcagacccaagagtgacatccttcttcacgaacccatgaatcatttcaccataattaacttcccgcagctccccgcaggccttgagagcaactggaagcgtgaaattatcaggcttttcttcatcgcgaaacatatgactaaagtgatacaagacttcttcccattgtttctctctggataaactcttaagaagagtattccactggtacaagcttctcttcgtcatttcgccgaacatttggcgtgcatccacggaagaagagaacttccggcaaaaacccatccaaatcccctgaaattgaaaattatctcacattcaaaccttctgtttccgaaaaacttccatcaaaattttctcgcttctacattgcttgagcaacccaaatttccttcttgcagtaaactttgcgagggagagaagagaagagaaggatggattcaacttcaaagcaaaaacatgaagcgcgaatacgtttagcaaaaacgtttgggcctgggctgtatgagttgggctaataatggtccactactcgcttacttacttgtagcttttctattggtcaacatttttctttattatgtgctgtagtgtattaaatgttatttaaatactagcatctctccaggataaacataaccaattagagaacaataaataaagattgattaaggaaataaaagaaaagaaggacgtggcagtatcggagctagtgcctgttattgagaattggaaacagctacaaatagtacgcacaagcccttcttcttcttcttcttcttcgtcgtcgtcctcaacaagctcttctttctgactcataacccaaatttctgagaatcagagccttattcaagagaacaccaaggtcagcattttcttctactctctcgatctcaatttctctctttatccttgtgatctatttctctctcgtctacaatttgagctacttttcttgttattatcgtcacgttgtgtgtcgcgtagtggatttgagtgattggttgattgattgatggattttttcacgaaacgcgtagagtttggtggaagttgttgaaattcgaagccgatcgcggactcgtttgctcttgattacgtcgcaatccgtacgattttccgatcaaacgtaagcttgaatctctttcccttttgttttgttcgcaagcgtgtttgatttctgttaatatttcttgatttcccctttttgcggaattgattccggtttttatattcccatattatttttttattctcatgtactgagaatcatgattctagtttggtaaacggttggtgttcttataaaatgcttgatagatttccatctgggttttggttgttgctgtagttaagagtgaaggagatagatttgtagaaaaaggaagagaataagagtgagcttgtggccaaaaaagggatg

SEQ ID NO: 15627 - DNA, 3003 bp, Unknown; identical to SEQ ID NO: 15626
  misc_feature (1)..( 3003): 2750-1469P.txt file - cDNA_ID_1012219; gDNA_ID_1971974; Annot_ID_177563

SEQ ID NO: 15628 - DNA, 3000 bp, Unknown; identical to SEQ ID NO: 9408
  misc_feature (1)..( 3000): 2750-1469P.txt file - cDNA_ID_1012357; gDNA_ID_2684229; Annot_ID_192185

SEQ ID NO: 15629 - DNA, 3000 bp, Unknown; identical to SEQ ID NO: 9408
  misc_feature (1)..( 3000): 2750-1469P.txt file - cDNA_ID_1012357; gDNA_ID_1972118; Annot_ID_178841

SEQ ID NO: 15630 - DNA, 3000 bp, Unknown; identical to SEQ ID NO: 10050
  misc_feature (1)..( 3000): 2750-1469P.txt file - cDNA_ID_1012423; gDNA_ID_2213621; Annot_ID_195725

SEQ ID NO: 15631 - DNA, 3003 bp, Unknown
  misc_feature (1)..( 3003): 2750-1469P.txt file - cDNA_ID_1012450; gDNA_ID_1620675; Annot_ID_164233
aaggacgttgaacaaaaagtagctaaacatatattacgacaatttgttagatatagcaaggacgttgaaattttcccaacaaaatattgtatgcttttgttaaaaatttatgaacttaaaactgcggagttgcaacagaagatatctaccttagagtcggaaattctggctctgctgaaggttcaggcacatcattaccaggtccagcgttacgaagatttggagggtaagatgtcaaaggctgtgtttgaggaggtgtgaacacaggagctgatctctctgatctctgagggaaaacagcaccagcacgctgaaagggacatgagtcactggtggttaggcaagagtagtagaagattttctaacagaactcacaaaaggatctaagaagaattcattatgagatgtaataaaatttcagtatgagacatctggacacccagaatcagaaacactactctactgaaggaaaaaaaaatgaaacccaaaataagtatatcaaacaactaaattatgtagacataccaacaattcctggtatcctgcatagtattgtggatatcttgccctagggccaccaaaggcctcttgccatgtatcgataaggaccagaatcttctctttgacatggaagtccggctatatgcatcagaccaattaggattagagaggcagagcaagggagagagaaagagagaccaatttggaagaaccattaccttcttcttaactatccggaccatctcatgaataacacctttctcagccacatgcatatgaaccatgtcaccacagttcttcactattgtctcaagcagctagaacataacaaaaagcatgacgatgagtgaataactatcattgcaaaacaaacaagaaagatgaaaaaacgtgaaaataattatcagcatatcattcttgttagaaaacttgtaagtcattaaaatcctcatcatgtacattagtatcatgaacaagtaatctctgatcatgtcaacttccactaataaaagaggtttgtgaaacaaacacgctatccaaatgcaccgtttcagaaacaacagtggctatttcaatgaagtagccatcaaggaaaataaaaaggagagacagttatctaggagctcacagttaaggcaagaagctgagcttttggattcctgctaccaatccgttttttaatgcctttcacaacatcttttgcttgcctacaaaacaggaaccagtttcagacatcacatagtattggtgcagttagtacacacactgaaatctccttcttccaatcacaaagcatataaagaaaataacttgagagcttctacaattaaagccctatgaaagatgactaaattgagcaaaacagtaggccacaagtattccaattggtcctagaaaacatggaaatatctaactctggtaaagaaacgaaatttgatttccatcttactgttaactctctctctctctctctcactgaaccaaaaatccaaatccgtatagagagttacaatagtttacaggagactaatcgagaagtatagaaaacaaaaggtagagagagagagagagataacaacaaaaacaaaatcggagggagcagagggaaacatacgctggatcgctattgagcatatcacagatctcgaggttcatagcccaatcaggcccgatcagcatctcgctcgtcgctctctccaccatagcgttcaccatcttcgctttgacccccaaacagaaaaacaattaacctccgattgaaagagagagacgaattttgaaaccaacgaatcaggcgaagacgaattaagcagccggtaagatcacgcaaagagattactccggcgaagaatctctcgctcaggaattcacgcccttctctctttctactagaaatcttttttttttccttttcttttctttttctctaattgttaattttcagaatttgttttttaaaaatgtattttctgtacttcagatcattttttattttccacgaaatagcaaaaaaggaaataagtcgaatatcttctggaaaagggtccactaaaagattgccacgtgttcatatcgttgtgtttggatagttacaccaattcagtcaggtcattgctttccatcggaccgttgcttttgacccacctataaatccgacggtcatcgtttcactaacagtaaatgttagttattagtattattattttttcgtttttgggagctaaatataataatgttatccaatctaaatgaatgaattagatttagatggaacattacagtttgatgattggtcgattctcaacagcttacaatgttttctttttaatgatcgaaacaaagtatttgcaaaacaaaactaaccagcgattacgattgcgattgcacacgtatgcaattaattatgagtgtcatttgataacgctatgaaaccgttaaatccacatctttacaaaattcatcataaagaaaacattttggtcttatgaaagtcgtgattggtgtgatacaaacctaaaccaacttgctacacatctatttactctctattctattctattgagttctcgtttctttatcactttctgtgttggatgtattcacccacttgcaaaaaataatttagatttatagacatcaaaattgcataagagtgttagttctaacttcatcagttgaattaattaggactctatagctaagcatattctaattctatgattatgataataattgagcgggaagtggggatagattcgaactttaacaaactattgggggtcaaactgtaattacacagaagttatcaaagcaagtacctttacacgcgcctaattgtttctgcatcactaatacttcttcctcatttccccagttcggtgttcattgatttagggttcctgataaacttcggaaacccctattttgaattgtttcggaattatctggtgagaagggtctaattcgattgtggattagttttttttttgtgtttcttcaatg

SEQ ID NO: 15632 - DNA, 3000 bp, Unknown
  misc_feature (1)..( 3000): 2750-1469P.txt file - cDNA_ID_1012450; gDNA_ID_2926203; Annot_ID_201973
gacgttgaacaaaaagtagctaaacatatattacgacaatttgttagatatagcaaggacgttgaaattttcccaacaaaatattgtatgcttttgttaaaaatttatgaacttaaaactgcggagttgcaacagaagatatctaccttagagtcggaaattctggctctgctgaaggttcaggcacatcattaccaggtccagcgttacgaagatttggagggtaagatgtcaaaggctgtgtttgaggaggtgtgaacacaggagctgatctctctgatctctgagggaaaacagcaccagcacgctgaaagggacatgagtcactggtggttaggcaagagtagtagaagattttctaacagaactcacaaaaggatctaagaagaattcattatgagatgtaataaaatttcagtatgagacatctggacacccagaatcagaaacactactctactgaaggaaaaaaaaatgaaacccaaaataagtatatcaaacaactaaattatgtagacataccaacaattcctggtatcctgcatagtattgtggatatcttgccctagggccaccaaaggcctcttgccatgtatcgataaggaccagaatcttctctttgacatggaagtccggctatatgcatcagaccaattaggattagagaggcagagcaagggagagagaaagagagaccaatttggaagaaccattaccttcttcttaactatccggaccatctcatgaataacacctttctcagccacatgcatatgaaccatgtcaccacagttcttcactattgtctcaagcagctagaacataacaaaaagcatgacgatgagtgaataactatcattgcaaaacaaacaagaaagatgaaaaaacgtgaaaataattatcagcatatcattcttgttagaaaacttgtaagtcattaaaatcctcatcatgtacattagtatcatgaacaagtaatctctgatcatgtcaacttccactaataaaagaggtttgtgaaacaaacacgctatccaaatgcaccgtttcagaaacaacagtggctatttcaatgaagtagccatcaaggaaaataaaaaggagagacagttatctaggagctcacagttaaggcaagaagctgagcttttggattcctgctaccaatccgttttttaatgcctttcacaacatcttttgcttgcctacaaaacaggaaccagtttcagacatcacatagtattggtgcagttagtacacacactgaaatctccttcttccaatcacaaagcatataaagaaaataacttgagagcttctacaattaaagccctatgaaagatgactaaattgagcaaaacagtaggccacaagtattccaattggtcctagaaaacatggaaatatctaactctggtaaagaaacgaaatttgatttccatcttactgttaactctctctctctctctctcactgaaccaaaaatccaaatccgtatagagagttacaatagtttacaggagactaatcgagaagtatagaaaacaaaaggtagagagagagagagagataacaacaaaaacaaaatcggagggagcagagggaaacatacgctggatcgctattgagcatatcacagatctcgaggttcatagcccaatcaggcccgatcagcatctcgctcgtcgctctctccaccatagcgttcaccatcttcgctttgacccccaaacagaaaaacaattaacctccgattgaaagagagagacgaattttgaaaccaacgaatcaggcgaagacgaattaagcagccggtaagatcacgcaaagagattactccggcgaagaatctctcgctcaggaattcacgcccttctctctttctactagaaatcttttttttttccttttcttttctttttctctaattgttaattttcagaatttgttttttaaaaatgtattttctgtacttcagatcattttttattttccacgaaatagcaaaaaaggaaataagtcgaatatcttctggaaaagggtccactaaaagattgccacgtgttcatatcgttgtgtttggatagttacaccaattcagtcaggtcattgctttccatcggaccgttgcttttgacccacctataaatccgacggtcatcgtttcactaacagtaaatgttagttattagtattattattttttcgtttttgggagctaaatataataatgttatccaatctaaatgaatgaattagatttagatggaacattacagtttgatgattggtcgattctcaacagcttacaatgttttctttttaatgatcgaaacaaagtatttgcaaaacaaaactaaccagcgattacgattgcgattgcacacgtatgcaattaattatgagtgtcatttgataacgctatgaaaccgttaaatccacatctttacaaaattcatcataaagaaaacattttggtcttatgaaagtcgtgattggtgtgatacaaacctaaaccaacttgctacacatctatttactctctattctattctattgagttctcgtttctttatcactttctgtgttggatgtattcacccacttgcaaaaaataatttagatttatagacatcaaaattgcataagagtgttagttctaacttcatcagttgaattaattaggactctatagctaagcatattctaattctatgattatgataataattgagcgggaagtggggatagattcgaactttaacaaactattgggggtcaaactgtaattacacagaagttatcaaagcaagtacctttacacgcgcctaattgtttctgcatcactaatacttcttcctcatttccccagttcggtgttcattgatttagggttcctgataaacttcggaaacccctattttgaattgtttcggaattatctggtgagaagggtctaattcgattgtggattagttttttttttgtgtttcttcaatg

SEQ ID NO: 15633 - DNA, 3003 bp, Unknown
  misc_feature (1)..( 3003): 2750-1469P.txt file - cDNA_ID_1012546; gDNA_ID_2214641; Annot_ID_136242
gcaaaataatattatccaaaaacataaaattaatcttttctcttgtatgttcaccacgtcagctcgtccaaagccttgcaaatgaggagtttgtcgacatttcatgtcatctacatgttacttacttagttttagattttatagtgctatatccttaaataatttatgaaaagtagttacttttgcaattcaccctatattataagatgaaataaaattattttgaatacgaatgaacaaaaaacttgagtttttaaacttccaaaactaaaaatgttcggtttattatggttctttattttaaaaaatataaattttaaaataaatttaaaatattataaatatttaatttttattatacggatgaaatcttacaatggactaatttaaatcgattataataataaacgacaaaaaaaaaaaaaatcgattataataataaacggtataatacatgtgaattcctagaattaaagaatattttgcccatctcctgcaagttataagttaattacaatatgatgaaagaagaagataagagagatccaaagagataagaataacattaaagttactctctcggtgtgggtatgacgacgaattgacttaaaattttcgttagtcatcttttgtcaatttcgtttcaatcatttttgacacaaaaagtatggaacttcaagtccttgttcttcgtccaatcttcttcttcttcttcttcgtcttcttgacaattctacaacaatcctcttctgctcgggttcttacaatcaccaagcctgatagacatgactacgccgcaagtgctcgttggcttgtctctcagaattcttggggtgttcttaggtatctaattctcgtctctttctgcttatcttgcttctcaagtttagatgatagcttttgctccactctcaattattaggagctttattagggctattgaatccaatcagtgataaaagattgaatcttttgaaattgaaattggtaaaggttatatttttacagaagtttgtagcttttttagcagattgaatcctattgttgataaactttgttgggttcttgagacttgctatggatttgcttcatcaagctttaatactattgaaattgatattgactttcaagtactgttgggttcctgagatttggtagttcgtcaagtttgattcttttgaaattgaaaggtttttaggatttcagatttgacactaggagtaacaaatggttcctctatactctgtagttaccactggtcactctatacactatagttacctgagatctttattagtgaaagagattgttgcattgttgttatcagcaaggtaatgtgagtgtaacagttgtgtattactaattctttttgcggtgttgtattcctcttccagcacactatccgttgatcataaaggcgctcccttcgggtaatcttgttttccatgaatcatatcacaatgtgttttcttgctttgacattattgagatctcaatggtctctatttgcaggaatgttgtatcgtttagtgatggtttacccgagaaaggtaacggtataccttacttttacttaacaacacttgatccaactgcaagaaacgcacttaaagaccagagagcttcacttgcaattagtgaatctcctcttggaacttgtacaagagatccaatgaatcctacttgctctaaactaacccttaccgggaaggtaaaagagttttttcttattgacacgacaaagaaacttactgtaaaatgctttggtctttatcttattataatgtttcagttgctgatattggaaggaggatctgaggaagcagaagtagccaaaaaggctttattcacaaagcatccagagatgatgggtgattaattgtttcactcatctcttaagatacagattcatgatagatttgtattatcatgtgatggttttatcatttgcagattggcctaaggatcatgatttccgcttctttaaactcgagatcatcgatatatttctcatcaattggtatggtggagctaaacctatcactgtagatgaataccttcatgccaagtcgtaagtacattgcgtgaacccttttaaaaacatcggtaatctctgagaaaccgaactatgaaaattttcgaatcgtatgcctttttcgcatttgatctcttagttcttttgaactgttttcaggatcaaactcgcttcctttttataataactcacaagaatcaagcaaatggtgaagcaagaaaatgtatattggatgaacaataaaaagtgtgtaactgtttctgtaaataactctttgttttggaccataatagatattaaaatctcttgtaaattacctcaaagcaatttcaaaggtatccaaaatacttttcaatttatgcaattgaaccaaaacaaattcttccacgtgaaccgaaacgaaaatcggttttgatttctcatttaaaccgaataaaccaattttttttattcattagtctaaaatttaaattctattatctaaacataattgaaccggaactttcataagagaattgaatccaatacactaaaacaaaataaaactagaaatttatgtaattgaaccacgttggagtcaaattaaaaccaaatcagaattctattgcaattgaaccaaactaatttcaccaactcgaaccgaaaccaaaactcgattttttcattcataattctactcaaattctttatctaaaccgaattgaaccgaaagttttgaagcaaagtttgaaccgattcgatggtcgaattccggttatttccggtttgaggataagctttatcattctctgagagtctctctctctgtgagtggcgagcattggtttctggaaaatgaacacaaaaaaatatctgaaaatttcgatctaaaaagcataaacgaatccaaatttcaagaggagaagaaaaatcttcaagtccacgacgaaacttttcatcgatcttcaaattccagaaaaaactcgatg

SEQ ID NO: 15634 - DNA, 3003 bp, Unknown; identical to SEQ ID NO: 15633
  misc_feature (1)..( 3003): 2750-1469P.txt file - cDNA_ID_1012546; gDNA_ID_2214641; Annot_ID_188317

SEQ ID NO: 15635 - DNA, 3000 bp, Unknown; identical to SEQ ID NO: 10865
  misc_feature (1)..( 3000): 2750-1469P.txt file - cDNA_ID_1012561; gDNA_ID_2214456; Annot_ID_132948

SEQ ID NO: 15636 - DNA, 3000 bp, Unknown; identical to SEQ ID NO: 10865
  misc_feature (1)..( 3000): 2750-1469P.txt file - cDNA_ID_1012561; gDNA_ID_2214456; Annot_ID_182657

SEQ ID NO: 15637 - DNA, 3000 bp, Unknown; identical to SEQ ID NO: 15035
  misc_feature (1)..( 3000): 2750-1469P.txt file - cDNA_ID_1012614; gDNA_ID_2684256; Annot_ID_193136

SEQ ID NO: 15638 - DNA, 3000 bp, Unknown; identical to SEQ ID NO: 15035
  misc_feature (1)..( 3000): 2750-1469P.txt file - cDNA_ID_1012614; gDNA_ID_2684256; Annot_ID_138110

SEQ ID NO: 15639 - DNA, 3000 bp, Unknown; identical to SEQ ID NO: 6347
  misc_feature (1)..( 3000): 2750-1469P.txt file - cDNA_ID_1012673; gDNA_ID_1621089; Annot_ID_55474

SEQ ID NO: 15640 - DNA, 3000 bp, Unknown; identical to SEQ ID NO: 6347
  misc_feature (1)..( 3000): 2750-1469P.txt file - cDNA_ID_1012673; gDNA_ID_1621089; Annot_ID_170639

SEQ ID NO: 15641 - DNA, 3000 bp, Unknown; identical to SEQ ID NO: 6347
  misc_feature (1)..( 3000): 2750-1469P.txt file - cDNA_ID_1012673; gDNA_ID_2926193; Annot_ID_141130

SEQ ID NO: 15642 - DNA, 3000 bp, Unknown; identical to SEQ ID NO: 6347
  misc_feature (1)..( 3000): 2750-1469P.txt file - cDNA_ID_1012673; gDNA_ID_2926193; Annot_ID_201206

SEQ ID NO: 15643 - DNA, 3000 bp, Unknown; identical to SEQ ID NO: 13645
  misc_feature (1)..( 3000): 2750-1469P.txt file - cDNA_ID_1012699; gDNA_ID_2214642; Annot_ID_136261

SEQ ID NO: 15644 - DNA, 3000 bp, Unknown; identical to SEQ ID NO: 13645
  misc_feature (1)..( 3000): 2750-1469P.txt file - cDNA_ID_1012699; gDNA_ID_2214642; Annot_ID_188346

SEQ ID NO: 15645 - DNA, 3003 bp, Unknown
  misc_feature (1)..( 3003): 2750-1469P.txt file - cDNA_ID_1012835; gDNA_ID_1621128; Annot_ID_56404
gctgcgttttgccgccggatctgatgaagaaagagagagggacaagaagagacgagagtttttaaagtttccatttacatcttttggattatgtttttaacgatatcggaggctgtgtgtattactatatatagagaagctttctttaccgttgagaaaaagtagtaacggatagtttctgaattttgaagtaagttaccgtttctaagttaccgttcccgttctgacatctcaacggttaaatcacagttaccttgtccgcaacacgtgttacaattaaaaaagttttattcttgctgggctgtcgagaccggcccaaacccatcaatttgttttttaatttttacatgtccgatatgaggcttaaaggataaactggatttgatttaaggtccattatatagatcaataaaagcgttcaaacgttatgcgcaactgtggtacgtcattacatgggagttctgtatatccgtcatatcaaaacaactgtaagaaagcaaatcaagctatatataacttatggactttcaccgtgagctcacaaactcatgagaaaccttcttttctttcaaacgaaagaagggtctttgaacctcttgaaaacggcgtcaatgtctgccataacttcctgcgaaaacggccgctccgtcatcagaaaagcatcaatgtcttctttaagttgttttaccgatgtggccccgatgatcgtgctcgtcacaaagggcctgtcacgtacaaacccgagtgctaactcaaccggagttaaaccgtacttcttcgccacctcaacgtattgtatggttgcttcctgaaatcagaacaaagataaaattgacctcaaaacacttttacgaatatggctttacaactagattcgagctaatactgtttcttaaattgttttacgacataagaagaagtaagcatagttggatcaagaagaaaccttggctagtgatcccttgtaacgttccatatatcctgggaaaagattcagccttgcattttttgtagcttcttggtctgtagccaagtatttcccagacaacgagccgcctccaagaggggaataagcaagcaagccaacattgcaattttttgggtggcatacttctaccagatcaactgtggttttaacccaaaacaaaagagtttagaacatgctcctccgacacacttgctctcaaggtattctagaaagatttaccttcataccgacatctaactagcaagctgtaaccattctggatgctcacaatctttggtagtccttcgagttttgctgtgttaacaaactccgtcactccgtatgaagtttcattcgagacaccgatatagcgaacctgttgcagaattcgaggaacacttcaaaactctgtgtttgaggttatataactcaatataacatctgatttttaaggagtagcactacctttccttcaactatgagatcctgaaaggctcttagttgctcagcgaatggcacactaggtctccatttcgacgtttcatagtaaaaatcaccgaagagtggtacgtatcgatctggcctggactgaaaaaaagatcagtgtcatgattttctgacatttgatgatgaaaaacgaaatattttgcgcatgaaatagaaagacacttgctcaaacaatgtagaatatgagttaagacataaagcaaaaataaggcgatgttaccagtgtatttgaagcaagtcaatgtaatcagttccaaggcgcttaagacttttctcaacactttctttgatattagcagcatctacacgcagaatctcaccactgtcccttatgtaagctgacctttctgagtacccacatactttagttgccaaaactatctgtatacagaaacaatgaacatcaatatcaatttttataacttcgattaggttttgctgatatcatatacattcgtgaccaatatgcatccaaagtatgataaatggttgataccttgtcacgttgctgagacttcaaccagctactgatataaagatccgttttaccttgcgtctccttcttcatcggtatgggatactggaaataaacaatgatacttgaaaatttaccacagactaagcagattccagaaagctaaacacaacagtgctaaattcaccagaattatatataaagtataaaacattcacataaacacttgcaatcaaattcaccaggcaagaagagaaagatgaacaatgaagataaaaactcacagcttcagcagtgtcaatgcaattgatgccctcttcaattgcataactcagcatctcatgagattctttctcagtattttgctccccaaatgtcatctgaaattccaaatttcatcaaaacttcaaaattgaacaatggactacaattgcaggagataaagagagattgttcttacagtgcccatagtaacttcgctgatgttgagatcggaatctcctaatttcctatactccatagcattcttcgtcgacgctttcgccgaaactctcaatattctcctccgagcattcggcgatagagtaacacggcggcgcgtgaatgccaaacgaaagactcctcgaatgttactgctgctgaccaccggagtgaccgttgagtaggtgacgtaagatgacgccataccggaggttgtcgtggacgtggttcttctcgccttatcgccaccattatctactgttttgattcacgtatttgaatactctgggctaaacgatttgggcctaatgtaagaggcccattagagtcaaaaatatatattgaataatatcttgttttcctaatatgataggtctaatctcagatttcgatttatttcttcgagataatatgattatattagatgacgtggcggtacatccttcgatatcttcgataaatacgcaagagtgagcttcacggtcagacaaaagctgactctacgctctctcaaaagtcgaatatcccaaattcgatccgttttccggcgataatctccgatctagatccgatg

SEQ ID NO: 15646 - DNA, 3003 bp, Unknown; identical to SEQ ID NO: 15645
  misc_feature (1)..( 3003): 2750-1469P.txt file - cDNA_ID_1012835; gDNA_ID_1621128; Annot_ID_172385

SEQ ID NO: 15647 - DNA, 3003 bp, Unknown
  misc_feature (1)..( 3003): 2750-1469P.txt file - cDNA_ID_1012855; gDNA_ID_1621122; Annot_ID_172125
ggttcggaagacgaccattccaggccttggtggcgccgtcgtctcagatccttgtatatggcagccatgtcctttactccgtccacttttcgaatcgctatctcgttgctccttcttgttgctatcgtctccgccgtcatttttctcccggtcgaacaggcaatttctccctccctcctcattcgcgtgtagctttagtgataatgtagcaacgatagtttctgtatattctaagtttagaaattgatacaacggagtatttctggagctcgctagatcactagagaaactgtcctagatcaggcgaatggtactttatatatgatttagaatcatcattaatcatcattgttatgatccctttctgcagaaattgaaggacttcttgttatggattaaggaagatcttggaccttttggtccacttgcattgtaagtttttcatgtttgctactcatttttgtttctaccacttattggtttgttttggtgacactgttttctggctgccgtaaaaaatcttgtgatgagccttttttaccttattgaaatttttcagggctttggcttatattcctctcacaattgtggcggttcctgcttctgtactcacggtagttctggattcataactatgtagtgaaatttagggtgcttttctaagatgtttgtccaaagttttcattacaagataggatacttagacttttaatccggttctgatagtcttgattgtttctctctgcagctaggtggtggttacctttttggcctgccagtaggatttgtagccgactctcttggagctacattaggtgcaacagcggcatttctgcttggtagaacggtatgtctcttatggttccatctgttttaatatatttcgcttgcaattgtgttgcttgccataaccacagaagtactgattcctgttttgtgcgtcctcacatctaggcattttatctaagtgttgcatcttggctgtctcattgttgctaatgatatatcttttgtctttctggtatcatgcagattggtaaatcttatgtcacttcaaaaataaagcattacccaaagtttcaagctgtttccgttgcaattcaaaaatctggcttcaaggcatgaaaatctagtaacactctctataataattgacagtttgttttccttcagagatctactatgcgtatggcaaagtacctcaatttcctggctacatttaattgattgactactaactaaatgatgatattttcttcctgtgcagatagtcttgctgctacgcgttgtccccatactgcccttcaatatgttgaattacctcctatctgtaactcctgttcgcttaggggaatacatgctggccacttggttgggaatgatggtactgacatttctttaaaatccgcttgtatattggccatttatactttaataatggtggaagaagttagcatgcatgttaaagtgctgattgctaacattatacataatagtaattctaatcttctgaattgttttgatgtagcagcccattacatttgcgctagtatatgttggaactactctgaaagatctttctgatattacacatggatggcatgaggtgtcagtatttcgttgggtaagttttcgctcatttacttccacttgactagtagattggaaatgattgtagatgagcttgaatgaagtcagaagaatgaagatagttttgtgtttctgctgtaatgcataattacttatcacttatcatttatactgagattactaggtttagaagtttgtagtattagaaaaataacaacttgtctgaaatgaagtttgaagtatgccttattttatgaggtttattggaaacatcttggtgtatatccctcaatataatgtagagttgcttattttccataatatgatagacatttctgggatctgaaatattgagaatgtagcttaaaaatcctgaggatgaggatttataaccaagtccaaagcatcctatgtgtagggaagaacattgtgatagtctcgcatctgcatttatttagttggtattttgtagctttgattgaagtatctgagtgcccttgcattgtaagtctgatttctcgtttcttctgcattgtcatttgtggatgcaggtaattatgatggttggcgtagctctagctggtaagtctcttctgcagtcatgtccaaatatatatctagctagcttcactacattgtgagaagtggaatgacaccatgtggtctgtgttttaacccgtctttttttgggtttttgaatgatgtgggtgcagtaattctgataatatgcataacaagagtggcgaaatcatccttggacaaagcattggctgagaatggtactgaattagatgggaagaagaatgacgacgcttccgtactcccgatcgcagagccaccaccggatctacaagagcctctcgttatcagaatcgacccatccaatacttgaataatatagacaagaagaaacctcttgagtttgtaaatttcgcgaaattttcttaccgagtgagttattagaaacgttttgtatagcatcataataccatacttcacagtttaattcgtttgttctttagttgattattttggtatatacttgaggttttgaaatcttgtaacttgtaagaatgcccaaccggtggctacaataattaaccggaaattaatttgactcgagtccttatcagaccggttgaatcggtcgagtcaggtcgggttagaaaatatcaatattcgggcatattccttggccttcatacgtgtgcgtctgccattttttttctaaactccgaatcccaaaattgttgccttccttcgtctccgatcattttcgtggtgtctgtaaccccaattacaattcgaatccattagcgaaagaaagagacttcctttgaaagagaagagtctcgttggctcggttttctgttcaaatcagcggatttcctcacatttaattgttcaatcatg

SEQ ID NO: 15648 - DNA, 3003 bp, Unknown
  misc_feature (1)..( 3003): 2750-1469P.txt file - cDNA_ID_1012984; gDNA_ID_1621091; Annot_ID_55513
acattatcaacaccaacgtaccatcatcgtgtctgtgctatgattccaatttttgctctcttatgacgaacaaagacgtttcgactgtcactagacaaatgacaaacccgtagaaatttgtatattattaattactttataagtttagtattaaattaattggaaagataatatatatagtcctatagatactaaacaaataatttaaacaaaatatcgttaatgtaaatattataagttagacaaattgattgaaacatgtatttacctaaacgctcatcaaaagcttaaacgaatacgacatgtaactgcgattttgatatatgtctccattctatatggaacctcgatgtttgacctttctattgactactgtacatgttgatataccatggatcacgaatattcaagtaacatttagtcaattcttaatgtgtgcaaactgcaaagcctagcataatatacagataataaatttacgtaagaaaaaaagttaaagaacaatacaatgcatggtcgtctaagtaaaaatttatgttgaaatttctttacttctactcgtcattagttgaagagaaaaccttttttggtgatctaactcacatatgtacattaacctatttaaatccggttaataagatgatagcgaaactttatacaagttgtggatctctagactattatcttcgaaaattatatattttaaatgcatatatcaatgtgtgtttatacctatatgaatcatgcatgtcattcatattcaaagtttggtctcggtgggtttcgttagttatatactgattatggaaagcaagtgccgattcgtggatgaaggagtttcgtcttgtggtgaacgtggcaaagtaaaataaattgaaagtcttatcaagttttggtggacgaataaaattggaaggaaattgattgattgcaatggcaataacatcggtaactagcggacaagagagttcacatggaagctctgtaaacaatcaataatggtgtgtgttggttccaactagtatatcgatcattgattgcgaaaagacatcaaacacagacaatatttaacgaacttaactaataaaagtgaggctgttaaaaattaacttagttcttgcggcatatcaattattcaatatcattttcatgtactgttttggataaattttatatttttagtgtgtgatacttttgattggaaagtgtcacgcaattataagatgtagcacattttttacttaacggtaatcaaattggattggccaaccaagtgattggtcgctttttcaacctaggtctgcaaaaataatcttgattagacgcattttctcattggctactttgtaaattcacatatgtcttcaggatttgaaaaataatagtttcgtatattagagtctccaaatgctccaaagaaaactctagacctaattttagtttggtggactcagcacgaacctagctagactatcaagttaagggtaaaacataatttttaagacatgaacaacttcgtgagtcgtggcaagttatgttccaatcaagttgaatcacatcttatggacttttcgtgcattagtgtaccagggtaatgtgttgtcgcaactctattaatcgtcggatttttttttttcgtagatgtagttgggctcagcccatactgatttaaaagtcccattcttcaaattgcttttgaaggaaaacaagaagaaaaaaacttatcgttaggtatatgccaaggttagtttttgtggcgatcgtaaaagaagtcacctgaatctaaagaagcagacgatgaatgacgaacttggctttacacaattaagaggagcgaaagaaatcgccaagcaaacaaaataatgctattttcacgaacctaactaagaaatgtgaggctattaaaaagtgtttcatatatatgcgatcgacatctactagccgtaaaatgtcggtttcatatcatttatcaagctaatgagtaatgttaagtcctatcaatttggctcacacagttgcggacttttcatgtgaagcttagctaatgctaatttgttgcaatactttttttttgtcgacaagaatttgttgtgtatatagaaggatatacacgtatcactcgtaacgcatgttttcaataaaactcaaaacaaattagtgatctaaaaacacggcaatttgatgacataaactattacacgtcacttgtaacgtatcattctcttcattccgttttttaaaaggatagacatatttatacacgtcaaaaaacataatgttgtatctgaacttgaaactgaacttagtagaaatagaattttcgtataaaaggtcttattgtatttgtgaacaagctaattaatagacatagaaaaaatttagtggagaattgtattagtttataaatatttgtgaacaagctaaataatagacatagactccaattgatatttatcattacaatctaaaactctgaatttttttaaactaatacagttctccacaaaaaaaatactttgattttgagtatgaagatttaccaaaaatttcagtttttgcccaacttgccaacctgaaatttaggtttataaatataaatattagaaaggaccccatgaaattaggtttatatgagaacatattttaggaatattcgagttttggatttatcattttgaaatttataattatctttaacaaaaaattgataattatctaacccttttttttccccaataattcttaaccatttttgttattctgtattaaataaatattgactattaatcattgtttcgacttttctagtatgcaaaattttagtttctgacaaaaaaaaaaagactgaaaaaaacaaaaacccaactttaaaattgtggaagtccaatttgctgaagaaggtgaagaggtgagggctcttcacagccattcaatctcataagacatattgccggagaaactctctcggggggtcgcttcttctgcattttctgcttcccaatg

SEQ ID NO: 15649 - DNA, 3003 bp, Unknown; identical to SEQ ID NO: 15648
  misc_feature (1)..( 3003): 2750-1469P.txt file - cDNA_ID_1012984; gDNA_ID_1621091; Annot_ID_170718

SEQ ID NO: 15650 - DNA, 3000 bp, Unknown
  misc_feature (1)..( 3000): 2750-1469P.txt file - cDNA_ID_1012984; gDNA_ID_2926199; Annot_ID_141407
ttatcaacaccaacgtaccatcatcgtgtctgtgctatgattccaatttttgctctcttatgacgaacaaagacgtttcgactgtcactagacaaatgacaaacccgtagaaatttgtatattattaattactttataagtttagtattaaattaattggaaagataatatatatagtcctatagatactaaacaaataatttaaacaaaatatcgttaatgtaaatattataagttagacaaattgattgaaacatgtatttacctaaacgctcatcaaaagcttaaacgaatacgacatgtaactgcgattttgatatatgtctccattctatatggaacctcgatgtttgacctttctattgactactgtacatgttgatataccatggatcacgaatattcaagtaacatttagtcaattcttaatgtgtgcaaactgcaaagcctagcataatatacagataataaatttacgtaagaaaaaaagttaaagaacaatacaatgcatggtcgtctaagtaaaaatttatgttgaaatttctttacttctactcgtcattagttgaagagaaaaccttttttggtgatctaactcacatatgtacattaacctatttaaatccggttaataagatgatagcgaaactttatacaagttgtggatctctagactattatcttcgaaaattatatattttaaatgcatatatcaatgtgtgtttatacctatatgaatcatgcatgtcattcatattcaaagtttggtctcggtgggtttcgttagttatatactgattatggaaagcaagtgccgattcgtggatgaaggagtttcgtcttgtggtgaacgtggcaaagtaaaataaattgaaagtcttatcaagttttggtggacgaataaaattggaaggaaattgattgattgcaatggcaataacatcggtaactagcggacaagagagttcacatggaagctctgtaaacaatcaataatggtgtgtgttggttccaactagtatatcgatcattgattgcgaaaagacatcaaacacagacaatatttaacgaacttaactaataaaagtgaggctgttaaaaattaacttagttcttgcggcatatcaattattcaatatcattttcatgtactgttttggataaattttatatttttagtgtgtgatacttttgattggaaagtgtcacgcaattataagatgtagcacattttttacttaacggtaatcaaattggattggccaaccaagtgattggtcgctttttcaacctaggtctgcaaaaataatcttgattagacgcattttctcattggctactttgtaaattcacatatgtcttcaggatttgaaaaataatagtttcgtatattagagtctccaaatgctccaaagaaaactctagacctaattttagtttggtggactcagcacgaacctagctagactatcaagttaagggtaaaacataatttttaagacatgaacaacttcgtgagtcgtggcaagttatgttccaatcaagttgaatcacatcttatggacttttcgtgcattagtgtaccagggtaatgtgttgtcgcaactctattaatcgtcggatttttttttttcgtagatgtagttgggctcagcccatactgatttaaaagtcccattcttcaaattgcttttgaaggaaaacaagaagaaaaaaacttatcgttaggtatatgccaaggttagtttttgtggcgatcgtaaaagaagtcacctgaatctaaagaagcagacgatgaatgacgaacttggctttacacaattaagaggagcgaaagaaatcgccaagcaaacaaaataatgctattttcacgaacctaactaagaaatgtgaggctattaaaaagtgtttcatatatatgcgatcgacatctactagccgtaaaatgtcggtttcatatcatttatcaagctaatgagtaatgttaagtcctatcaatttggctcacacagttgcggacttttcatgtgaagcttagctaatgctaatttgttgcaatactttttttttgtcgacaagaatttgttgtgtatatagaaggatatacacgtatcactcgtaacgcatgttttcaataaaactcaaaacaaattagtgatctaaaaacacggcaatttgatgacataaactattacacgtcacttgtaacgtatcattctcttcattccgttttttaaaaggatagacatatttatacacgtcaaaaaacataatgttgtatctgaacttgaaactgaacttagtagaaatagaattttcgtataaaaggtcttattgtatttgtgaacaagctaattaatagacatagaaaaaatttagtggagaattgtattagtttataaatatttgtgaacaagctaaataatagacatagactccaattgatatttatcattacaatctaaaactctgaatttttttaaactaatacagttctccacaaaaaaaatactttgattttgagtatgaagatttaccaaaaatttcagtttttgcccaacttgccaacctgaaatttaggtttataaatataaatattagaaaggaccccatgaaattaggtttatatgagaacatattttaggaatattcgagttttggatttatcattttgaaatttataattatctttaacaaaaaattgataattatctaacccttttttttccccaataattcttaaccatttttgttattctgtattaaataaatattgactattaatcattgtttcgacttttctagtatgcaaaattttagtttctgacaaaaaaaaaaagactgaaaaaaacaaaaacccaactttaaaattgtggaagtccaatttgctgaagaaggtgaagaggtgagggctcttcacagccattcaatctcataagacatattgccggagaaactctctcggggggtcgcttcttctgcattttctgcttcccaatg

SEQ ID NO: 15651 - DNA, 3000 bp, Unknown; identical to SEQ ID NO: 15650
  misc_feature (1)..( 3000): 2750-1469P.txt file - cDNA_ID_1012984; gDNA_ID_2926199; Annot_ID_201689

SEQ ID NO: 15652 - DNA, 3000 bp, Unknown; identical to SEQ ID NO: 771
  misc_feature (1)..( 3000): 2750-1469P.txt file - cDNA_ID_1013016; gDNA_ID_1620319; Annot_ID_153274

SEQ ID NO: 15653 - DNA, 3000 bp, Unknown; identical to SEQ ID NO: 771
  misc_feature (1)..( 3000): 2750-1469P.txt file - cDNA_ID_1013016; gDNA_ID_2684233; Annot_ID_192333

SEQ ID NO: 15654 - DNA, 3000 bp, Unknown; identical to SEQ ID NO: 1761
  misc_feature (1)..( 3000): 2750-1469P.txt file - cDNA_ID_1013144; gDNA_ID_1620445; Annot_ID_157283

SEQ ID NO: 15655 - DNA, 3003 bp, Unknown
  misc_feature (1)..( 3003): 2750-1469P.txt file - cDNA_ID_1013190; gDNA_ID_1621110; Annot_ID_171774
aagtctatgtttggacaacaaagtagcatacttgacctatttgaattagcatgagatgttgtgttgttttgttatgttgtacaaagaaatggaagcaagtttaaaaaaaaaaaaactgtagctcttatagcttgcaaatccttgtaatctatattaattataaaggtgattcaacaaacaaaagtaaaatgagagaactgcatcaactagtgtatcagttccaaaagaataataacccacagaagggtacattcttcgtcatctaccacctaagtttcccttctaatcatctcagtgaggtccatcacctggtttctgtacattgcccttgtgttctttttctggctgtgatacttcttttggggagagtttagtagattgatcttcttgggttttggttggagcattccctgaaggtttcttggtttccaaaacaatttcttttattgtctcttcgatttttcccagtctctgtctcatctccattagctcttcgtgagacttggttgctgcctctacttgtaatgccttttgttcagcttcttctttctctttcttttcttcttctttccttttcttctctccaagttcctgagaattagtccaatatcatgaggcatatgctaacaataaccagaatgaagacagaggataaacattaagacatgactgaaacatcatcagaaactcatatcagtttgataatgaacaataaggagaactcacagcatccatgatcttcattttccggcgagcatattgagcaaccagatacacagctgttacaagaaacaatagccatttataaacaagtcacatttgacagtaaacattgaacataacaactaagataacgggagtgaatggcaatacctacagatggcaagcagacgatgatgaattgcaccacatgccaatcaaacctaacacaaagcaaaatccatatgagaacatactacaaacacaaagcagcacaagaactcaacttactatataagagatagtttcagaaagtcaaagagataatcgcagcagaaattgaaaaccagttcacttgtttcagcctaaagaagctcacattccacaattctacaatcctgaggttttgtagcctaaaattaacttcaaaatatacaaggtaagttgaaaaaatagggtctttccatgatttaaggcctatagaagcatgaatcaaacacattatagcatctgatagactaaacaaaggacaagatcagcgaagagtgtttgcacgcattcgagagtagaaccctctttaaaccccaaatctccggtagaaattacccaaatttgttcttcttgggtggttcagtgaacaagatcttcgcagcggtaacgaaatcgagcttatcgagtttcttataggtctcatcgtagcgagaaacactagattcagtgtcgctgtgatgcgcaacgctagattccgtcttctcgagtttattctctccttttgtgcagaaacgtcgggtcctgtaaagcttcaaccgggtcgataatccggaccacgagcctctgccgcgaatcatcttgatctctcccggcgtcagctccaatcactactcgcgcattttccacacaatatgagcgtttcaaaacgcggtcttgaggctaatgttggtctccacaataaccggatctgaccgtaccgtaccgggtctagggttattggttcgatcagatagcgaatttaagactctcatgtgtcaattgtgatcatctgactttgtaataaatttcaatcaaatttggtatgtttgtcaacaaatatttgttaccttttgttttcagtttgtttttcatttttttttttcagctttggattctatttgtgagctaagatattgaccttttttttttcccctttctgttcaattaattttaatgattattatattatgatagggaaacattttattttgaaggttaaccaaaggcaaattagtggcaggcctctaatatttcatatattaaagatagaaagttgaacttttcatacaacttgtaactcttaagtttatagtctttacaacatcttgtacatcatattatatagttgtaagaaaaaaatgaataaacgcaaagttatattgattatgatatttttgtggacactacctacattcaataaacaaacatagatccatgattagtgtcatttttccccccaaatttttattttccgcaatgaaaaaatggtttattgtactatatatatattcccactttgcaccataattagtcgcaccactttgacaccttaattaaaaaaaaaaaaattgtgagtgtattaaaaagaaaaagtgtggtctcgagacaaaaagttgagccaaagataggggaatattattaagctttatttatattggaccccataataaactgtgaaattattaaagcataccgccaatattaatttaagttctatgcatttataaaatcattggctataaacattctataaggtatctagatcgttcgcggtaatcggttttaagaaaaaagattcataaatagttttaaggaaattgtaaaatggattcataaatatatggaagtagatttatttattgaagattcaaaactagtaataaaagctaagcaagaagtctcatttctgttgctaaaggctttttaatcgaaaagaggaaacataattggcatcggaaatctcaaaagacaagtctcgttggcattttgtgtaattttaataatcttgaatttagagaaaaagggtaaagcttgtcatcaacttattcgacagtttatataaaaaccgagtcatctttcatcggaagtacttccctccggcccattttctgacgccggcgatactctctttcacctctttctttctttcttctctgtcttttttgctttgtttctctccagtgaggaaaatggcggagtcattacgattctccgactgaaaaaagaagttaaaacctttgaaagaagaggaagaatttgaaagaaaggaaaatg

SEQ ID NO: 15656 - DNA, 3003 bp, Unknown
  misc_feature (1)..( 3003): 2750-1469P.txt file - cDNA_ID_1013226; gDNA_ID_1621125; Annot_ID_172253
aaaatagtgtaaagacaggtacattacaaagtcaagagtatttacccattgatttgcattttgtatgtttgaagaaagatttgctaattgtgtttgctaaagatgaatgtttaagacattcatcgagatcttgtcttaacgacttgtcctctagaagcttttctctccatcttctccctctttttgcgagtcttctcatcctcaacacctccctaagttcagtcatatagacaaaacacagtccattttaaatgatcatgttttatttcccccttgttcaaagcactttgagagtattcaagacaaagtgattacctctgaaccatgtgacaatagtcccttaataagaccagaagctttgtatgctccaaatgcagggatctaaaataaaaacaagcaaaagtaaatggttgcatcattcctacagagcaaatctgttgtttgccttaaaatatggcaataaagaaaattgagatgggtatcataccactaaatacgcgtaccaaaactttccagagatgatagatccgacctgcacaaagcaggtgatgtagagtacatcatgcaaatatctgcaaggaagaatagagcatcaggcttatactatagaatctaccataaatccaatccaccataaagatgacgattatgtagcaactgataaacgataaaactcggagaaagccacaactagtaaaacatcactcatttcaaacaactgataatgaaacagtcctcctactattgcttttggttatggaaacagaatccaactatacagaaacacttgagacaaaagcaggcactttctagttgatcaatttaaaagacaaatctttccgaacgtacccacacattccaggagtgctcatgtcaaatccaccatcaagaagttcaccagcatcactaacactaggctttgccatttgatgaagaagcttatatggaatcccgtaacctaacgatgttaacacaagaccaatccaatttttccaggtatgacttgaatgcgaaattataaccctcactaggacatacaaaatctgcaaacacatattgccaaaaacatcaatcctcgaattcatcgaaacaaaatcagctaaacattgaaactttcgagacctaaagatcaaattcaacggatttttagttccatattgatacaagtaacgtatctaaacaaatctaagctcaacggattaatgtattgagaatttaagaaatgaggaacgaggaagttacgttgcaaaggatcataatgagacggagcttagccatgtgtcgagcgttctcatctttcctcttctttgctccttgattcgccatgagttaaaagagaatgatcaaagagacgaggaagatagttttttcagtttctgtaattcttcttttgctttggatcttcacaaatggtgtgagagaaaacttttaggtgtctaagcttgtttaatccaattatatattgacacctgtacctttttgtcgtcctcttttctcaaatacttttttcacgcaggaaatgttttgtttggctgcgtgtcgtaattacgcttttccttgggtttaggacaaagattcttaatttgggctttcgtctatccttatcagttgttgttggaaaactgaaacagttctatctaaatgggccagaacaacctaaaaggcccataaaatctgacatcttaaggcctatcaacagaaaactgcattatttcagttttccaataacaaggtctgtgtgaaaatcaccggcgctcggagaagacatcaacataaaaccttttaccgctgttccaaaaactaaaaagtataccatttctatgatcaatcggtaaaacgatatttataacggaacaagaacaaaagtagtgtaaatttttttccctgttttatgttgttctatagacaaaaaaaaatgaagatatcatatcttgtgggcctatatccaatatttgagtgtagcccatatttggatcaaacatcacgtcttacacaatggttctcggatatcccaatctgagtatggttttaggtcaattcaacatagtattattttgtcaacaagcaccattatagcaaaaacaaagatgtatcaaagaaaagtagcgttaggggttggtcagaaaaagacatgtttgcagtgtaagaaatgacgtggacacgtggaatcatacgcaatgcaacatgtcatcattaaggtccattgttcaacttacccattgagaacaaaactagaaaaattatagaccgttggatcatctttaaggaccatgtctgattcacgtatctctctcccacttggaatatgcttagcctatgtatgggacacattcgctaggtccaccagtatcctgtacgcaaacgcaacatcgagaagcttccgtttccaatattctatactataattacaaatgttaaaaattgtttataaaatttgtaatttgacttgtagacatcattagggtaaagatatatcaagaaattacttttttcataggaataaaaatagtcaactctcttaaataagggacaaatacaatcctctaatgacctggaaaacaactatgcaatcaacattaacaaatgtaattagaagtacaacacaatcaattttggttaaaaaattgaaagtatataaaaataaaaaaataaaaaacgtgtcttagttgataaataactcattaatcacgcctctatctctctgttttaagagtttaacagttaaagatcttcttctctatcttccttatttgactacatctccgtttattcttgggtctctctctatctctcttatccagatttatcatcgtcattacatataaacatcaaacttaacttttcaatattctcattcactttttcctcttgtgctctaattcttatccggatccgatttctctcatacaaagattctgtttttcttcttgggttattgttcttgctctgtttccgtatctcaaagtttcagctgctgaattgaatttgcattgatcgtagatg

SEQ ID NO: 15657 - DNA, 3000 bp, Unknown
  misc_feature (1)..( 3000): 2750-1469P.txt file - cDNA_ID_1013226; gDNA_ID_2926198; Annot_ID_201599
atagtgtaaagacaggtacattacaaagtcaagagtatttacccattgatttgcattttgtatgtttgaagaaagatttgctaattgtgtttgctaaagatgaatgtttaagacattcatcgagatcttgtcttaacgacttgtcctctagaagcttttctctccatcttctccctctttttgcgagtcttctcatcctcaacacctccctaagttcagtcatatagacaaaacacagtccattttaaatgatcatgttttatttcccccttgttcaaagcactttgagagtattcaagacaaagtgattacctctgaaccatgtgacaatagtcccttaataagaccagaagctttgtatgctccaaatgcagggatctaaaataaaaacaagcaaaagtaaatggttgcatcattcctacagagcaaatctgttgtttgccttaaaatatggcaataaagaaaattgagatgggtatcataccactaaatacgcgtaccaaaactttccagagatgatagatccgacctgcacaaagcaggtgatgtagagtacatcatgcaaatatctgcaaggaagaatagagcatcaggcttatactatagaatctaccataaatccaatccaccataaagatgacgattatgtagcaactgataaacgataaaactcggagaaagccacaactagtaaaacatcactcatttcaaacaactgataatgaaacagtcctcctactattgcttttggttatggaaacagaatccaactatacagaaacacttgagacaaaagcaggcactttctagttgatcaatttaaaagacaaatctttccgaacgtacccacacattccaggagtgctcatgtcaaatccaccatcaagaagttcaccagcatcactaacactaggctttgccatttgatgaagaagcttatatggaatcccgtaacctaacgatgttaacacaagaccaatccaatttttccaggtatgacttgaatgcgaaattataaccctcactaggacatacaaaatctgcaaacacatattgccaaaaacatcaatcctcgaattcatcgaaacaaaatcagctaaacattgaaactttcgagacctaaagatcaaattcaacggatttttagttccatattgatacaagtaacgtatctaaacaaatctaagctcaacggattaatgtattgagaatttaagaaatgaggaacgaggaagttacgttgcaaaggatcataatgagacggagcttagccatgtgtcgagcgttctcatctttcctcttctttgctccttgattcgccatgagttaaaagagaatgatcaaagagacgaggaagatagttttttcagtttctgtaattcttcttttgctttggatcttcacaaatggtgtgagagaaaacttttaggtgtctaagcttgtttaatccaattatatattgacacctgtacctttttgtcgtcctcttttctcaaatacttttttcacgcaggaaatgttttgtttggctgcgtgtcgtaattacgcttttccttgggtttaggacaaagattcttaatttgggctttcgtctatccttatcagttgttgttggaaaactgaaacagttctatctaaatgggccagaacaacctaaaaggcccataaaatctgacatcttaaggcctatcaacagaaaactgcattatttcagttttccaataacaaggtctgtgtgaaaatcaccggcgctcggagaagacatcaacataaaaccttttaccgctgttccaaaaactaaaaagtataccatttctatgatcaatcggtaaaacgatatttataacggaacaagaacaaaagtagtgtaaatttttttccctgttttatgttgttctatagacaaaaaaaaatgaagatatcatatcttgtgggcctatatccaatatttgagtgtagcccatatttggatcaaacatcacgtcttacacaatggttctcggatatcccaatctgagtatggttttaggtcaattcaacatagtattattttgtcaacaagcaccattatagcaaaaacaaagatgtatcaaagaaaagtagcgttaggggttggtcagaaaaagacatgtttgcagtgtaagaaatgacgtggacacgtggaatcatacgcaatgcaacatgtcatcattaaggtccattgttcaacttacccattgagaacaaaactagaaaaattatagaccgttggatcatctttaaggaccatgtctgattcacgtatctctctcccacttggaatatgcttagcctatgtatgggacacattcgctaggtccaccagtatcctgtacgcaaacgcaacatcgagaagcttccgtttccaatattctatactataattacaaatgttaaaaattgtttataaaatttgtaatttgacttgtagacatcattagggtaaagatatatcaagaaattacttttttcataggaataaaaatagtcaactctcttaaataagggacaaatacaatcctctaatgacctggaaaacaactatgcaatcaacattaacaaatgtaattagaagtacaacacaatcaattttggttaaaaaattgaaagtatataaaaataaaaaaataaaaaacgtgtcttagttgataaataactcattaatcacgcctctatctctctgttttaagagtttaacagttaaagatcttcttctctatcttccttatttgactacatctccgtttattcttgggtctctctctatctctcttatccagatttatcatcgtcattacatataaacatcaaacttaacttttcaatattctcattcactttttcctcttgtgctctaattcttatccggatccgatttctctcatacaaagattctgtttttcttcttgggttattgttcttgctctgtttccgtatctcaaagtttcagctgctgaattgaatttgcattgatcgtagatg

SEQ ID NO: 15658 - DNA, 3000 bp, Unknown
  misc_feature (1)..( 3000): 2750-1469P.txt file - cDNA_ID_1013253; gDNA_ID_2926226; Annot_ID_142550
tttggagacgccgaacttattgtgaaaatgaagtatattttttgtagttgttgtggtgttacacatcaatattttttacttcttaaaagttgaatcaagttctcaaaccaacaaactttttatcgaatcaatggtacgacgaaattcaaaaatgttattacttactaattttatagatagtttaaaaatataaattaaaaattcagtttatttatataacaagaaaaatcagtgttattattgaaacacctaccaaaataatgaatcaaaaacataaaattaattatagtattgaattcataattcaacaatattattgaaaatttgaaatacataccaaataataatagttttttttcgtctctataatatggtggactcccgaataaagttgaagaaagaaagagaaaagaaattgagaagaaaaaagaaaaaaaggtgaccgtattctccgtcgattgtagccgcccgaagaaatatcttctcctctctcgtttaaccacgaatttgctctgatattagtgtttctctagccatggtaagctcaattttccacttgttatctcgatctgtagtgtgcttctctcgattttggtttcgtcttatatacaaatcttctgtttacgcgattctggctcattttgttgtttcgctagatctgtatacagattttggttttagatctctaagatttggtgtttatgtgatcgttttgtgactgatttagaatcaaaactgtgcgagagagcttctctgttgagttcactgtggctctttcgattcctctatctaaaatttgaaatcagaagagtatttacggcttcctgttattgcaaaaaatttcaaagttatatatcaatttcgataacatttggttgtttgatccattatccttgatgtttgattcatcagtttcatgtaattgataatcactctagaggtttgagaacaatagaggtttttggattgtgttatgtgaaaagatttgaatatgagtgttgtttggtttaacaggcgaacgcggcatctggaatggctgtgcatgatgattgcaagctgagatttctggaactgaaggctaaaaggacacaccgtttcatagtttacaagattgaggagaagcagaagcaagttgttgttgagaaagttggtcaaccgatccaaacttacgaggagtttgcagcatgtcttccagctgatgaatgccgttacgccatttacgattttgactttgtaactgctgagaattgccagaagagcaagatcttcttcatcgcgtggtagctagtcacataatctgccattaaatctgtgtctcgttttattgttatcttccaaaggttttcaacgtacttatatgatgcaacttcgttgttttgctaaggtgtccggatattgctaaggtgagaagcaagatgatctacgcgagctccaaggacaggttcaagagggaactagatgggattcaagtagagctacaggcaactgatccaacagagatggatctcgatgttttcaggagccgtgccaactaaaaagtaaaaaccaaagtttattatcatcatccccttgaaagatctattctcttattctgttatttttgagtgatggtactggtacttgattatgtttttacattgtgttgtgaagttatgaacctataaacaacttcattctatcggtgtttcggtcttgtgttcgatgttgtctttggttttaaaatggtgtgtaaggaccccaaatcgtctattgaagatgaacccttttaggtatatcattgatgaaatggatgattaaaagtttctctcacatttgtatgaaacaactgtctataggacaagattgatcttcagtttttttatttggtccactgattatgattggattggtcgttttgaccattcattcttatgtttgtttccaaagaaattgcttgtgttgaccacatttgtatagccccaacatgaagtggtaccatatcatttaataaacacagatcatgattacactatttctaaacttgtgaacttatccaccaagttatatcacctaatccatgacattttcaatataggttgggcaatcaaataaattcttatattatgatgattaacagaaataaaaatttaactttgggaaatagtcttatccatatattattataataaaccaaaatgtatagaaacatataaacaaatgaaattcgtttcattcatataattcggatagcttgcaaataacgctgacaaaaaaagaaacagtgaagaagaaaaaaaagaaggtcattttcattttctccatttgatttttgccgaccggagaaaatatcttcttgccgtcttcttcttcatttcaccaggaacttttatttgaaatcggtttgatttagccatggtgagctcaattttctcttgtttctgttttaagtttttcgattttgaagctttcttctcgaaaatttcgattgcttgctagtcgatttcgagttcaaatccgtttgcttctcttttggataacgattctcgctcgtttagatagatctggagatgatttcagatactcgatctttggtagttgtagtgtgtgatcggattagagatccgattaaagaactcgtaactttgttgttctgcttcttcgctagcttatctgaaatcaggaagaatctgctgtttttcacttcaagttcaaatcaagtgttaaattctacgaatttttgactttttcatcagtgtttgtcaattgttcgatctatgttgtgcttcttgcctcttgatgtgtcaaaattgaagtcaaaatcgttctacaaagttgtgaggagctacttagcttctcttccttgtgatgttaacaatgttagagatgatgataatattatccaatttctgtgttaagttgtgatctttgttttagaaaatgtgtttttgaagagatgtgcatcttctcagtgttttgttatgtgtattgatatgataacaggcaaacgcggcatcgggaatg

SEQ ID NO: 15659 - DNA, 3000 bp, Unknown; identical to SEQ ID NO: 15658
  misc_feature (1)..( 3000): 2750-1469P.txt file - cDNA_ID_1013253; gDNA_ID_2926226; Annot_ID_203512

SEQ ID NO: 15660 - DNA, 3003 bp, Unknown
  misc_feature (1)..( 3003): 2750-1469P.txt file - cDNA_ID_1013306; gDNA_ID_2214511; Annot_ID_184246
cttgtgatatttccaatctttgtctaatgatcctacttctttacttcgttgttttgatctctagtgtttagagtgaaagagagatgtaagtaatttctctagaccaactacattgttgaataataatttcttataatcagccaaacgcttgtttttaaggtctctttacgaatatcttataatgacactgcatacattaagttggtttaagatgaatacaaaactctaagcatgcacattgaaagtactcgtacgttaaaacttaggattaaggatgagtttattatctgcttaggcttaaattgtctttgttctgggttacttattgaacttctaatataaccgcatctttcttgaatgactctgcctctctttcaaaattatttgtttcagcatcactgtaacatttattgtaaaaatagtttttttgggtttgaataaatttaactttcaactcaaaaaaaaagaaaaactcgatattatatatagaaaacggaaatgtgaaacataaggagaagtaaaaagcacggttacgtttgtgtttgtttacaatttacaaacacgtctaacttggaaaaactaaaataaatgtacttttttttttttggtctaaaataaatgtacttttttcttaaacatgaacttattttttgtaacagttgagtggttgaatgaatcattaatttaagttatctttagtttctcaatcgataatatatacctactcaaacctttatacaatactataagatataaaatactcctactccttcccaattctcaaaactgcttaaactttcataatcatctaactcttgtaatttatataatctagtcattagattcatcagtatattctcaatattacaaaggctaaatatcttatgctacattatccaagcaattcgcagaaaacaataaaaataaaattgtcaaacatcataagcctagtagagaagtagaagttgacattccaaattcgtccaatctctacctcaactagatttaaaactttttatcctaaggtaagtaaaatacacaaaagtagagcaaaatacgatccttgaattaattcaggttgtgtaaccgttcaatcttttctaacgctgtgacacatatttgaacccaactaactcaaatttttttattttaaatataatttataaatgtggaaaaaaataataaatttataaataaaaatatatgtcatcatttctatttataaatatcgaaattattacactcaagttctaaaatattttttttttttaaaaactaaagtgaaaaaatagcaaagtacattactcacagtagtgaagaagcagccacctgaaaaaaaaaataacacacacaaaaaaagagagagagagagagagagagagagagagagagagagaccccacaaagagcactaatcttcacaaccctaactccgatttttctcacacctcccaatctctctttctttctctctgatgaaaagctaacggaaaatggggaaatacataagaaagagcaaaatcgacggagctggagctggagctggtggtggaggtggaggcggaggtggaggtgaatcctctattgctttaatggatgttgtttcaccttcttcctcttcttcacttggtgttttaactcgagctaaatctctagctcttcaacaacaacaacaacgctgtcttcttcaaaaaccctcttctccttcttcgttaccaccgacttctgcttctcctaatccaccgtcaaagcagaagatgaagaagaagcagcagcagatgaacgattgtggttcgtatcttcagctacggagtcgtcggcttcagaagaaaccaccaattgttgtgattcgttctactaaacggaggaaacagcaacggaggaatgagacatgcggaagaaaccctaaccctaggagtaatttggattcgattcgtggtgatgggtctaggtctgattctgtttctgaaagtgttgtctttggtaaagacaaggatttgatttctgaaatcaataaagatccaacctttggccaaaatttcttcgaccttgaagaagaacacactcaaaggtatcatctttcttcatcaatttcaacctaattttttgggggatttcttatttttatgaatctgtgtgaatttgttctgtttcttgagaaaactttggtattggatttgaaaatttccgttgttaatttgaaaaaaggatcaattttttgtcttgtatttggttaaaattgaaactggcgttttcgattttgaaatttaatgatatttttaccatgtgtatgatatgatgccatcttttctttatctgacaacaccagactcttctctctgtttccgggaaagaaaatatatataattaatcaaaaatgtgtttcttttttcttgagaaagtttttattttttcttcaattactttgaagaaggtgatagtgactattgttttttcttcagactttttatctgctttcatgtaaagaatgttggatttgtgtttgaaatgtctctgtaagtaactctttaaagtttggttcgtttttgggattctgcaaagtatatgatgtgtctctgtaacatcttaagttctagtttctctgtcttttaatttttcttgctgtttggttgttttttgatgttatgatttcagtctaaagtcgtgatcttgttgaacattgtatgagtcattaacttttcaagcattgctgaagtaatcttcattggaagtttcttctttggttttatgctttgtgaactttgaaccacaaatcaacaaggagtttctccttgtccttttttcagttaaacatgacttgcttagttttagttatctatatgcaataaagtttgcttgcttttgctgctaattaaggaaacacggttatgtgctttttccttgagagcattgtatgaaagtaacatattacttactctcagcttcaacaggaccacaagggaatccacaccatgcagtttgataagaaggcctgaaatcatg

SEQ ID NO: 15661 - DNA, 3003 bp, Unknown
  misc_feature (1)..( 3003): 2750-1469P.txt file - cDNA_ID_1013341; gDNA_ID_1620604; Annot_ID_161742
tgaacctgtcccatatgactgtatgaagcaggatgcaaagtctcagcgtatgaggctgaaggcatgtgagggtatacgatgggaggaggaggtacggggtgatggctaatatagtggttcctttggtatacagatggcgtggggtttctgctactagatgtttcatggtatcttgggaagcaaacattaccagattctatagatccagtagcaatgttacctaagagatcattcaagaagaagaataaaattatcaagaacttgccaaaagaccaatcgcaatgctgagaataagttaaggatagtaccatgcatataaggtacggcaggtgcttgagaccaaagcgaagatgatccatcagatctgttgccattacagtgttggtcataccagattgagccaagaggtggaaaaggatgagctgcatagtttccttgactgaagttgttatgaccatgagagagaagtggatccattgtagctgctcctgctctgttcctcacacttctctgatctagtggttgtggataagtaccaaaatgtgggaatgaaaaaggtgctgtctccgatgtattcaattgagggaaagaacaaggagcaactggatactgagaatttccaggtattacttcagaactctttcttttgaatccgtgatccataaaatgggcatttctctcatgttcagtggaagtaactccaacaactgcatcattacttccatgagacaacagaaaactcggtggagcttcataattcacataagggacatagaaatttggtgcggttgacatgccagaaccaagatttgaagcatgttgatgatggtactgtggaggcccgtagaacattgagttgttatcataaggttcttgcagagaatgagcttctaaatgaggaacagtgttcactggtgggatatctggatacagatagttagttccaatgcgaggttcaggatggggaacaaagctttgagaattctgctccatgtctgaaccagtcatcatatttctttgtcgcatattgcttgttgcagaaaacacctggtagttgaatttacaaagatcagcaacaatgcaacaaaacaacaattaaaattcacccacaaagacagctaaaactcgatgctagttacaccgcacgctgattctagctagtgcacaaactactgatatctaataatggaatcaaaacatacaacaagtaaatatcatcccaacttgtcccgtgaatgggataagccaagtctcaaaacatcccagaattttttcgtcatcatcgcaagtaatggagacacacacacaaaaaaaacagtatcctgacagcacagaacattcaaggtccacggatacattgtagaatatgaaaccttagctgcagagatcaaaccccaaacattcaaaaaagtaaatccttcgaaccttttcctaacccaataattttcacagaaactaagcagtggctttagcaaaactcaccacccttgtggcagaaaacaacactaaattacaatttaatgaggcacaagccacgttgccagacatgccttaggaaaatcaaatcaaacccaattcacgaaacataaaccagaaaattttagaaaagaagtagagaagatttgttattaagttgctgacctttctagcatcaaagattgaagaaacaaagcttcgaaaattcagcaaaaaccaaccaactcgtattaatcggaagctcccctgaagcataaacagagtttagaaaattaacaacctagacgatcaaaagaagattaagcctaaattccgactaaccaataacaatgcaattcttcagcagctctcgtattaaaaacaatttcaaaaccatatttcaccaaaaacgacaaataaaaactcataatcaaaaagctcgagaatctgataatcgttaggatcataagagataagtacctgattattttcctcagggagagagagatccaaggacggacgagagagagattagatgaagattaagacgtcggttttctagtttctaatttattttcctctcacggtgacggaaggttttttattttcctcttcttctcagttttatttaattcatttattctcttatgcttatctttgcttttttttattaatttatttgcccttttttcattggtttcttgagttttcggacagcaaatatttttttattctaattaaaaaatgaatatcccttatttaccaaacgacatcgtacaaggatcgaaaataattaactcaaaatcttttgatttccccatctaattactacatttaatagcatgatcgtttttgtcttgtactaaagcatgccattgaatttaacaacaagataagcatgtcactggcagccattaatgaaggtatgcttctactctaactaacaatcttttttaaaaaaattagacctctggaattttcactatcataggacgattaaaaaaaaagttaggcaaaatgttgagaaacagaaaaattaggcaaaacttagaactaaaacaatagatcaatgcgacggaacagaattgaattatcccatgaggcaagtaacatatgatgcgaatatttatagggaggtgattcccaatcccatgtgcttctttttggttaaaccaccttctcacctaatctaattgtgcccaattaatcatccaagtctctctgtttatgttaagaaagaacattataaaaatacaaccatgtctttttttttttcttctaaatacaaccatatcttatcttagcttttataagctatgaaacaatgatttaatacatgtgtatattttatcatataccaaagtataatcaaagcaaaaatcataacgtggtgaaaatcgtattattattattattggatgctagagaaacggcagcgttttgggaggtcttaattcttaaaccttactcttgtgattctcgagccgcttcaaggagcttcgtgcttgtcaacaaattttccaagcgcccgctgaactaaaaaagatg

SEQ ID NO: 15662 - DNA, 3003 bp, Unknown
  misc_feature (1)..( 3003): 2750-1469P.txt file - cDNA_ID_1013364; gDNA_ID_1620771; Annot_ID_167529
taattcgtcgacatattatttaccatagcctattttcataccacagtaattacaaagactattttatttcagacagaaatatcattcacagattagtcaacattaagtacaaaagtattatacaaagctttgttcgttttggtcgctgagtctggtccaaatgccaaaccagtagcgacacttacaaccaccaattgtaaactacaacgagttaggtttccaagtcgtagatcgtggtagcttcaaagccattgaggctgttgggacgaatccaagtaggcgacatcgctgcaaactgtgatttcagattctgagcagatgatttccgcattctgaagtgtgaatccgtgcattatgggcaacgggaatcccttttctaggtggtcatttgcatatggcacaaacactgtttgtataacagtccacactattggctagaagatcggaacaagataaagaaacacgtgtgaatgctaagaatgaaagaaacaaacatgcgagtgctttaaacacttgacatgatggttttacctgaagaagatgcagatggagatttccaatgttgctccatttcaaagacatggagaaatcttctaaacttacgctgcctccaaggttattgcccatgactctgagagcaccagatccccggatcatctgcagccaaggaaacagtgaatcatctattggtaaaccgacatcactgcaaatttgcttatagtaagtaactaaaacaaaagatatggagcattgtcattggaggactcaccaaggagatgcaagctacaggtattacttggtttgcatctagaacattgattactaggtctgcattaacattagctccaacgtattgctctgatatctttacaagcggaggtgaggacaaactgatgttcagattcatatcctggttcgggtatttcttgtatagttgtggaatgatgaacctccacctagcagtgtttaaaagagactgctctggtattttatccacaacccattgcacaaagtctgcctgaatatggcaagagtgaacatcctcatattagaaacaacggtggaaaacagtaatattgatgtatcggaaacatatagaacagttttatcaagagcattctttctagttggaacctaaggaattaggaaattaggaacttacattatagtacaaagctgcagcagagttaaaaacagcttcgtcaactgaaattccgagcattttagaatttccagggcagataactaaagatacagactttttgaagaaggattttaagacttgatttgtttctcctttggtgaacaagccatcaatctcaaaagtgatagatgaatttctcaatataggatcactggtgaaagtgacattaaggtcagcattatcatccactgggatttcctttggaaggctttgtaggaatgaatcaaggtctgatactccttccgtgagtttcttggcaatggtactttccacacttgacccaatttggtctttaaatgcattaaccatcctgaattgcagagaagagaatgaagtttaaaatgaaaaacaaaccaacacctgtcttgcaataagagggagtggatctatcatcaataagcaaattatttcgtacccctgataaaaccatgatgctcctccttccaactcaatggtaatgtcttccacatggcatccacattccgaaagagaaagttttaagcctccttcatcacttttcaagcctagagagagcccgatttccatgccttgaaccttaccgagaaggcgagaatcagcactcatcaaattccctttgtaaaacagatataaaaatgagcagatcacagcaacaactaaaaccaacacatggaaatggtaaacagagagcaacagtcacctctgattcccatatgcaactatgttctaagacatataacaatcacgaaacataaggatacaaaacagaacagaaatttgtgattcgcaagaaaaatcttgtctttccattgattcacaagattgagatgatcaaaactaagaattagtaaaattgatcataattacctgaacagatgcaataccctgatcagatatttcaataggaggaagccaagtactgtaagaataatgccaattcatactcaaattacaagtcgtccctgaagcgacgatgacaacacctgtctcaccaagcttaacataagatgacgcaacgtcaagctcgtatatcgtgagattcgagacaacaacatcgattcctccaaggaacgggattttcatagatttctcaattctgggaatctggagaggtataatcgacgcgatagctttgttaactagaagatttttgacgaaatcgagtccgttttgagatacgagaaccgatgtgaatgaatcggtgctctgcgtttgtgaaggcaagaagaagaaacttggtaatagaagaaagagaaagcatcgtccaacatccatggcggatattcaaagctttttttgttttggtctctctatcttcttcgatgaagaaaacaggttaatacagtgaagttgcgtaatggtttggattattgagaaatgtctaaaataaccttagtcattcgatttgcattgccttctggggtaatctgattcaaaaggaagtgtttggggtgaatacataaattgttaaaatattaatgtttctggtcaatcaaagctaaagctgaggtctatagggcaataaaagtataaatacatatgtaattgtatatactgtacatattaacgtttgatatgtatataagctcaagtggtgttaaatattctaatatgtgtctaaggacaatagttcgattaaaattggaagcttcgggggtaagaacataagttttgaaaagtatttatctttgtggtaaatcaaagctaaaattgaggtctaaagggcaaaagggtgtcataattggtctctcgcggtggcttggcgacacggaacagagaattaatcgagaatctttttcagcttgtaaccggaattcatg

SEQ ID NO: 15663 - DNA, 3000 bp, Unknown; identical to SEQ ID NO: 4333
  misc_feature (1)..( 3000): 2750-1469P.txt file - cDNA_ID_1013388; gDNA_ID_1620700; Annot_ID_48757

SEQ ID NO: 15664 - DNA, 3000 bp, Unknown; identical to SEQ ID NO: 4333
  misc_feature (1)..( 3000): 2750-1469P.txt file - cDNA_ID_1013388; gDNA_ID_1620700; Annot_ID_165047

SEQ ID NO: 15665 - DNA, 3000 bp, Unknown; identical to SEQ ID NO: 4333
  misc_feature (1)..( 3000): 2750-1469P.txt file - cDNA_ID_1013388; gDNA_ID_2926192; Annot_ID_141086

SEQ ID NO: 15666 - DNA, 3000 bp, Unknown; identical to SEQ ID NO: 4333
  misc_feature (1)..( 3000): 2750-1469P.txt file - cDNA_ID_1013388; gDNA_ID_2926192; Annot_ID_201128

SEQ ID NO: 15667 - DNA, 3003 bp, Unknown
  misc_feature (1)..( 3003): 2750-1469P.txt file - cDNA_ID_1013540; gDNA_ID_1620695; Annot_ID_48672
tgtacgttcttggtattcttgaggaatttgaacaatgttgaaagcttcctataacaacagggaaatcttttataaaatatgaaattaaaaaactctagcatatgttccacggaaaacagagggaggcactggaaatacaaaaaagtaccatcagtttgtgaaatttctgagcatcatcagtgcgatcaatggttaagcaattgctctggttcaaataattgtattcacttgctgctttaatcttcaatctctctgcaaacaaaattatataataaatggtctagcactagcagcttctagctactcttagccttgagcaagtaagctaatcagtaaattatatatgtctacactttgcttcagcagggatacttccaaagaatctcatatgtagctgaaagattgaattcctgcattagttcatagatatttcggtttaaaatgttacctttaagaattggtgaagctcctgcacacaattgataaaagatatggtagcatctctcgccattgcacagctgagccactcttgactggtccaaagagactactaattagcccatgaatagctagcaagtggaactggctataaagcttctcaacagaaaatttaccttttctaggagaactatggtcgttcagcacaagtagtcacacaaacatggtgagaaaataataaaagacgtgagctccatagtcaagaaaatatgacaaacaatcatacaaatgttcaagtcttacaagtttcaagtttagctccgcatatctttccctttgcactaaaatgaatctccatcagtttaccctgcaccaattcagatttactattgaatccaaaccacttctcaatttacggctgacaccaaactttcaaatttatacaaacgattttagtattcctatgaaaggaaaactttcagtcatgcaaaaatttgaagaaaaaaaggatgtacaaattactcacgaatcggctagagttatcatttcttgatgttttagcattcccaaaagcttcaagtatacaatttgtctttaggatttcattttccaccccaaagctacctccaccaagagcttccaagtactgcattgcatattttgctgtctcagttttcccagctccactttctccactaagaaataatattttattcatttgattgatgatatgaatatcagaagtcaccttcacatatgcatagtcaaattatcagtgcacaaaaagcattcagaatagaaagcatcgtaccttatgataatagattggttcttctcctctgcgtaaagaaaaattcaaaaatgtaaatgcatacaataactatctcaacaccaaaaagggagaaagtgtatgctttcactcacctctcatcatatcatcataagctgcatctgccactgcataaacatgaggagcatccaaagcattcttctgataagctgatagaaactcttctccatagatctggacattcttaaaaggatttactgcgatcaaaactggccctgctttactctaaaacagaaaacattaaaattatgttatatacctctgctacactgaaatataaacgaacaaaccagaatgtttttaacttacataaatcaagtcttgtgagtatctgacccggaggttgtagagaagagatggctcattcaaataactaagctgagtaaggtcttcaactccttctaaaatctctgggttagcagggaaaatctcctccattgctactttcacaaccttagataacacaaaactacagcataaggccttttccatatcctaagaaatttcaacaatctcaaagaacttcttacatcgtcgttagcggacagcataacacacacatcatcactagaagaagtagaatgtatcttccccaagtgccactgcccattagcagcaactcgacaccaaacacaaagtttctggcataaaatagatgcaatgtaaaaactgtattcttcttgtcattggagaaactagaaaccgcatactttagtttaaaacaataatgaatcactaaaagttcaaacctttcagtttctcctcaatgatgaatatagaaatacaacataaaagataacacaaagaagcaatcatttacctccctgacgaaatactcagcgctattgatccattcaggatcatgcgagttcttcgctcgactcatctgagcagtactaatcttcacaacttcatttccagttttctccttctctgcagattgtgtgatctgctcagtgctccaatccttgtcttctttctctatggttttgctttccagcgaaattgcattacgaaacttcgccggaagagattgacgaatcaacggcattggagccctgaaagtagacggagagggaagcgacgaagacctctcgcttgaatcaagcaggcgaagagactccaaaatttccttcactgaacttttcatcattgtagtcggaggagacgccgataaacctcaaaatccacccaccaacaaaaattcaaactttttcgtttttgtcttgaatcaatacccattttcgcgtaatgtgagttccttaaaagccagcagaagaatctcgaaaccagaaaatctgaaaattttattgaataataatctctctcaacattgtaacatgtaactagaaattcaagaagggctaaaaataataacactaaaaacagcaacaaacctcaaataaagaaactgaatttcgccaaggagaagccattccaacggaatacataacataagagagagaatttgaaaatacagagacaatgaaactctaattaggtagatgatgatcatcatcgggctgttatttatttattatccattagtggataaatgggcctttaccaaaactatgggcccaataagtagacacgaattagtaaattgacccgacacagagcattaggtgaaattctaaaattcgattgatttccgtctctctactctcgttgctttgcttcgtgccgtcgtgcgtctgacctaatcagcaatg

SEQ ID NO: 15668 - DNA, 3003 bp, Unknown; identical to SEQ ID NO: 15667
  misc_feature (1)..( 3003): 2750-1469P.txt file - cDNA_ID_1013540; gDNA_ID_1620695; Annot_ID_164930

SEQ ID NO: 15669 - DNA, 3003 bp, Unknown; identical to SEQ ID NO: 15667
  misc_feature (1)..( 3003): 2750-1469P.txt file - cDNA_ID_1013540; gDNA_ID_1620666; Annot_ID_163938

SEQ ID NO: 15670 - DNA, 3003 bp, Unknown; identical to SEQ ID NO: 15667
  misc_feature (1)..( 3003): 2750-1469P.txt file - cDNA_ID_1013540; gDNA_ID_2926191; Annot_ID_141022

SEQ ID NO: 15671 - DNA, 3003 bp, Unknown; identical to SEQ ID NO: 15667
  misc_feature (1)..( 3003): 2750-1469P.txt file - cDNA_ID_1013540; gDNA_ID_2926191; Annot_ID_201022

SEQ ID NO: 15672 - DNA, 3003 bp, Unknown
  misc_feature (1)..( 3003): 2750-1469P.txt file - cDNA_ID_1013574; gDNA_ID_2936573; Annot_ID_194838
tggaaagtgcaaattggttatggagaagcttgagtctttgcaggagggagatgatccttcagggttgcttgctgaatgggctgagttattggagcctaaccgtgtggattggattgctttaattaatcagttgcgagaaggaaacactcatgcatacttaaaggttagactttagtttcaatcattaaaatgacttccgctagattgttcttctgaaattcataatcaaatcaaactttgatgcatatttgtttgttgtattggcctacttctatagtgttggttcttgactgatttccccaattgttcgatttaagcttttttgctaattggattgctatggaggtcatttgatggggtggaagttctgtggtttgatttcgttacttcttttaatgggattcttgttgttgttttatttgttactctaggtagtttgttcaatcaagatggtggtacttgtatgcatatgtctaacatgggtttggaagagatgatttttaatcaattggtactggttttgatgtttcaacaggtggcagagggtgtcctggatgaaaaatcgttcaacgctagcatctcggactactcaaaactcatccatatccatgctaaagagaatcacattgaagatgttgagaggattctaaagaaaatgtctcaaaatgggatctttccagacattttaaccgccactgcgttggttcatatgtacagtaaatcaggcaactttgagcgagcaacagaggcatttgaaaacttgaagagctatgggttacggccagacgagaagatctacgaagccatgatcctgggctatgtaaacgctggcaagcctaaactaggtgagaggttgatgaaagagatgcaagcaaaggagttgaaagcctcagaagaagtttacatggctctgcttcgagcttatgcacaaatgggagatgccaatggagctgcggggatttcttcttcaatgcagtatgcatcagacggtccactgagctttgaagcatatagtttatttgtggaagcatatgggaaagcaggtcaggtggataaagcgaaaagtaactttgatgaaatgagaaagcttggccacaaacccgatgacaagtgcattgcaaatttggtccgagcttataagggagagaactcattagataaggcactgagacttttgttgcagctggagaaagatgggattgaaattggtgtgatcacttacaccgttcttgttgattggatggctaatcttgggcttatcgaggaagctgagcagcttctggttaagatctctcagttaggagaagctccaccatttgaactccaggtgagcttgtgctgtatgtattcgggtgtgaggaatgagaagaagactcttcaagctcttggggttttggaagctaagagagatcaaatgggacctaacgagtttgacaaagttataagtgcgttgaaaaggggtgggtttgaaaaagatgcgagaagaatgtacaagtatatggaagctcgaaagtttttaccttcacagagattgcagatggatatggttgcaccacctcgagcttttgggtctggatctggtagagtgagacgatttaactcgtaagtggaaaaatcttttgaaacttattcaccatcgtgtgttcaatgttctgagccaactcacattacgagtttccattgattaaactgtagttgtgttctgtaataatcttgttccttggaattttggaatctatttactgcttctttttagctatgagatttttcttataatccatttccaagaagaactcttttctgaaatcaactttctatttggtttctcaacattttccttcgtttcttccatctgaatgtatttttcatggaaacgatcagtttcatttcgtgtccgaaaagttattatgtttcctctttcatagagaaacatataaataccataggttctctcttttgaacattctcctctcggatcattacaattttgccaattattgacaaaatcgcctaaaccgatcacagtgtaggccgggacaagattgatttttattaggaaaattaaacggatacttgaatttaatttcttttgttaactaactttgtttctttgtgatctcaatttccttttgacgtatacctcaactttgtaaaaagcgaacatacaatttcttttatcaagtagatataacttcaagaaattcgaagagataatgtacatgtgtgaattgtgatgtgtctgccacgcatcgtacacgtgtcgctgtcagcaatgaaaaagtcagaacaatccattaacgagctaagacaaaaacaaaaagtgttgaatccagttgtttatgcaagttaagccgactaatttagtattgttatgcagctaaatctgttttggatcgaagtgtccatcttaaacaattttccaaggttatctcctcgttacgtttgatatcgatcgttccacctcaaagacgaaacttcggcatcatcttttgtcatgttttagtttgtatccttgtataactgtattgctttcaagaaatttcatatttcgttgtctatctaaaactttggaatcaggaccaaacgaaataaaatgggatccaaaactacagatgaatttactgtactaaaaataataatcgtagtcgtcgtaggagacaagataaggttggaaagttaatatcttctctgtctatagattttaataatttaatcaattccactacttaaatcagtgggctattaccggagttttccaaagccaaatcatgggatttagttttctcaagttatacgaacttggaccgaatagccaagtaaatatataatattaataaactaaacacaaatttaatatctttgggggataagaattatctagatgacttgcatactttgcatggagcactatatatagaagaatgttaacacatgatcctaccgacattaatgtttactaatcagaaaatcaaaaggacaattggaaaagattaatagcaaatg

SEQ ID NO: 15673 - DNA, 3003 bp, Unknown
  misc_feature (1)..( 3003): 2750-1469P.txt file - cDNA_ID_1013621; gDNA_ID_1620675; Annot_ID_164248
tataggaatcgcttcccgaagcttccaacattctcttgtttctcctttgtctctcaatttcagtttcctatattatacgcttgtattaatcaccagtatacattttgtcgtttctgggtctggaaccctagtagttattatagcatccatcgctttcttcaatcgccgtccatcagagtttcaagggatttgctttaaagatcaatcctttcctaagaaaatagcgacaattcatcagcttttcctttcccatccttcattaccttaacttactcgagattcatcttccagctgaaattgtgaaacttcgtttctgggtttttatcagaaaacactctgtgacttattgtgtggtgatcgaggaaagaaaaaagatggttggtggtggaaacaggagagatgagggatcgatgccgattcagaacaccaacttgtttgctgctttggatacttcgaggaagaagaagaagtctgataaggctggtaagagcaaagcttcctctaagagagaagattcacagaaggagcctgagccacaggttttctgggcacctacgcctctcaaagcaaaggcttgggctgatatcgatagcgatgatgaagatgatgattattacgctaccactgctccacctcagtccctgtggagcacttctgaagcctcccattcagatgctaaagacgttcccgctgaggtcacaagtccaaatctttcatatatatgttgattttgggttcatcatcatagctttatgcatttcacatgttgaaaattgtaacactggtttaatatgtctcttgcaataagcctctttagatttcaaatgcttccacgaattgaatgagttggcctttttttctactgttgttatctcgcttaggcttaggcttgtgttgtctgaattctgaaagggaaattaatgttattgtgaagtaagctgctttgtctcctgaaggttcatatatctaattgcattgttatcgaaatttttctaggcaatgtaagtttgttgtgcaatggtttctctaaaccgtggttgtgtgcctatctgttcatttgtttctcatagagatgcatttgatttcaatgtcgcaggaaattgaaagcgaagaagacactcttgatgatggagatgatgatgatgtggaggaagatcacgagcagggaacagagacacaagttcatccagaagcagagcctgaggtgaaaaaggctcctgaagttcgtgctcctcctaaggaggcagagaggcaactttccaagaaagagaggaaaaagaaggaacttgctgagcttgaggctttgctagcagattttggagttgcaaccaaagatgagaatggtcaacaagactctcaaggtatagcacaatttcactttactatattcactcgttggtaacaattctactctactctattcactcgttggtgatatttatctgtggatacctttctacgctgaggtatcactggctgagaaaaccatgttatggctaatactgatagacgtttcttctgcaaatatgaacagataagggggagaagaaagaagtgaatgatgagggagagaagaaggagaacacaaccggagaatcaaaggcctcaaagaagaagaaaaagaaggacaaacagaaggagctaaaagaatcccagagtgaagtgaagagcaactcggatgctgcaagtgagtccgctgagcaggaggagtcttcttcttccatcgacgtcaaagaacggctaaagaagattgcatcaatgaagaagaagaaatcaagcaaggaggttgatggtgcttcaacagctgctgcaaaggaagcagctgcgaggaaggcaaagttggccgcagcgaagaaaaaagaaaagaaaaactacaatcagcaacctgtgaggtgaagaaatcaatccacccaccgttgtgatatgaacataggttttgttcatatgagacttacttgccttgaacaaatcttttgatggggaatgtggttgggtcgtgttttagagttatgataactttggatcttttaatcctatcacaatggaacatgacaagaagaaactctgtttgaatttttccttttacatacattctttgctcatcatggttatacttggatttgttttatctcccacaacaatttctacttcttgatcttacatattattagttgtggctaagccagcgcttaataaagttaatctatgagtctgaatcgacaaaatcaattgattattttaattatatgtttatcaaacgaattagatcatatttttgacaaacctaaataggtatatttctcttgcggtttattcgacgaaaaagaaaagttggtacagtatttattttactctcttaagacaattcgtcgtgttgcttgctactctcgacgacggagaagtagaaatgtggagaagagtgatcggaaatgtcgccgtccggcatcaattacagcgagcgctatctagtaaagccggtggaagtggaaagagcgccaacgtttcagctgcagtggattcgatgcttctgcgttccctcaaggaacattacttagaggtttctaagatgactcctcctccggttcgttcctcctcttctctctctctttctgtgttttctctctatgtctcgtcttaggtacaactgaaatttcagtactgttacttaaaccctagcttagctgctgcttcctccacttagggtttatggtgggatttacagatttttgattgattttgcagaaagtgagtcctccgtcaccatttgagattgtgaaagggtcgcttgaaggaagtactggtgctgttctgaagaaatctgttggaaatgaagagatcaatcttttcgttatgcgcttggctcacggaggtgatgaagaagacgatggtgggatcaaccagttgttccttcatgttgctgtatcaaagccaaatcagcctgattctttgcatttcctttgtggcctttaccctgatgcattgggtattcattctgtttccatg

SEQ ID NO: 15674 - DNA, 3000 bp, Unknown
  misc_feature (1)..( 3000): 2750-1469P.txt file - cDNA_ID_1013621; gDNA_ID_2926202; Annot_ID_201940
aggaatcgcttcccgaagcttccaacattctcttgtttctcctttgtctctcaatttcagtttcctatattatacgcttgtattaatcaccagtatacattttgtcgtttctgggtctggaaccctagtagttattatagcatccatcgctttcttcaatcgccgtccatcagagtttcaagggatttgctttaaagatcaatcctttcctaagaaaatagcgacaattcatcagcttttcctttcccatccttcattaccttaacttactcgagattcatcttccagctgaaattgtgaaacttcgtttctgggtttttatcagaaaacactctgtgacttattgtgtggtgatcgaggaaagaaaaaagatggttggtggtggaaacaggagagatgagggatcgatgccgattcagaacaccaacttgtttgctgctttggatacttcgaggaagaagaagaagtctgataaggctggtaagagcaaagcttcctctaagagagaagattcacagaaggagcctgagccacaggttttctgggcacctacgcctctcaaagcaaaggcttgggctgatatcgatagcgatgatgaagatgatgattattacgctaccactgctccacctcagtccctgtggagcacttctgaagcctcccattcagatgctaaagacgttcccgctgaggtcacaagtccaaatctttcatatatatgttgattttgggttcatcatcatagctttatgcatttcacatgttgaaaattgtaacactggtttaatatgtctcttgcaataagcctctttagatttcaaatgcttccacgaattgaatgagttggcctttttttctactgttgttatctcgcttaggcttaggcttgtgttgtctgaattctgaaagggaaattaatgttattgtgaagtaagctgctttgtctcctgaaggttcatatatctaattgcattgttatcgaaatttttctaggcaatgtaagtttgttgtgcaatggtttctctaaaccgtggttgtgtgcctatctgttcatttgtttctcatagagatgcatttgatttcaatgtcgcaggaaattgaaagcgaagaagacactcttgatgatggagatgatgatgatgtggaggaagatcacgagcagggaacagagacacaagttcatccagaagcagagcctgaggtgaaaaaggctcctgaagttcgtgctcctcctaaggaggcagagaggcaactttccaagaaagagaggaaaaagaaggaacttgctgagcttgaggctttgctagcagattttggagttgcaaccaaagatgagaatggtcaacaagactctcaaggtatagcacaatttcactttactatattcactcgttggtaacaattctactctactctattcactcgttggtgatatttatctgtggatacctttctacgctgaggtatcactggctgagaaaaccatgttatggctaatactgatagacgtttcttctgcaaatatgaacagataagggggagaagaaagaagtgaatgatgagggagagaagaaggagaacacaaccggagaatcaaaggcctcaaagaagaagaaaaagaaggacaaacagaaggagctaaaagaatcccagagtgaagtgaagagcaactcggatgctgcaagtgagtccgctgagcaggaggagtcttcttcttccatcgacgtcaaagaacggctaaagaagattgcatcaatgaagaagaagaaatcaagcaaggaggttgatggtgcttcaacagctgctgcaaaggaagcagctgcgaggaaggcaaagttggccgcagcgaagaaaaaagaaaagaaaaactacaatcagcaacctgtgaggtgaagaaatcaatccacccaccgttgtgatatgaacataggttttgttcatatgagacttacttgccttgaacaaatcttttgatggggaatgtggttgggtcgtgttttagagttatgataactttggatcttttaatcctatcacaatggaacatgacaagaagaaactctgtttgaatttttccttttacatacattctttgctcatcatggttatacttggatttgttttatctcccacaacaatttctacttcttgatcttacatattattagttgtggctaagccagcgcttaataaagttaatctatgagtctgaatcgacaaaatcaattgattattttaattatatgtttatcaaacgaattagatcatatttttgacaaacctaaataggtatatttctcttgcggtttattcgacgaaaaagaaaagttggtacagtatttattttactctcttaagacaattcgtcgtgttgcttgctactctcgacgacggagaagtagaaatgtggagaagagtgatcggaaatgtcgccgtccggcatcaattacagcgagcgctatctagtaaagccggtggaagtggaaagagcgccaacgtttcagctgcagtggattcgatgcttctgcgttccctcaaggaacattacttagaggtttctaagatgactcctcctccggttcgttcctcctcttctctctctctttctgtgttttctctctatgtctcgtcttaggtacaactgaaatttcagtactgttacttaaaccctagcttagctgctgcttcctccacttagggtttatggtgggatttacagatttttgattgattttgcagaaagtgagtcctccgtcaccatttgagattgtgaaagggtcgcttgaaggaagtactggtgctgttctgaagaaatctgttggaaatgaagagatcaatcttttcgttatgcgcttggctcacggaggtgatgaagaagacgatggtgggatcaaccagttgttccttcatgttgctgtatcaaagccaaatcagcctgattctttgcatttcctttgtggcctttaccctgatgcattgggtattcattctgtttccatg

SEQ ID NO: 15675 - DNA, 3000 bp, Unknown; identical to SEQ ID NO: 11618
  misc_feature (1)..( 3000): 2750-1469P.txt file - cDNA_ID_1013645; gDNA_ID_2214506; Annot_ID_133756

SEQ ID NO: 15676 - DNA, 3000 bp, Unknown; identical to SEQ ID NO: 11618
  misc_feature (1)..( 3000): 2750-1469P.txt file - cDNA_ID_1013645; gDNA_ID_2214506; Annot_ID_184120

SEQ ID NO: 15677 - DNA, 3000 bp, Unknown; identical to SEQ ID NO: 970
  misc_feature (1)..( 3000): 2750-1469P.txt file - cDNA_ID_1013653; gDNA_ID_1620342; Annot_ID_154006

SEQ ID NO: 15678 - DNA, 3000 bp, Unknown; identical to SEQ ID NO: 1315
  misc_feature (1)..( 3000): 2750-1469P.txt file - cDNA_ID_1013674; gDNA_ID_1620386; Annot_ID_155457

SEQ ID NO: 15679 - DNA, 3000 bp, Unknown
  misc_feature (1)..( 3000): 2750-1469P.txt file - cDNA_ID_1013830; gDNA_ID_1620769; Annot_ID_50176
acccagatactacaatcatgacctaatcaacaatactgaaaattgaaaaaggattcagagctaagctaaaatgtaccatcatgtactgaaccatatgctattagaagtaacattggctcacccattcacaatgaccaattcgattttcctgacatttacgtgaggtctgttatataaaacagaaccctgctttttgttaatcaggttttattcaaactacaagcttaatccccataggaaaatcacttaatctaattcatttttgagatccggaatcagtacaagaaatttaccttgaagtggaccctgagatcggctcctctcgccttgcaagctgcaaacgcaaaaccaatcgaaaccatttcaatgaatactcattgcatagcttgaggtaagccaataacagtgtagcttgaagcaaaaaataacagagactatgaaagtgttcttacatttggtgatattatcgggctcttgagagtacttcacctgaagaaaaacaataagaagacgaagaacataagtataggagcataagttagaagtgaaaacgttgtaacgacgagtctagtgtaacgcatttaccatggcggccaatgagaagaacagaggacggagaggatagagatctcagtagttggagacacttaatatatagtgaaacagaagaaaccctaatcggcgaatacattagttgaactagtgtattaaagtactatttgttcatatgggccttctgggccacttatcttgataagtaggcttaaaaagcccaattatgtgctggtaacacccgacttgtaggctaaaaccctcggaacttgtttcacatcgagacaactctttagacttttctcagtaacaaaaacaccgaaccctagattttctttcacctgaatctgaagatggagttctctaccgccgactttgaaaggcttatcatgttcgaacatgctcgcaaaaattctgaggctcagtacaagaacgatcctcttgattccgaggtttctttcttctacttgtcctcccctctcctcagaatttgtgaaattgcttcatttcgattaatatgatcggacctgatatgtaacgaatattaaggatgttttgtggagatggatttcgtgaatgtattgtcactatgtgtagtttaggtcttgaattcgatggaaatattataatttatgttatgagattgattatatgtttctctgaaattacattttttcctgagtttcttttgatatgtggtcatattaagaatacctttgcgaacatttttattttctgtagaatctgctgaaatggggtggagctttacttgaactttcacagttccagcctattcctgaagctaagctcatgttaaatggtatgatctcttctttaatgtcttaaaataaacgcctcaaattcatctttgctctgaaatgtaacgaaatattattgatcatgtagatgctatttccaagttggaagaggccttgacaataaatccagggaagcatcaggctctttggtgtattgccaacgcgtacaccgcccacgcgttttatgttcacgatcctgaagaagcaaaagagcactttgataaagccactgaatatttccagagagcagaaaatgaggtgcattttcagattttatgcttttgaatttgaaacttttatgttgttgtgagtgctgtgagaccaacttcttactattatattatttcaggatccaggtaatgacacatatcgcaagtccttggattcctcactaaaggtattatttcaacattccattttcagagtcaatctttgtgtacgcaaattataacattaatcatggagacaattgctgctgttataataacaaggagagaacattttattccatcttcttcttctgtatttcttttacatttgagctcatgtttttgtctgtctatgtgaataggccccggaactgcatatgcagtttatgaatcaaggaatgggacagcaaatactaggtggaggaggaggaggaggtggaggaggaatggcttcatctaatgttagcgtaagttatcatgtgtttaagtatgctgtccaatgttttgaaaagtgtcatcttcttattatctagtagcagcatgttcagaagaacataagcagagagtgaaagaatctcatatcatatgtgggttataagttttcgtggttgctctgagaaattgccttgcttttgcagcagagtagtaagaagaagaagaggaacactgaattcacttatgatgtatgcggttggataattctcgcttgtgggattgttgcttgggttggcatggcaaaatcccttggccctccacctcctgccagataaagcctaaagccatagtagtgatgagcattccgtaagaaataatgcctgcacactgaaacacctagttacatttcctggtaccaagttgaagagtaaccgtttgtgactatagtaccaacaaatttatttgtttactttattattaggatgttttgtctcttcatatcggtttttggtttcttcttatctgtgttgcacgatgtctatgagtttcttatttacagaaagatgctgaaacttcctgtaagaataacctatgagaagtgaaactctaaagaaggtaggagaaaatttcccgttgcaacaattctgtattctcaactatatgctatgtactttttgttacgtactttaatacatactcttaactaaacacgctttaagatgatttcgtgtgcgattcacttgctaactttgattaaaatgattagattagattcacttgctaactttaattaaaatgcttgcacaaatgggcctagtgaaagactctaataaccccaaagcgaatggtaacagaagacaaaaacctatgggcataactgtctttaccttatccctcgccaacgccagaaattttataaataaccaaacgcagcgttgtgtctttttttcgttcgactcatctccaaagagaagcttcaaaaaatg

SEQ ID NO: 15680 - DNA, 3000 bp, Unknown; identical to SEQ ID NO: 6969
  misc_feature (1)..( 3000): 2750-1469P.txt file - cDNA_ID_1013977; gDNA_ID_1621119; Annot_ID_56270

SEQ ID NO: 15681 - DNA, 3000 bp, Unknown; identical to SEQ ID NO: 6969
  misc_feature (1)..( 3000): 2750-1469P.txt file - cDNA_ID_1013977; gDNA_ID_1621119; Annot_ID_172012

SEQ ID NO: 15682 - DNA, 3003 bp, Unknown
  misc_feature (1)..( 3003): 2750-1469P.txt file - cDNA_ID_1014010; gDNA_ID_2214527; Annot_ID_134167
gagaaatatcgaaatcgctcccctaaaggcggtgtggaaagggaaaatcttaagagttatggtcaagaggataaaaagaggaaagcagaggatttagacagtggaaaaccgaatgaataccagaatagacgccggaaaggtggctctaagctatcagaagaagaaagagctgctagattgaagcaaatgcaaatggatgcagaggtgcacgaggagcaaagatggacaagattgaagaaagccgatgagaccgatgcagtggaagctgataagaacaaagtatccacgggcaagagctttttggacgatgctaataagagtgtgtatggagttgagaaaggcggaagctcaacaattgaagaaagcgtgcgtcgcagaagctattattcacaacgtggaactgcagctgaaggcaatgcgtttcgacgctgatgatgtaaaaatattgttacaacaaaacacaatgtatactaaggtttgtgtcttttttgatattttttttcagtttttgacattgtatttctgattccagaatattgttgagcatcaagctctttaggtcttttgatatatgaagacaacgaggctgaggcccattgtcataagcccattatggggtggtccagtgttttatcccggatcgagcgtgggatttgaatagttagtgtgtaatcttattcagtgagtgggacgttgaaatgaggtgtatgagtcagtcaatgaatacccgtgacatgtagttaagccataatactccaagattcccctttggcaccttttaaataaaccacgagatgaagccactctctcttttgtctttttttaatatgttttattttctttctttttcttgtccatctttttaaaaataattgaaatttgacctagggtcgttggtgtgttataattttgattcaatttcgaagttcgcatgttgataagaaaaatataaacatttgattcgaaaatgtttaaaggaaaaaagagagatggatttgtaatggaaacattttgacgtgtgagattttaacctctcctattttcaaagattgggcaatatggggttagaagcttgcaagggggggttcacgtgtagcgtaaatgtacaatgatgtcacttcctacactttatcacgtccttgaatttataggaataaagcaaatgttctaatcaataataccaatcttgcatgtttatttaattattatatagaagtttgattttataacgaattgtgtaatatagtacttttgtgatgccgccgttcctgaatatgttgactttgcaattgcaagccagacctagaactgaagaaaaaaatgtacgaattagtcatttatttattcgaagcataattcatttggaaaatcaggaagaccattatagtacggagccaaaatatttgaacatcacctaacatgttttgtaagcttctttgatatttattcttgttaataaaattttactttcttacggacaatagatgcaaccaatttgcattaccttctaaaaatatctactgtagttgtagcggtgcacatcaattattataatttttgaaaaaatggtgtacccaaaaaaacataaatattgttatagcaatgaatacaaatcaaagaaatatatgtatttaaaaacttaaaaatagaagagttgtacgaattcactaccgaaatagacaagatttattttggccaataccaaaattaatggtatataggacatgagtgagtcggcttaaagagaagaaaataaaaagaaataagaaataggaggagatgtaacagaatggaaaacgaaaggtgtggaaattgatttgagaagatgtcgcctaataatattaaccgacaattagtggcctcttctctgacttttgacttatacactgttttttcacatttgttggtgctctctcactcccacccaatcacggcccttcttttctaatcttactactctataaaattaaatattttttaaaaacttatagtgatcatagtgtggaacatttgcttcaatagttgacctagtaatttaatagtatctatatgatgtatacaatgttctttttgttgccaatatcgatagaaaaaaagttttaacttattcgaaaaaagaagacaaaaattattatagagtaggttcttgtggatttgaatcgatttgtgatttgtgaatactacttaaatagaattatgtaagattctacaattagtgttttatgtggttagagatgataaaaattacagttagatgattaaataatatttccgttgatacggatttggattctctaccataaatacttccaattgtttatgttgatgagaagtgtgatcagttaataaagaattaagacgttaattaagaaattgatatgtgcaaaaattgatagggcatcattaggcaatttaaaaagaataatagagaatggcatttaatcctatcaatcatatttagtttgcctatttagttttgaacctttcgattttaaatttaactttattgtcactataccagaaaagaattgtagtcatttctccaaatgaaaaagatttgaacttgggaacaaaaaaaatttgaaatcccaagaaaccttttaaagtagtaacaaaggagtagaatgttccagttcagtaaaatttcactttttctataaaggtgacagtaataaaataagatactcttttttattttaaaaaaaaaccttcgaatttttccagaaaagaatctgacaaaaataaaatgaacagagaaaagaaagcaaccaatcttatgcaatagaatccaaaaattcacttgtctctattttttaaaaatgggtcctttttatgaaggttttgccaaagtgtcattagtgcccagaattaaacgcaatccacttcaatccaaaatcccatactaaattaaaaccaacacacaggaagaaagaagaaacctctcatcttcccctctcttctgttgaagaaagcttaaacctttctgggtttcttttaactatg

SEQ ID NO: 15683 - DNA, 3003 bp, Unknown; identical to SEQ ID NO: 15682
  misc_feature (1)..( 3003): 2750-1469P.txt file - cDNA_ID_1014010; gDNA_ID_2214527; Annot_ID_184777

SEQ ID NO: 15684 - DNA, 3003 bp, Unknown
  misc_feature (1)..( 3003): 2750-1469P.txt file - cDNA_ID_1014113; gDNA_ID_2214532; Annot_ID_134305
cgacgttcttacaagagttttgaacccaaagatgggttagggtgggtgacatggatagatattgacctgtgggctctggccaatcaactccgacaagatagaaatatctaagttattattatttggtaacaaaattgtatattatccacacaagagtagcaaataatttgtgttctacaaaatggtgacaatattcattttcaaagtaacaactaacaagtgttcagttcacatttttaaaaatcaacattcaaaaaaataaaattcaacagattgagattttgatttcatacaacattaaaattcttaatatagaaaataaaaattatatgcaaagaggataagtaatattaatgttggaaaatcagttttcaataccagtaatattttatgtaattagttttccgaaatagttatatctgataaattttgtcataatttttttgattgtatggatttgataataacacacgtttccaccaatcaacaacggaaacgcaacgccacgttccgccacgagtcgcgattctctctcactctctctcccatctttctctataaaacttgtgtcgtggacactcttaaaacttcactcaacaaagcttaaccataaactgtgagtaaaaaagagaagaaagaaaaatggtgctaaaggtgtacggacctcactttgcttcaccaaagagagctttggtcacactgatcgagaagggcgttgccttcgagaccatccccgtcgatctcatgaaaggagaacacaagcagcctgcttatctcgctctacaggttccttccttcttcttcttcttccttcatcttctctgatttcttccttttttctccgattctgatggtttcttgattcttcttcctatgcagccttttggtactgttcctgctgttgttgacggtgactacaaaatcttcggtaagatctttaagaaaatttcagtatctgttttgattgtttctataataaggtcaatttcgtcacagaacaaccaagttctgttttaggtcaagttctatagttatgatttgtgttggctcatgtttgttttggttgtatgtatctatagtgatgctaagagatggtttttgatcttttgacagagtcccgtgcggtgatgaggtacgtagctgagaagtacaggtcacaaggacctgatcttttggggaaaaccgttgaagacagaggtcaagttgaacaatggcttgatgtggaagcgaccacttaccacccaccgctattgaacttaacgcttcacataatgttcgcatcagtcatgggattcccatctgatgagaagctgatcaaggagagtgaagagaagcttgcgggtgttcttgatgtctacgaggcacatctctcaaagagcaagtacttggccggtgacttcgtgagcttggctgatttggctcacctcccgttcactgattacttggttggtccgattgggaaagcttacatgatcaaagataggaaacacgtgagcgcgtggtgggatgatattagcagccgtcctgcgtggaaggagactgttgccaagtattcattcccagcttaagatgtgttcatcttcttggtgatgtggtttgtgttttatgagaggtttaataaaagtggaactaaatgtacctcttaatgtaatgttgccacctctgtgttctctttccttttgtagtttaataagtatctttatggctttgtgaggctttcaattttaaggaaatgatcttttcccctagttctactacttgaatgatttaactagcttaagaaaattaattatgaatgaaaggtcggattagcgcgcgagacgggagacctagtcgatggaatctatcttattgattgcatatcgactctcaataatggataggtactgaagtatgaaataattgatgataccttcaaactagtttgcggtttaggttggaacatggtctgataacaaaagaacttccacaactataaaatctaggttggcttcttttactcggccttttgattcataaccaaagattcttggttttgtgaccaagaccattcgaatattggaagaagtgactgatctagcaagaaacactctaccagtaaaacaaagtagagagaggtaccctaagaataaaatcttgattttcatgaagctttttgagagaagcctctcagcttatttatggataataaagtgcatcatcagacgatacactgatttttttttaacatctctaccaaatttgacaaaagtgaaagaaaaaaggtttattggtctttcggggccaatgatggatagtataaattaaagtatagacactataatgaaagttggtttcgataattagatcactaatttttgtttaaggcatctaataattgcgttgataaagtaatgttatctgtcagaacataaattacaaaaataagagggctcattcgatcacgttttataaatactttcttgtacccaccaacctaattttaatcggctaacttaggttttccattgcctgatcattttttttttataaccaaaacaaaacaaagtgtaatcaagtctcgtaactattttattaaaatgtgttgattcaaaaaagtgagaatcattttggcatcttattacaacaaagtggggaatatctttaatcaaatatacttacaacaagtggtctctctctttattaggcttattaaaaatgaataaataacattgttaaaaaacacacacatgtaattcataatttgatgggacgttggaaatttcgtgctgagaaaagtcaaatatgacgtgaaacgttgccgccactagctagccgccacctataccgacacgtataaataataatatactaataagtgcgactgcgtttagcctactaccgcaaacgcagctaaccagatccctttttctctctcttttctttccctctataaaatcgcgtcctgctatagtgagtttagaaagaaactgatagtagaaaaaaaaagagagaagaaaaatg

SEQ ID NO: 15685 - DNA, 3003 bp, Unknown; identical to SEQ ID NO: 15684
  misc_feature (1)..( 3003): 2750-1469P.txt file - cDNA_ID_1014113; gDNA_ID_2214532; Annot_ID_184965

SEQ ID NO: 15686 - DNA, 3000 bp, Unknown; identical to SEQ ID NO: 10934
  misc_feature (1)..( 3000): 2750-1469P.txt file - cDNA_ID_1014176; gDNA_ID_2214466; Annot_ID_133024

SEQ ID NO: 15687 - DNA, 3000 bp, Unknown; identical to SEQ ID NO: 10934
  misc_feature (1)..( 3000): 2750-1469P.txt file - cDNA_ID_1014176; gDNA_ID_2214466; Annot_ID_182840

SEQ ID NO: 15688 - DNA, 969 bp, Unknown; identical to SEQ ID NO: 460
  misc_feature (1)..( 969): 2750-1469P.txt file - cDNA_ID_1014211; gDNA_ID_1591159; Annot_ID_150603

SEQ ID NO: 15689 - DNA, 3000 bp, Unknown
  misc_feature (1)..( 3000): 2750-1469P.txt file - cDNA_ID_1014297; gDNA_ID_2926250; Annot_ID_143018
aaccggcctaagcttgcctgtataggggtgggaaaaaatagaataacaccaaaaatgaaatgctcaaatgacaaaatcaaaattgatttccttcaaatatatctaactagactattgtttgtaaaaaaacaaaacagaaccgaatcgtaattgcacaaatgactaaaccatatattcttcccaaaaaaaaaagaccaaaccgtatacgaaaggtttgatttggtatcgatttaaaaagaaaatctgcaaaaccggaaagaaaaacaaaacaaaacttaaaatcaaattttccaaaactatatatgtaaattacaaagtgtagggaaatgtgaaatgttctagattcttacttgagttgaattttgaatgctgcatttgtagaaatgcaaatttgtgtacaagtcagaaccggtgtaaattaaattgacccggttgccgccagatttaattcgctgagagtactgtaccggatttggttctcttccggtttattccaaataatagttcggtaacagctttgattggttcgtttcttcagagtctggtttgggacttgggagggaagaagatctcgttccctctaagccatgaatcgtcgtaatcgtggctcttcttcttcttcttctagggtttcgaatacttatgggaaccgccagttctctgataacccgaggactggatccggcggcggagttaatgaatcctttcagagaagatccgatgcaccgcacaaacgaaacaatgaaaaagacgaatcaaaacataaagacgaagatcctgctgacgtttcattgattgtaggaacttgttcttctatgtgcccaggtaatcatcgaactacgttagctgcagataaattaccaattgacctgagattccgctaaaattcaaccctatcctgcacctgaattggatttgatctagttcttaggtcaattaggtactttcccttcatcaattcatgatccttccgtgcatcggcagttcagaacaaagaattatcttttgctaggggtttaggtaaaaaattacacttgaagtaccaaaaagagtgtgtacagcttcatctaatatgttgtttttggtatcaatagagagggaaagagtcacaagagaacgcctgcgtgatcttgcagtgtttgagaggctttatggaaacccctcaaaatcatccacagagatagctgtcaaaaaggtgcggttcacattgtacagctttgagttttcatgtctctggtgctaatgtgggaaactttcaccttcagctttctatatttgacatgtcgtatctattcttcgagagaacttgttattgaaagaaatttgatgttgaaattcttcatctatgcaaattagaatccataacttattggtcaagatgaatagtttgtactacttattgggagataccagctgctatgcaatgaggttcatttttttccaataccaacggcatttatactctctttctgtgttcttgctagttttgcagaaccctttcagcggcggatgttcaggcatcggatgtaagaccgctcccagttttagaagaaaccctgagataccttctaagtttgctcgactccaaggagcacccgtttgaagtggttcatgattttattttcgataggacaaggtctattagacaagatcttagcatccagaatttggccaatgagagagtgatctacctttatgaggaaatggtatggtttgacttttttctaactcttttctctttcctggttcggtaaatgaattacactgagcatgtctattttgtctttagaattgctttccttgggttttgttgacagtcgtttgtgtgtttaaccctctgctattaccaaaagaatatttgtaagtttaagatattttgacttaatgtgttgattgtagtttacatagtcgtaatcttaatcaggatgctcaaataggatcatttttcttcttttgtaattttcatagaaatatataccactctgattgatcatcctcttctgattggtaatcatcagtttgttttattttctatagagttccgttgatgttattattgttgactcccgaatggcttctgtaacaggtaaaatttcatgtcatatctcacgagaggcttcaaagttgtagtggtacaagtattagctcaatgcatcacttgaacatggagcagctagcaaaaactcttacctctttgtataatatatatgatgcaaatagaaaaccggactatatctacgaaaatgaagccgagttccgctcactctatgtgctgcttcatctcaatcctagtagtggagtgatggttgttttctggtttctttctccttattaatttgttatcatgtcaccttctttttgccattgatagaaatcgttgagattatgatctgcagggggaaccgctgtctttatggtttcgcaagttgacttttgctttggtaaaatccaaggaaatatgttttgtacgaaaccttttaaggtagtcttatgctgttcaatcatttgcgtatgagttatttaatttgaacaaatttaggaaatatgaattgaagtataatgatacctgtcttttctcttaattttttcttccagattatatcggatgggcaattacaagaacttcttaagtagaacagcttctgaggcgacatacttgcagtattgcataagtgaacatcatattagagaggtgagcttgcatggatataaatatgtagttatgtcctagctctcagggatagtctttgtgggactttaattggtagcggctaatgcaatatgaaatgaaaataaacatgagaaagatgatatagaataagtttgtactagaaaatattaccggtatggtaaagcaattatatagttacatggaatgatatttgcagtaaattgttcaaatatatgggtgtgtataaagtggctatacatggaatgatatttgcagtaaattgttcaattatgttgatcatttgcttaatgttttcatggtaaaagatg

SEQ ID NO: 15690 - DNA, 3003 bp, Unknown
  misc_feature (1)..( 3003): 2750-1469P.txt file - cDNA_ID_1014414; gDNA_ID_1620658; Annot_ID_47897
taaagtagagataacatgaaagaaagggaaagctaaaactctccagtcagtgggaatcaacagacagtaattatatttgaactcacatagctgaatgttgaatatcaactcatcaaaccgaaaaggcaaataataataagtattgacagaatctaacggaggtataccgatcatgagatactcttaatagcgttgaaagtcaaatgtctcagagtctaatttggacgaccaaaaggatcgtaaagcaacaacactcaacgaccatcgaagctaacaaatagctagcttcttataaagataaaaaaaaaaactcaaactttccaataaaaatgtcaactttgagcacaatgcaattgcagagaattcgaaaggttatgaaacattgatcaagtcaatcaaagggaccatcttcagggcatagagttaaacaagaaaaccagaaattgaacctacctggtaaataaaggatgcgactttagtcaaacccaatacaaaaattgagagaagaaatggtggaagcttccatttcacagagcaatcaatttcagaaaataaagagagcagcagaagaagaagatgaagacccacgttggtgctgctaatctcagatacaaacaatgggttcttataaccagagaatctaaaaaagatttgaaaagaagcatcaaaaataataagaaaatgagacaagttggtcatgttaatggtcaaaggaggatcagtcctgggtatatactcttttgttctctcgcctgaattttcttcattatcagagtgacagaaggagagtgtgttctaaaagaaagaagttttctccaaccttaggccttgactattagtttaatcatagtttatctcttaattccctaattatttggtatttaactacattcctcaacgccattattatatcgagtttggccatagttgcacgcatgatctatgtcttcctcacgtctttttgtctcctcccctttatgcatagtggagtggtacaagactttggtagagttcacctacaacattggttcgcatttgaaccgtgatttggccggttcaatttaaacgccggtttacgagttttaacctctggctgattaagtaaccaattttggcaaaatccaaagacgaaggcaaaactctctggctgatcaagaggattcgattaggctctttgaccttgtcaacaaagaccttttagaataaaagcattcaaagtatctatagaagctaaaaacattaaaagttacttatggaaaacgaattggcatgtcattgttccttgatgattgatgataaaaggtggaaaaaactcgaattttaaacttgtcttgtctcgacgctaaaatcttcatcccctgtagtcattcatcatgaaatattcgatcaggacacattattttcaaatttcaattatctaatatctctataaacttaaaatctattattattttcttatgttgattctccttttttccgtacgaaatgtcttcccactttcaaattggttttggagttttcatgctcttgagtctagtattcgtattactattgtgtattctgaatgtaaacgactagtgttcaggtcaatatatcaatgattattttctccattctcgttttgtttgatgcaaaaactaaagaacaaattctgtcaaaaatataagaatatatatcaatattgtgttgcactacataatattctttttactatgaatggccatctttttttaagaaaaaaatggacgaaaaaggcagagtttgtccaatgaaaactggataaatgacattagtaaatagcaaatgacatataatttatttataacttattaataggaaatttgcaaatgggtattttcttacaatttgtttcttttgttgtgtgtgtggtcaagatcttcttttaatacatgatcgagtgtagaaactctaattatatggcgatgatgaaatttgatagtggaagaacttttaaatatgataatttacaatgttgaattagatacaaatatcttaatttattaatggctgaaatgacttgatttattaattacataaaggtttaaatgcaaaagtaacctttgtgtacacatttgttttgaatagtttacaaagttactctaaaataatctgctttgtaatatgaaaatatcattttttggtaaagaatgatattgaaaacatgtttgcaaaacaacagacttacctgtcagatacatacacacatcaacttaaacatagtttgaccacactaaaaatgcctatgttcgttgacattcacgaacaaaagaaaaactatttacccataaattccgtgaaatttttgtctaactatgataaaaatccattattttggattaaaattcaaataaaatccaattgaaaacgctaccgaaactcaaaatgaaaaagacctacaaatatgttttggtttatataaacccatacatatgttacacggaaaaaaagaaaactactattacgtactggttttagacttttaggtttttaaccacatccaaattatccaaattgaatatgaaattttatgatttgatctatgtacacctttagttataataaagcatagtctcttttttttttattatgtttttatttcgtttttggaaactcatatgctgacgtaccaaataaatttgggatatataatccagtattgaaacaattattattataacaacagtggagtagtattttaatgcatttaatggaaaaaaagaaaacagagtaaacggataagcgtgtcgtggagaagaaggaccaaagcaaagtaaagaaagtcatatattcctgaaaatctataaaagacatttcgcatttatccacttcctcgattcaatcaaaactgcttcaagtaaaaagcctacgaaatagcatcggaccaaaagacaaactcaccgagtaaacatacgcaacctgtcgtgtaagtaaaaacaatttgatagtgatctctctatgtttggtggaggaagagggcctatg

SEQ ID NO: 15691 - DNA, 3003 bp, Unknown
  misc_feature (1)..( 3003): 2750-1469P.txt file - cDNA_ID_1014414; gDNA_ID_1620658; Annot_ID_163702
gttctaaaaagagtgttttgttcctaaagtagagataacatgaaagaaagggaaagctaaaactctccagtcagtgggaatcaacagacagtaattatatttgaactcacatagctgaatgttgaatatcaactcatcaaaccgaaaaggcaaataataataagtattgacagaatctaacggaggtataccgatcatgagatactcttaatagcgttgaaagtcaaatgtctcagagtctaatttggacgaccaaaaggatcgtaaagcaacaacactcaacgaccatcgaagctaacaaatagctagcttcttataaagataaaaaaaaaaactcaaactttccaataaaaatgtcaactttgagcacaatgcaattgcagagaattcgaaaggttatgaaacattgatcaagtcaatcaaagggaccatcttcagggcatagagttaaacaagaaaaccagaaattgaacctacctggtaaataaaggatgcgactttagtcaaacccaatacaaaaattgagagaagaaatggtggaagcttccatttcacagagcaatcaatttcagaaaataaagagagcagcagaagaagaagatgaagacccacgttggtgctgctaatctcagatacaaacaatgggttcttataaccagagaatctaaaaaagatttgaaaagaagcatcaaaaataataagaaaatgagacaagttggtcatgttaatggtcaaaggaggatcagtcctgggtatatactcttttgttctctcgcctgaattttcttcattatcagagtgacagaaggagagtgtgttctaaaagaaagaagttttctccaaccttaggccttgactattagtttaatcatagtttatctcttaattccctaattatttggtatttaactacattcctcaacgccattattatatcgagtttggccatagttgcacgcatgatctatgtcttcctcacgtctttttgtctcctcccctttatgcatagtggagtggtacaagactttggtagagttcacctacaacattggttcgcatttgaaccgtgatttggccggttcaatttaaacgccggtttacgagttttaacctctggctgattaagtaaccaattttggcaaaatccaaagacgaaggcaaaactctctggctgatcaagaggattcgattaggctctttgaccttgtcaacaaagaccttttagaataaaagcattcaaagtatctatagaagctaaaaacattaaaagttacttatggaaaacgaattggcatgtcattgttccttgatgattgatgataaaaggtggaaaaaactcgaattttaaacttgtcttgtctcgacgctaaaatcttcatcccctgtagtcattcatcatgaaatattcgatcaggacacattattttcaaatttcaattatctaatatctctataaacttaaaatctattattattttcttatgttgattctccttttttccgtacgaaatgtcttcccactttcaaattggttttggagttttcatgctcttgagtctagtattcgtattactattgtgtattctgaatgtaaacgactagtgttcaggtcaatatatcaatgattattttctccattctcgttttgtttgatgcaaaaactaaagaacaaattctgtcaaaaatataagaatatatatcaatattgtgttgcactacataatattctttttactatgaatggccatctttttttaagaaaaaaatggacgaaaaaggcagagtttgtccaatgaaaactggataaatgacattagtaaatagcaaatgacatataatttatttataacttattaataggaaatttgcaaatgggtattttcttacaatttgtttcttttgttgtgtgtgtggtcaagatcttcttttaatacatgatcgagtgtagaaactctaattatatggcgatgatgaaatttgatagtggaagaacttttaaatatgataatttacaatgttgaattagatacaaatatcttaatttattaatggctgaaatgacttgatttattaattacataaaggtttaaatgcaaaagtaacctttgtgtacacatttgttttgaatagtttacaaagttactctaaaataatctgctttgtaatatgaaaatatcattttttggtaaagaatgatattgaaaacatgtttgcaaaacaacagacttacctgtcagatacatacacacatcaacttaaacatagtttgaccacactaaaaatgcctatgttcgttgacattcacgaacaaaagaaaaactatttacccataaattccgtgaaatttttgtctaactatgataaaaatccattattttggattaaaattcaaataaaatccaattgaaaacgctaccgaaactcaaaatgaaaaagacctacaaatatgttttggtttatataaacccatacatatgttacacggaaaaaaagaaaactactattacgtactggttttagacttttaggtttttaaccacatccaaattatccaaattgaatatgaaattttatgatttgatctatgtacacctttagttataataaagcatagtctcttttttttttattatgtttttatttcgtttttggaaactcatatgctgacgtaccaaataaatttgggatatataatccagtattgaaacaattattattataacaacagtggagtagtattttaatgcatttaatggaaaaaaagaaaacagagtaaacggataagcgtgtcgtggagaagaaggaccaaagcaaagtaaagaaagtcatatattcctgaaaatctataaaagacatttcgcatttatccacttcctcgattcaatcaaaactgcttcaagtaaaaagcctacgaaatagcatcggaccaaaagacaaactcaccgagtaaacatacgcaacctgtcgtgtaagtaaaaacaatttgatagtgatctctctatg

SEQ ID NO: 15692 - DNA, 3003 bp, Unknown; identical to SEQ ID NO: 15690
  misc_feature (1)..( 3003): 2750-1469P.txt file - cDNA_ID_1014414; gDNA_ID_2926186; Annot_ID_140823

SEQ ID NO: 15693 - DNA, 3003 bp, Unknown; identical to SEQ ID NO: 15691
  misc_feature (1)..( 3003): 2750-1469P.txt file - cDNA_ID_1014414; gDNA_ID_2926186; Annot_ID_200665

SEQ ID NO: 15694 - DNA, 3000 bp, Unknown; identical to SEQ ID NO: 5544
  misc_feature (1)..( 3000): 2750-1469P.txt file - cDNA_ID_1014438; gDNA_ID_1620801; Annot_ID_168696

SEQ ID NO: 15695 - DNA, 3003 bp, Unknown
  misc_feature (1)..( 3003): 2750-1469P.txt file - cDNA_ID_1014565; gDNA_ID_1971816; Annot_ID_175975
gttaaatgaaatgaagagatatgatacaaaccagtggagatattctcgttggtgagggttgcttggactcggcacatctggatccaccataacctttattaaacccatcaacaaccgtataagagagaagatcgattatgaatatattaaagcaatcaagaaattaaatcatgagtttgattttttttttttaactcttgaaaagtgataacacacattaagacgaagaagttaaccaaaagttaatagaaaaagaagtaaagacgaagaagcttaaattagaaaaaggtaatagtaacattttccattaatataagggtatctaaaaatactggctttactattcagattcaaaagtcgttaaaataagtgtcaattaagatatttatgcttttctaaaggtatgtatcctagaataaaaaaactaaaataaaaataaaagcgaaacaaaatcaagttaaccgtctcttgaaaacgtaatatatataatcgagaaagattcaaaattgatttaaaataataatcaaaccaataacagttatgcatgcaagaagttagaggaaacgcagcaggtatatagatgaggctacgaaagaaaagaatgatcaaatctagttacgcttaaatttggatatatctaaggtttcttcgtcaatatatggagcttacgaaaacgaaagagtgagctacgaggaactaaatcaatgaagataagaggaatgaaggagagaagatcaccaaggtgtagaaatttctgaagtcgtctcctccaatctccactattggtttgttcagaacttgagaaggccttagatccaagccattagtaacctctctatggccataagtgaccttaagagagaccaacctcgtgaaaggatcaagaacatctccaacaacactgccgaccacaagaggatctctacgacttaaagacatatttatcttggatctcaagtatctcaatcaaatgttttgcttcttaccttatgaacccttacttgctattctttatataacgttttgggaattgcaataattagctatttagctttattctctccaatgaaatcattaccagggtcttttcgtgtatagtttcgagaatctacaactcgttcaacgtacgtatatcacttataattcatgttttttttttctttccttttttctaaatttatagtattcttattccaaaacccaccagtataaaacagaaataatcatattccaaattatacatcatccacttgtttcttgctagccactagtatgtaatttattctgacttatcattgtaacttcatgaactatttaaaataatgtcacaagcatataatatgctgcatatttgcgtacgtcacgcattttgcgtcacatgtcactcatttaaatagttaaggacactacattacaccgattatgtatgatgttaatgcattttagaataactccttcaacctaaaccatcatataaaagtatatatgctccagataaattgacgccataattgttcacatatctggttggtgtgtacatacgtactagactcttttttttcttttcttaatgtagtactaaacttaattaataccatcaaaaatatcaatttaacaaaacaaaccagtaaaacttttaaaacaatggagtaaatcaaataaaacaagtaaattaacaaatagacacaaggtaacagaagtataataacgacagaaaagtgaacaattggccaaaaaattcgttttcaaacgtgatttcaaaattgtctccaaatcttaaatgttgataaagtaatttttttaaaattcattatacctttcaaaaacaagtgtattacctaaaagctcaaccgtgtattcttacactccaaacaaatttagttccccaagtttggaagacaaaaatttctaagaaatttctgacaaaacacatgagaaataaaccgataaagacttctaaaaactattgcagaccagtttcatttgctgaccacaaaaagtcatgagaatacaattagctcagtgattcttgatatttctggtacctaacaaaaagaaaagtgtgtgaggttagatggctatgatttttgctctccaatttattgtccatttccccaatttgtaatatgaaatgcgcaaattactcttcttccgatatgaataagcaaacgaaaacatacgtgggacgttatgttcagaacatttgattaaagtttatatgcgattttcatttatttattatgaattttttgtttggcagcatgtacgatttttcatttaacacacaaatattatagaattttcattggttcaaaggggtagacaaaaaataatttaatattattacaccatttgcagaaaattagaaaatatatttttacccataattaattgatctatggacgtatgcttggcataaaaattcatatttaattagcagaagccaatcgctgcgtttgtatatacgcgtttatgaccgagaaaaaaacccttacgcgtcatgtaaaaaaaaaagaagcgtaaattacgaaaaacagagagataaatccgggcattgagattttggagatagagagagagaaaaatcgaaatctattgtctatctcctcaatttggattggattttctgcatatcatcgctctagctttcgcgggttttggattcgattccttacccttctccaatcggtaagaacaagctccaaagtttgttcctttttttcaattttcgccaattctgtaatctcatcattgtccttgtttgtttgtttgattcaacacacaattcttgttttgatttggatgcagaagtttttggctttgaattggatttgggtttcgttccaaaatcagctctttttgttaatcaggtgagtttttaggtatttgaatctccaattgcttccttgcaatgactaagtattgtgaaatgtttagggtttcatctgtgtgggtcttgttttgaagcaatttgtgtgtgtttggatgaaagtagcagatatg

SEQ ID NO: 15696 - DNA, 3003 bp, Unknown; identical to SEQ ID NO: 15695
  misc_feature (1)..( 3003): 2750-1469P.txt file - cDNA_ID_1014565; gDNA_ID_2926176; Annot_ID_199835

SEQ ID NO: 15697 - DNA, 3003 bp, Unknown
  misc_feature (1)..( 3003): 2750-1469P.txt file - cDNA_ID_1014815; gDNA_ID_1621125; Annot_ID_172269
tcggcgaagcatcgacgactaatttcgtggcggcgagaccgtcggcgaagaccgatgatgcagtgacgatgagaggttgtggttttgctaatcttgccttggttggtatagacaaagaagagcttcgagggagactagcgatgcctgagtatcttcgtatagctatgagagattgtatcaagaggaaagattcaacagagatttctgatcatttgttacttcctggaggcgccgccgctgatatggctcctcacgcgccaatggttgtgtttattaacccgaaaagtggtggtcgtcatggtcctgttcttaaagagaggcttcaacaattgatgactgaagaacaggtctgttttttaaaaaacaaaaactttttttttgtttgcaacttatgaaatgagctcactttacttaacttttgaaatgaacttgagatcatatttttgtttgaagaagattttaaatcttgatttgggagtttactttctttttgacttcactagatttgtggttagattgtgaatggaaacactctgttttggtttaatgagtataactatgagcctatggcattcttattgttctgacatcatcaaatgttctgttttttttttctctgtaattttgtttagaagaagttataaactgttttgtcttaaaaagactgtgattcctccttagttagtgagctcatgttaatatttgcaatgacaggtatttgatctcacagaagtgaagcctcatgaatttgtacggtacggtttggggtgcttggacacattggctgctaaaggagatgaatgtgcaagagaatgcagagaaaagatacggatcatggtgagtatctatttccaaagtattagttagcaattggaattagatttgctaagttagcggcgatgattgatgataggtagcaggcggtgatggtaccgttggttgggttcttggatgtctcggtgagcttcataaagatggtaaatcacatattcctcctgttggagttatacctcttggtacaggaaatgacctctccaggagttttagttggggtggttcattcccttttgcttggagatctgctatgaaaagaacattacatcgagcaactttaggttccattgctcgattagatagctggaagattgtagtgtcgatgccatctggagaagtcgttgatcctccttattctttgaagcctacaatagaggaaactgcacttgatcaggctttggatgctgatggagatgtacctcctaaagcaaagtcttatgaaggagtgttctacaactacttcagcataggtttggaatttggatacatgaagtaactttatctttcattgttcttaataaatttctacaaagttaaaccttttgaagtaatttggtattttcttgtgttgtttaggtatggatgctcaagttgcatatgggttccaccatcttcgcaatgagaaaccgtatctagctcaaggccctgttacaaataaggttgctatatatcagaatcttcattcttgtctaagtttcattaattagctgtttttttggtttgtaatgagattatgaatcacactcgtttcggttttgcagattatctattcgagttacagttgtactcaaggttggttttgcacgccttgtgtcaacaatccagctttaaggttagcattttctgtgaagagagtaaaccaaaagccttttctttactcaattcctgtctcttgttgtgttgacatgttgtggtaagatgaatttgcaggggactaagaaacattatgaaaatccatattaaaaaggcaaattgttccgagtgggaagagatccatgttcctaagaggttcatataaaactaatcttatctttgattaaaactaaaaaaatggcttcacttataatctctctggttttgttttggtgtagcgtaagatctattgtggtgttgaatctttataactatggaagtggaagacatccatggggtaatctcagaccaaaatatttagagaaggtaataatgttttattcagtacactaatcttaggttttattgctttctctacaagctttaacagaacgtgttcgggttttataacagagaggatttgtggaggcgcattgtgatgacggactgatagagatcttcggtttaaagcaaggttggcatgcgtcatttgtaatggctgaaattatctcagctaagcacattgctcaggtacaacaaaatacatccaaagtttctttataagaatcggtttaacctcggtttgatattaaaccgtttatcgttttaggcggctgcgattagatttgaactaagaggaggtgattggaaaaatgcattcttgcaaatggatggtgaaccatggaaacaaccgatgaagagtgattattcgacttttgtagagataaaaaaggttccttttcaatcgttaatgatcaatggcgaatgatcgaggaaactcttttcaagaagttgtaaaaggattaaaaaagcatgattctttatgtatttctgttccatcaattagtcaaaatagtgatctatgttgagcttttgctacggctgttgttgtgctagtgaagcatttaactttgtgtattttatcaaaaaaagatggttatttattcaatagtcattaatatacaattaagatataagcaatcatcttcaggtagaccttgaaatcttgtaaacatgattttgctgtctttaaactctgtttcttaagtcgtttttcagtgttttggagatagtagtaatgggtctaaaaagttaaataatgtttttgtggggagaaaaatgaaaatagcagattttcgaggatgggaagagtaaaacatatatttgagaagtcgaaaagtgtgaaatatttgttctgtctcgcgaggaagagagaaaaatcgaattagaaattgcaagttttagggttttagaaaatctatcttcttcactgagttttccagctccgaagaacacttgcaacttcaggcaattatg

SEQ ID NO: 15698 - DNA, 3000 bp, Unknown; identical to SEQ ID NO: 13506
  misc_feature (1)..( 3000): 2750-1469P.txt file - cDNA_ID_1014819; gDNA_ID_2214632; Annot_ID_136078

SEQ ID NO: 15699 - DNA, 3000 bp, Unknown; identical to SEQ ID NO: 13506
  misc_feature (1)..( 3000): 2750-1469P.txt file - cDNA_ID_1014819; gDNA_ID_2214632; Annot_ID_187997

SEQ ID NO: 15700 - DNA, 3000 bp, Unknown; identical to SEQ ID NO: 10731
  misc_feature (1)..( 3000): 2750-1469P.txt file - cDNA_ID_1014850; gDNA_ID_2213671; Annot_ID_182288

SEQ ID NO: 15701 - DNA, 3003 bp, Unknown
  misc_feature (1)..( 3003): 2750-1469P.txt file - cDNA_ID_1015175; gDNA_ID_2685560; Annot_ID_193469
gtgagtttcttttttttctttctttcgcttttatgctttgacagtttttgttttcacaacgttcaacattatcatagcatcttggcatcttggagaactaaagatgtgtaaatctcatcatttcatatcaagaaaataaaaggagaaaacgtgggaacattttacctttgtctaataatttgataaagaattgcatacataacatagacggttatatctacaagaaaaagaaaaaacacaacaaatagattttagtaagttagattttactcaaaattaaattacaacgtaattaaatgttagctgaaacatataaaatctaactttgtattctcttaagcagcaattgtgattgtgatggaaacacaaacaaagggagcatccataaaagccattcatgcttaaataagaacacacgtaaaacttcgacgtcataagacatgcataacggatacaatttttgaatggagttggtaatagggatttggaaaattcaaattatatagaaacttaagtgacatgaagtagagagaaatatgattttaattacacatgtttcaaacatatttagtgaaaagatcatatgtttatcctaaactgataacgatttagatatagtttcatttttggaagcaaatatgtaattttaaaatactaaatttctttttcctcatatctatcttacactttttatttcttattttgaaactgataacaagataagtcgttccaccagtttagttttggctattataatttggtaaaacatattttacacatacctgaagtttttatgtttacaatcttaatccaatttctatacaaaacttaagattcctttatacagtacgaactgaatcattaacccagtacttggagcttcctttaagcacctttttgtgaatatattaactaatcgtaaatgttttccattcacctaccataaacagttaattgattacttggagtaaaaaaaatcgatgacatacatgtaaaatatatgtaatatattgggcatcagggcatgtatatattgataagattcgagcataaaactcccacacctaactcaaagtcatcatcaaacctataagatcttcacttcttttaatttccttgtctttaatttatctttaaaaggtaattatatttctatctttctgtttaattatgccctttcaatcatttgagttactagtttctactaactgcagtttttacttttatttttctgtaaaaatctcacaaaagtacaaaggaagaaggacggacgagaagagaaaccctaacatgcatatgggacaaaataaaccagtccagaaaaagtctccattatatgaagaaagtactatcatttttgcttcaagtcaaagtatgtttgtgtgtaatatatttatacatttatagtaagtttctttcttggttccaaaattttgctaccagaaaaataaaggactacaattttttgtgaacaagtaaacatgaatagcgtcatgactcaacgacctattaaatatacatctctttcactaatattacgcttataattaacaatgttcaagggtggaattggatttttgcatttagattataagttctttcaaataattttattttgtatgtagatgaaaaacttgttgagatagagaaagagaagagacttgcgttaatagatgcatgggaagagaacgagaaggcaaaagctcaaaccaagtaagatttgccaatccaaatatatataatccttagttattaatgaggctagctagaaccataaagatcaacattgttctgcattcaaaattactaacaaatatctcacagaaatattgacgtgaccataattaaactcaaaacatacagttatatatatgtcgcaagaaatgcgagattacccgtttttatactttatattatcaatataatatttacattttgttattttgaatcaatgaaagcagggcttacaaagaactttgctcgattgaatcatgggaaaacaacatgaagacagctctagagttagatttgaagaaaatggaggtatatagagaattttagctatatcaatatattttctctttaacttcttttagctattcaatttatttaacgtttatagtgaaatacaaacaatatcatagaaaagtacttttatttataacttttattcatatagtctctcctctatgaatgcacatgtgtctatgttatatagttttactacgataatttatttctgttgatttttttttcaggagaatttacaagtggagaaaactgaattctcaaaaaaattcaagaaaaaaatacctgaaattgagaagattgcagaagccaaaagagaaaaaatagagaaacaaaaggagcaagaatctatcaaagtcgaaaaaataagtgagaagctaattgcaactccaaatgcctatccacccaataccaaaacttgtggatgtttctaaaacattttatatcctcctttcatgggtcaattctcggcccattaaattatcttattgggctttacttgtacccaaacatattaacgaaaaaatctgtgtaatgtgtgaactttcaagcatcaatgatcaatgttatcattcatgtgtgtatttaatatgactctatgcattcatatgcccaattaactcacaagcatcaatgatcaatgtatcattcatatgtgtatgtaatatgactctatgcctgatgcattcatatgctcaatttctctactaatacctttagttgttgtagataagatgttcgacaaaatgtgtaagtgaagttcttagaagtggttatgtattagtttgccttggtgtttggtgccacgtcatcaggtttggtcgtatcaagctagctgggtcgggttgagattcgggttaacgggttgacccaattacccattggtcgctttttctgatttcttctcttctcacagtgctctcacctaacgcagattcttcttctctaccatattcgttgaaaccagagaagatg

SEQ ID NO: 15702 - DNA, 3003 bp, Unknown; identical to SEQ ID NO: 15701
  misc_feature (1)..( 3003): 2750-1469P.txt file - cDNA_ID_1015175; gDNA_ID_2685560; Annot_ID_138178

SEQ ID NO: 15703 - DNA, 3003 bp, Unknown
  misc_feature (1)..( 3003): 2750-1469P.txt file - cDNA_ID_1015199; gDNA_ID_2910742; Annot_ID_193711
cttctacaagacgatctcgagccggcttctctgattctttctcttctcatggtaatttattaaaaactgcatcatcattaattaggttttataaagatctcattgacttgagattgtccttgtccttgtccttggcatgaatttcgttttctgtgcaacagatttatcatcattctgtcgagatgaagaagtaaaaacattctgccccatcaaatcggaatcagacgatgaattattaaggagcatagaagccgaaacttcatcttccgtggtgagcacgtcagactcatcagaaactcatcaccatcaccatcatcatcattcgtctggaggtcccaacaacggtcactggagaagaggtttcttccgtttgcttaagaaaggatcatccgcaatgccattcaacacgttcacacctctcaaaggagttccgaaactgaccagacggaagagcaaacgcataagggacaacatggttcccgttatacctgctcttgacactgatcacttgttctatttcaaaccctcctggaggaacttctctctccgagatattcagaccgcgacaaatgactacagccgtggtccggaaacctctaaagaacccttgttatacattttcaatagataaatactattttatgcagtgatgtaacatgaaaacatgtggatattatggcagaaaatctgatcggagaaggaggatatgcggaggtgtataagggacaaatggcagatgggcagatagtagcgataaagaagttgactagaggttctgcagaagagatgacgatggattatctgtccgaactagggatcattgttcatgtagatcatccaaacattgctaagcttattggttattgtgttgaaggaggaatgcatcttgttcttgagctatctcctaatggaagccttgcttctttgctctacggtgatatataattctcttttgtttgatgttttcaatgtcatctcaaactatgatttggatcaaaaaccaaacaaatatccttgtaccattttgtagaggcgaaggagaaactgaattggagcatgagatacaaagtggcgatgggaacagcagagggactctactatctccatgaaggttgtcagagaagaatcattcataaagacattaaagcttctaacattcttctcactcagaactttgaggctcaggtaattattactaagaaaaacctaagatcttcataccctagtttattgtcttttgaagttattattatgaaaaaagatttattttgaagtaatttattgatttttttcgaacaaatgttgactatagatatcggatttcgggctagcgaaatggctaccagaccaatggactcaccatactgtatcaaaagttgaaggaacattcgggtttggaatctctctctttgttaaagatcatacacactgattcacaaatatcatgtgttttatatatatctatcttacataatctcttatgtgttcatcgatcagttaccttccgccagagtttttcatgcatgggatagtagacgagaaaacagacgtatatgcttatggtgtcctgcttctcgagctcattaccggtagacaagccctcgacagctcacaacatagcattgtcatgtgggtatgtgatgtggctacctcttcaaccatagctagatagaatccttatctcgtactttcttcaaaatcctagaaggtttaaaactaattgatctgtttttttcattgtgaaatccctaacatatctatgtctttgtaggctaagccattgatcaaagagaacaagatcaaacaacttgttgatccgattctggaagatgactacgacgtagaagagttggaccgtcttgtcttcatagcttccttgtgtatacatcaaacctccatgaaccggcctcagatgagccaggcaagcatatcaaaatattcaattccatcatcaagttacatatacaggtgattaatttggtcacatatacaggttgtggagattctgaggggagacaagtgcagcttagataagctaagagagcgagaaaactccaaactccagaggacttactctgaagaactattggataacgaagaatacaactcgacaagatatttaaacgatattaatcgacacatggagaccgttctcggaacatctaaggattaattctgaaatgtcctacttgctaaatgcaagacaaacatttcattgagtccatatatttgttcactatagagtttgtatgactgctgaggattggagatgaatccgatcaggattggatattaagttagtagagaaaaggactgaaaaagttcaatattgccttaacatatattgtaccatggtgtatgtatttgatcatgatcatgacgttgtgttctttcctttttccccatatttgacttaaaactatcgttttgttattttcacagtatgaattttgttattcgtttcgtattcacctactatttagggatagacgcggatcagatatcctgaatttttatggtattcgtagaccgttttactatatttgtatcaacaattattcgatccactctactccaaataacaaaaagtatataaaaaaatcaaaattcaactccaaaaattacaatgtttcataaaacctaaaagaaaaaaaaatacaaacatataataaattctgccatttcaaaatttctcagataatcctttttcaaatgtttccactttaaacaatttctgtaaaattttcttaaaagagctgctaattaagaaggagccggttcggttcgattcggttcggagccaaagttctgaaagaaccgaaacgcaagcgacgtatgcgttttgtcgttatatcgttaggtagagcttaaagttgtcatcaccgttgaacactttcccgagaaaagctctctcatcttttattttcccggaaaaaaataattaaacttttactctcttccgatctcctttccttgtacatctagatccaagcggtatcgatg

SEQ ID NO: 15704 - DNA, 3000 bp, Unknown; identical to SEQ ID NO: 4137
  misc_feature (1)..( 3000): 2750-1469P.txt file - cDNA_ID_1015447; gDNA_ID_1620686; Annot_ID_48460

SEQ ID NO: 15705 - DNA, 3000 bp, Unknown; identical to SEQ ID NO: 4141
  misc_feature (1)..( 3000): 2750-1469P.txt file - cDNA_ID_1015447; gDNA_ID_1620686; Annot_ID_164618

SEQ ID NO: 15706 - DNA, 3000 bp, Unknown; identical to SEQ ID NO: 4137
  misc_feature (1)..( 3000): 2750-1469P.txt file - cDNA_ID_1015447; gDNA_ID_2926202; Annot_ID_141555

SEQ ID NO: 15707 - DNA, 3000 bp, Unknown; identical to SEQ ID NO: 4141
  misc_feature (1)..( 3000): 2750-1469P.txt file - cDNA_ID_1015447; gDNA_ID_2926202; Annot_ID_201923

SEQ ID NO: 15708 - DNA, 3003 bp, Unknown
  misc_feature (1)..( 3003): 2750-1469P.txt file - cDNA_ID_1015460; gDNA_ID_2214523; Annot_ID_184678
tctggacttgtgatgcaactcttggctggttccaagattattgaggttgacaacaatgttcgtgaggatcgtgccctcttgtaagtgttttcgtttcccattatgaagtattggcattacaatacgtgtttggttgaactgtttcaatgtctggtttgaattgattgagctgtttttggaaaaccctaaggttgtggtcgtgtgagttcttattctgtgtttgtacttattttgtaggaatggtgctcagaagcttctaggtattctgattgccattggtgaggctgttgcatatgttctttctggaatgtatggtcccgttggacagcttggtgttggaaatgccattctgatcatccttcagcttttctttgctggaatcattgttatctgccttgatgaactccttcagaagggatatggtctcggatcaggaatctcccttttcattgccaccaacatttggtaggtcaacttcttcctcactttaaaaaatccaaaatccttttcggtatattgaactcataagagtttatattgatgttctgcagtgaaagcattatctggaaggcatttagcccaactaccatcaacaccgggcgtggagctgagtttgaaggtgctgttattgcactgttccatatgctgataaccaagtccaacaaggttgcggctctccgccaagctttctaccggcaaaaccttccaaatgttaccaacttgcttgccacagtcttgatcttcctgattgtgatctacttccaaggtttccgtgtggttttgcctgtgagatcaaagaatgcccgtggacaacagggttcttacccaatcaagctgttctacacctctaacatgcccatcatcctccaatccgccctcgtctcaaatctttacttcatttctcaggtacagccattctttccacttcactgtatgggacgtatctccacaataacatattgttgacattgaattttcctcgtggtcaacagcttctctaccggaagttcagcggaaatttctttgtaaaccttttgggacaatggaaagaatctgagtacagtggacaatctattccagttagtggtctggcttacctcatcacagctccagcaaggtaatgcagcagtgtctttcattattcgttttaatcaattcaaagttggcatgcatcaactgagcttgatgaatatatgttactatgtggttgcagtttctctgacatggcagctcacccgttccatgcactgttctacatcgtcttcatgctcactgcttgtgctcttttctcaaagacatggattgaagtctctggatcttctgctagggatgtagctaagcagctaaaggtaataaaatcataacagcttgatgtatataacctgaatgttaacatggtgttggatctctgactctgaaaattaaatgtcacaggaacaacaaatggtgatgccaggacacagagaatcaaacttacagaaggaactgaacagatacatcccaacagcagcagcttttggaggagtttgtatcggtgcacttaccgttttggctgatttcatgggagccatcgggtcgggaaccggaattctgttggcggtcacgatcatataccagtatttcgagacctttgagaaggaaaaagccagtgaactcggcttcttcgggttctaagttagcttaaagaaggtgtaaactttgcctgaggcaaaaaagcagagcagaagaggctttagcttctgtgcccacctcaaacacagacaatttgtggtggcacttgggttagactacttttttttgttgttgttgaaacgaaattttctctttagtcatttatgtttttttgttactttttacaagttaaaaaacttatgtgatagacgcttttctaatgtatgtttctaggaatttcactctttgacccaaataaacaaatttacagttttgaatacaaagcaatttattatcttcttggttccagccaatgtgaaatgtttttcgtagcatactttgcattacatgcaagcccaaatggtgaaactagagaaacctccaacagtatggtgaaagtatacaaccctcaatgtggaacgatatggttatgagtaattgatctcaactactagctaatgcagagattggtaagtgtgactaattatgatccgttacagtgttacatactgctctttaatttcggcattcataacaacaaagattttttttgagatttttgccaaacgcgttttacaaatctttttgctcataaacttcttctttgttcttcacactcgcaaataaatttggtgtcgctgttctacacagtccaactctaaacacagatatgatatcttaggggtctttgatttgacgagccacactaattttgtagccatccatcgtcaagccacggaggcaatattcgcatccttacgacggaggagctcgcagtcactggaggcatttttgacaacaaccgttaatctctccggcgtcccgctaattcaaaccctagcttcaatttcaacagagctcgtctcgtgctttatctcttcctccaccgttccaaatttcaaagagactccaaacttgacctacctcaaattcatttgcaactcttgatatttcttgagaacgagagatggtattagttcttttgccaccgacgagaagagaataaagctttgagctcgtagcgttctctaggctaaacttttaaaaacactctccataaaaacttaacaagagaagaatggtgaagtaacgtggatatcagaataggcaagaaaaaaccaattataacttaataagaaaaagggtcctaatagcaaaattagaaaatagaggagcccaaaaccctagtcaaaatagatccgagggtcttaattgcaaaattaaaaaacagaggatctctcgaaaaaccttaaaccctactctcaagtctcaattcggcgcgacggactctttgttcacttttgtaattaagattctcttgtagtgtatatg

SEQ ID NO: 15709 - DNA, 3003 bp, Unknown
  misc_feature (1)..( 3003): 2750-1469P.txt file - cDNA_ID_1015524; gDNA_ID_2214569; Annot_ID_135022
ttttgttgttaattattttgctttaatccttttttcatatagttcgtaattataaatctataattgttttccgggatttttcgaagatctttaactgggtgcagaaaaagctgcaccaaaatgtcatcaaaggttagtttttttttttatagataatcaatatcagctttattttataaaaaaataacaaatttgctttattttccctttgtttattagaatatcgtaagcttcactaaaatagtagtttactttttgtagtagtatcatataggatcatgtggttccctgtttaataaatagttttatattaacgtataccacgttttcgctaaagcataaattttgtccaacctatatttattttcatatggtgaaagaaatagatggtgtgaggaaaaacgagaagaagaagaggaatgaaggaataagtgagattgagaagaacacgaaagctatattggatcaagttggtttagtggatgctcttgataattggttcgatggagttctcaccatcggcacatttggctttgacaccttgaacttcaaagaagaagatgaaatggatgatgatgaatgcgggagtggggatctcgactacgtcgtaattgatggcagcatcatcaagaacgtcgaccaagagtcggatcctcttatctccgttgaaaataagttttatgatcatcatgaagatgtcggggtacgtattctaatcagttctattgagtacatttttatgatcctcgggttgatttaccaatagagaagattatatagacatatgacatgcatatgcttcaattgttcgtgtgcgtttacgttgatttgattagtatattcaaatgaatccaaaattttaaaatctttaaactagtttaattgttattgtagaaataagttaactaaaatggaaggattatacgttcactaatctacaaaaatttgggttttctttcaaaatatgactttaaagacatataaatgcagaaattgcatttgagtcaatcgagatcgtcatttttttttctgtcgacaattaaggccattatacgcaaagaaataagtacataaaataagtacataaaattatatcttcttgactcttgatattgaatttcttgagatctttcgtattagaatctgtacgtacaggccgatactgatcactttggctcgatcaaaaccgctgaaacgccagctgtcacggcggcagccgaggccgagatagagccacagaagaagaggacaacacttgcggagcttttcatggaggaccacgacaaaggttatgacacgtggcattgcaagaaacccaataaccctaatcttgacggtgaggaggttaagtactataaacaaaacggttcaaaactaagcaagaggttctcgtttgttaagaagaagctggtcatgtcaaagtccaaagaggaagaaaacgacttacgtccaatcaagaaaatgcgtcaggtatttaaatttgttttagtcaattccgtaactatgaaacattgatgatgatggatatatgaacatgttacatgtgcctctatagctcaagggaaacaatgtcacgtcaagatctagataattattcgtgcatgttacaattacatcacttttgttgcttcataagtgtactcatatgtgagtaaatattcattcgatgtcaacaagtatagcatcattatatatgtgtatatattactgtagatgataaagaggatgttgaagaagaagatccatccagatgtcgatgcaactaaggctttaaagaaggacgttccatacaagccaactcggaactgtgaagctctcgagtcacattatcttcttaaaattcaaggtttgtatttcttaattattttggtttaggggttcgatatgatttatttctttcatttgctcgtatatatatgctttgtggacagattgcgtggcctagaagtctaagaacgacgacatcgtacaagagcaatctctggatctattgttctactccctataatatatgtgatttttttgttcttatttcagaatgtgttggtattgttatgactgttgagatgtattgctttcttcttacaaacattactaagttgttagtatttgttcctgttatgcatattgtattttattactatgtcatatgttttcttatttatacgtatatcaatgcatcgttctaaaatcgtggattgtcgtgaatctgtgatagtattccatcatgtctgctatagcttggtcagttttgaagaaatttcaaacctaaagtcataaactgataaaggactaaattatcctactcaaaacagaaagcccttttgtgcgttattgggcctaatcagaaaagtgattttgaaaaagggcctaatcagaaaagtgattttgaggctttttaaaagtttaaagtaaacaaaagaaaattgaggcttgacttttctttctttttttgacttgttttcttttttcctttttcttataagagaaaactaaaacgtgaaagagcttcaccaacctgaggtcgctgaccacttggaggcattctcagctaccaatccattaacttacaaactccatattcttcacgttttactatggtaggtacctttttttaaccttgttcgtaataacaattttatacgaaaagaatagtattaaacttcaacaaaaacaactatgtatattaactggtcagatatacattgctttgttcccttacatcttcaaagagctaagattaaactatttaccccaaataagactgtaatttcatcaaaatctagtaataataatattcaacagcttacaatataaacataacgcgtgtggtctccataagctacgcactgtcttttcatcggttcgtagaaactagaaactcttcccctcacgatcttgctttctttattttgcttcaaccctagtttatttgaagtctctatataaagttctctgtttcaagttactttctcagcacgagcaaccaaaagtaatcatatg

SEQ ID NO: 15710 - DNA, 3003 bp, Unknown; identical to SEQ ID NO: 15709
  misc_feature (1)..( 3003): 2750-1469P.txt file - cDNA_ID_1015524; gDNA_ID_2214569; Annot_ID_186111

SEQ ID NO: 15711 - DNA, 3000 bp, Unknown; identical to SEQ ID NO: 10304
  misc_feature (1)..( 3000): 2750-1469P.txt file - cDNA_ID_1015752; gDNA_ID_2213642; Annot_ID_132292

SEQ ID NO: 15712 - DNA, 3000 bp, Unknown; identical to SEQ ID NO: 10304
  misc_feature (1)..( 3000): 2750-1469P.txt file - cDNA_ID_1015752; gDNA_ID_2213642; Annot_ID_181294

SEQ ID NO: 15713 - DNA, 3000 bp, Unknown; identical to SEQ ID NO: 12602
  misc_feature (1)..( 3000): 2750-1469P.txt file - cDNA_ID_1015820; gDNA_ID_2214562; Annot_ID_134882

SEQ ID NO: 15714 - DNA, 3003 bp, Unknown
  misc_feature (1)..( 3003): 2750-1469P.txt file - cDNA_ID_1015833; gDNA_ID_2936565; Annot_ID_194615
cagcaacaaaatagttcgaacccttttggatttggtgtacaaagtggtggttccagcagaccgaatcagttccaggtcaatttgtttttttcctcttttaagatgcaagtattgctttgatagaatgcaagttatcgttcggctttggatgagaaaaatggtgcatcttctttaagaaacgaaagcattttgcctgttgaatgaatggtgacatgatgatgcttttgcaaatcagaatacttggtcacgaacggcttctacacctactggtggtggtgctgctgcttctacacagcagactggtaaacagacgcagccggcagatcataagtgagtgtatatatgtttacatatgcttgttctatcaattatcatccttttagccgtttgtttctttggaaatttactgtttctctcttggttactatacaaagatgcacagatcctgctgcgtgtaagcgggtaatgcaagacgattttaagaatgagagacccatgtggaagctcacatgctacggccactggaaatagtatgtattacttcatttggtttagcatccttgatctttatccattctttataaacgtgtctgattttttctatcttttttttcttctagttttccatgtgatgttaccggtgatatcagctatgaagaactacgtgcagtggcatatgaagaagctaaacgaggaatacctctacagtcgattgtgagattaacctttcttgtgtttgttatactttacactggttttcatttcatactgataagacataagttgatttcctcttttcctggcttattatggtgcattatataggttgaaagggagaggaatctgcaaaattccaaaatagccgagtttgaaaactttctacggaatccatacaaaggctctgttaccgccaatcaaagcccgtttgctgcaaccactcctagtatcttccctcagtccagtcagatcaattccccttctccagcattctctggctttaatcaacaaactgcattctccaataccaatgcgggtggactcaggtatcaacttttgtgggatttctccaattttcatatcccaaaaagtttgtgttgccttcaaactaactctcggtttccatttttcctcgacatagttcatctggacctccgaatgcctttgcaagcttcaatcaacaaactacattccccaataccaatgctggtggagtcaggtactaactttctccatattccatattcaaacaagtttgtgttacctttataacctcttggttcccatatttctctttggccaactattcctctgcatagttcatctggacctccgaacccctttgcaagctttactcaacaatcaaataatcaacaaactgcattctccaataccaacgctggtggtctcaggtatcaacttttgtgggctttctccattttccaaattccgtaaaggggtgccttcatgaaaactctgtttccatatttctctctggccaatgattcctctacatagttcatctggacctccgaatgcctttgcaagctttaataaacaaccaaatgctttcagcgtcaacactcctcaacctgttccttcaggtactacttctaatgttaaactttgcttaaaggccaagagactcgccatcatctgaaacctcttttgcaaatgatcacaggtccctctggtttccaaaccaatccatcaacaacattcaaaccagcatcatttggacctggacccggatttgccacaactccacaaaacaataacatctttggtcaatcaactccaacaccggctacaaacacttcccagaacaatcagaccgcattcaacttcaatgtccctgttgcatcttttactgctcctgctataaacacgacaaatacatcttccgggtaagtcctcaatctgtttccaggttttttctatagttaaaaaccgttgttgaacatgttgacagagttaatcaaaacatactatgatgtttcatacgtttctaacttgaatcatttgcggcagaaccgagctgcaaataggtggtgatcctgttgatagtagtatctggctaaaggagaaatggaatccaggggaggtaaattgctcaaaactaatcatttaagttgtttccaaaaaatttattgctcttagattaatttgttgcttttgttgtgcagattccggaacaagcgccgcctgatgcctttgtttaacaatatgaagaatgtcattgaaacaattacgtataggccagagtcgcaaattggcgcagaagagttgttttttcttggtcatctcagatttgtgaccaatgtagtttctccacaaaatccaaagttttgaaccttaacaataatttcaatgcagataacagaaactataaacaagagaattctaaaaatcaaatctttctcaccaagtgaacatctttcaactacaacaacattcccacaaaatttgaaagcttttcttaattccactacaattttttgatcaacttcaaacaacgatctcgctggattttctctttttcttactcttcttcctctcttccgaacccatctctcgatgactcttcctcttcttcttagagcttagcttcgtctcctttgatttaatctccctatggatgctcttcaattcaataaaggcaccggaagctcgtcgaaggtacgcgctaacatcttgagaggctccattctcagaagaaacgaatccggagagaagagtagccgcctttgatagagagattggctttgcactgttaactcttccggtgaccgtcttcatcggaacaacaagctcaaggaagatggtcacaaattagggcaagttgaaaaataaataaacctttttatacatagaattgaaaatgggcctagtggaaaaagcccaataagaaaaaatgtcatcggtgtctctcttataaaggtaaagcgcagtgtcactcacagagtcaacaactctctctgaattaagacgatggcggctgcaatg

SEQ ID NO: 15715 - DNA, 3000 bp, Unknown; identical to SEQ ID NO: 8401
  misc_feature (1)..( 3000): 2750-1469P.txt file - cDNA_ID_1015869; gDNA_ID_1971791; Annot_ID_58039

SEQ ID NO: 15716 - DNA, 3000 bp, Unknown; identical to SEQ ID NO: 8401
  misc_feature (1)..( 3000): 2750-1469P.txt file - cDNA_ID_1015869; gDNA_ID_1971791; Annot_ID_175569

SEQ ID NO: 15717 - DNA, 3000 bp, Unknown; identical to SEQ ID NO: 8401
  misc_feature (1)..( 3000): 2750-1469P.txt file - cDNA_ID_1015869; gDNA_ID_2926197; Annot_ID_141336

SEQ ID NO: 15718 - DNA, 3000 bp, Unknown; identical to SEQ ID NO: 8401
  misc_feature (1)..( 3000): 2750-1469P.txt file - cDNA_ID_1015869; gDNA_ID_2926197; Annot_ID_201554

SEQ ID NO: 15719 - DNA, 3000 bp, Unknown; identical to SEQ ID NO: 3666
  misc_feature (1)..( 3000): 2750-1469P.txt file - cDNA_ID_1015955; gDNA_ID_1620655; Annot_ID_47837

SEQ ID NO: 15720 - DNA, 3003 bp, Unknown
  misc_feature (1)..( 3003): 2750-1469P.txt file - cDNA_ID_1015955; gDNA_ID_2926209; Annot_ID_141883
cggagtttgaagaaaacgtgcattatacttcctctgttttgtgaaccaatcgatttagcttcgtctttgttaagctcaagatctctgatgaatataggttttcttgaaaggatccatgaccaaccccattcccaccattctttcacagagcttcctgcttgttctcccatggcggaaacagatttggatctcgggaatctagctgcgatcgctgctggttggtttgagaggttgagtgatagagaagagagacgacggcggatgagaccaggctcatcgtcggcggtggctgctgcattagggcgttgagaaacggggagggaagtgggtttacgaatctggagagtctccatcattgagctcataacttctttgttcttctttgtgttgagagagattgaagaagaagatgaatgtgaatgtgagagattgattagtgaacacagctctaacacaggctggggttttattccactttatttttgtggggtccatttacttttatgcccccagccaattacattcattttgttgttgctgtttgtttttgtattaaataatttgtattgttatgtttatttgttgatttgtatagttagttgttttgtgtatgaatgaatgcacctataatattggaaatataacaattttatttttagtgaatatagataaacattgttttcaggtagggttccatcacaagtcacaatacaaatttaattaaaaaaattctttgtaattttattttaaaggttattttcccagtacagaaatctgttgaaattgcattggctttgatttttttataataaaaatcagaaaaatgtagcagaatctgtccaatgtccatagccaagcaaatttatgttgacagaaaaaagaacaatcacatacaaaaatccaaaaaagaaaaaagatatcccagacgggcctaatcaggtattagactaaggcccaataaatttcaagcccaaaatcgaaattaagcactttattctttctttttttaatagctatcgagtgtgtatgttcggagaagagatcacagagatctgagagcttgaaacaatggagtaccggaaaatcaaagatgaggttcgttacttccatttcactttgtctttctgctgcttttaatttaagatttggactctctttaatgctcaattttgttccgagcttcttcaggacgatcatgacgttgcttctgatatcgagagtgtgaaaggaaaatctcataccggtgagatattcttttctcaaattccacttctcgtgttctttaatgtgctcattggtgctttgatttgacagttgcttcgagtaacattgcaatggctactctgggtgttggatccagtgaacggatcaactggaaacgaaagtaagtttttttcctttgttcattttttttttggaaaattcaagttctttaaatagcttgtgttgaattaggggtgtagtaacatgtgcactgacgattctgacgagttctcaagcgatacttatcgtgtggtcgaaacgagctgggaagtatgagtatagtgttacaaccgccaactttttggtgagtttcatagatgcattaaattgagtgtactgtatgtgttgcaagcgaggccagttttgtgtggtttttaatctctgaatcatgatgatatagtgattttgtttactctttggtggacatcaggttgaactctgaaatgtgcgttatctcttcttgctttgacaaggatatggaaaaatgaaggtgttactgacgacaacaggtagcgaattattttgttactcaatctgttgttatcagttttagagaaatttccatgagttttatatctaattcctctttgaacatgaccgtagatagctcactgaatttttcgttactgatacccaaatcctgtctctataacaggttaagcacaacatttgatgaagttaaagtctttccaattcccgcagcattgtatctttttaagaatttgttacaggtggggtgtcctgagtttgttatttttttctgtggctttggtcgatttttcttaacttatgtttttcatgttaatatgtctctaactacttgttgtgtcaccttttacgtggcagtattatatttttgcatatgtagacgccccaggctatcagatattgaagaacttgaacatcataagtaccggtgtcttgtacagaattatactgaagagaaagtaggtttttttaatcatccaaatggatttaacagcttccaatgaatagttgttctggaaatccatcagtgagctgtttcagtttccttcaattcttgcaagtgtgaactgctttgcttactatcttctctaacagattgagcgagattcagtgggcgggtttcattctattgtgttgcggatgcaccactgctcagttgaattcaaagtaaaactttacccttgattttcatatgaattctattaaattgagctttaacgattcttgcatatgatgcgtaacacacaaaagctcatatccggttcctgctctgtgaactttcaggtctctgctgatttttccaatatatgtctcatatttgaaattgcttttgcagttctgatcgtgttcttcagacatctcttcctggctggactatggcaattgtaagctgttagccccctttgcaagctaatatcaactaagagttgtgaagcagctttcatgtccacatcaattaatataatcactcgttgtttctaggtcatggctcttttaagtggtttcgccggagtgtacacagaggtgggatattaggactgtatactgtaaatactcaaagctgatttggtttcttttctctgtgtgtgtgtcaacactaatacagtataattggttccttccattgataaattaacttatgatatataaagcttataaaggttttgctttccattttggcaggccattattaaaaagcgaccttcaaggaatataaatgtacagaacttctggctatatgtctttgggatg

SEQ ID NO: 15721 - DNA, 3003 bp, Unknown
  misc_feature (1)..( 3003): 2750-1469P.txt file - cDNA_ID_1016101; gDNA_ID_1620618; Annot_ID_46949
gagatgtggtgtggtctgagtttatgactgagtaatctaaagatccttgctgatgtaatggaaaagaccgaaaatccgccatgattgactgcttcgagtcaccttctggaggacctgtgaagtaagcctgaaactagattccaatatttaaccagtcaataaatgcggtaattaaactcttggttagttcttgggatgaaaactgactattattcacctgttttgcggataaatcatcgatatgacactcaagttctggatttatgacagagagtttcatcgacaagaactcgacttgttgttgcagagattggacatagttgatgatctcatcaagcataccagcttttccagtaactttgttgcatccaggaacaatatcttgtagacatttcatcttcttgcttatcttttctcttcttgcctgccaaaatcccacaaatataaaaccactcaaatctctaatgaaagtaatttctctgaaacctatttaacaacaacactttagttaattaccctctctgctaagctatgtctgtcggtggcttcacctcgtctagccctaacatgaatgtaatctggtttctgaatttctgaagatgtctctgtgttactcatgtttgatttccctttcatgcttggctctgtttcatcctctgctttgatcttcttcttctctctcttttctgtcttaccctaaaaccaatagttaaaacgatcagaaacaatgtttcaaacaaaatctaaactctaatactcaatactttcttgagctacaaacctctggttttctcttgttctgcaaggtaatggctctgctgtgtccattattcttcactggctccatatggaagctacttgtcctagaaatgcagccatcagtagtatcataatccggtccgaattcgggaaaatgtctgaaactctgcagctcatcattgttgtttcccaagtaactctcaactcttttgagctcttctctcccatctgagccaagtatctgaagaaactcaggtgaaaccatttgttgctgttgcagccacttaagcctatcaagtacagacaagtccatgaagagaaggtaaaaaaaaaactttaaaaggctcttatcttttctttgagggggttaaagcaaaagagaaaaagagagagttaagttatatatgtgtggaagaaaagtaatccattagatataattattcttagctttaaatagaaagcaacattgacccacacacatgagattcgaaatctagtgagagagggacaaaattgataaaagtggaggaggttggggacaaagaaggtgagatgagaagttgtggggtctaattgacataacctaccatgtggtcatgtccttatgaacatgagatgaggagtctcttaagttagtctcttttgtgtcttttctctgtgtttttttttttccttttggcctttcaagtttttgagaggatctttttgtttggcaacaataatcaaactttgtaaaacttaaggttcatgagggtattatcatataaatatcctcttttgtaaaatcaaatcattgagtttttggtaagacaaccttctaattgtaccaatttgttttgttagagagagagagagagagggtctttcttaggcttgaaggtggagaatgtggggaatgtgaattatgaatcttaacttgcaaatgaatagaaacaatggtttgaatcatgagtgatatcatttcaatgtcttgttgtgaatctatacgtgatccttgtgacgtatgattactacccttcatcaatccatagattacaccaataatttaagtggatttcatatattagagagatggcaactcgatgaatatatgacatattataatatcacatattataattcataactgatagggacacaaaataagcgacctaaagaagaaaatgggtttgaagataagtgataggaaggtaggcgacaccattgcttttgatctaagtgtttggtccctatactttctttttttccctattaattatatatctatacattatctataatgcgtgacataattcaagagaatcaatactatttcgattttttttttttgaagaacttgaaaaaatatatccaaaattagaccgatttcaataacacaccgtacaggttgctttgaggtttccatttcattggttctttgggaaacatcaataacaagctgcttatgagatgagaagagtaaatgcttcaaatgccaaaatacttaacgttgagagtatctgttgttttttgcaatttccacaaaaaagttttagaaagtttttgattcaatgggtttcaggatgtattcttttgtaaagaagtttgtgtcaatgcattcatgttgcaattaggcattttgtcgaatcacgaaaacggaaggaacactcgtattcgtcacatcaaagtataaggccctagatcgtgtgtatcacgtctctaatttgcttacttacaaaactgtgttgtttgctcttttcactaatgatggatctatgtgataacaggaatcacattccacgtcaattatttctgtttacttcaaaagaatgtcacacctatgcaacagtgagacaagatctgaggaagagagttagagaacatgaaatttaagaaagagtgcttcaatatcttgttgtgtacaaatcaatagttctgtttgataatatcaacttgacagcttttgtcaaaatgatgagtaaaaaatcaggatctttgggacaaatacggctgaaccggccggtttagctaagtcgaaattaccggcctaatcgttaaaccataaaaaccgcaactttcagaaacactctgcttcgtcgagcggattcgacttgtctggctcaggggtcgccacaactctcccgcaagttcacacatacactcggtgctcaaaaagtttgtcctttttgcatctctcagttctgaaatatctggttctcttgtccttgaaaattttacgaggttgttctctgtgaataatcgatg

SEQ ID NO: 15722 - DNA, 3003 bp, Unknown; identical to SEQ ID NO: 15721
  misc_feature (1)..( 3003): 2750-1469P.txt file - cDNA_ID_1016101; gDNA_ID_1620618; Annot_ID_162133

SEQ ID NO: 15723 - DNA, 3000 bp, Unknown
  misc_feature (1)..( 3000): 2750-1469P.txt file - cDNA_ID_1016101; gDNA_ID_2926211; Annot_ID_141994
atgtggtgtggtctgagtttatgactgagtaatctaaagatccttgctgatgtaatggaaaagaccgaaaatccgccatgattgactgcttcgagtcaccttctggaggacctgtgaagtaagcctgaaactagattccaatatttaaccagtcaataaatgcggtaattaaactcttggttagttcttgggatgaaaactgactattattcacctgttttgcggataaatcatcgatatgacactcaagttctggatttatgacagagagtttcatcgacaagaactcgacttgttgttgcagagattggacatagttgatgatctcatcaagcataccagcttttccagtaactttgttgcatccaggaacaatatcttgtagacatttcatcttcttgcttatcttttctcttcttgcctgccaaaatcccacaaatataaaaccactcaaatctctaatgaaagtaatttctctgaaacctatttaacaacaacactttagttaattaccctctctgctaagctatgtctgtcggtggcttcacctcgtctagccctaacatgaatgtaatctggtttctgaatttctgaagatgtctctgtgttactcatgtttgatttccctttcatgcttggctctgtttcatcctctgctttgatcttcttcttctctctcttttctgtcttaccctaaaaccaatagttaaaacgatcagaaacaatgtttcaaacaaaatctaaactctaatactcaatactttcttgagctacaaacctctggttttctcttgttctgcaaggtaatggctctgctgtgtccattattcttcactggctccatatggaagctacttgtcctagaaatgcagccatcagtagtatcataatccggtccgaattcgggaaaatgtctgaaactctgcagctcatcattgttgtttcccaagtaactctcaactcttttgagctcttctctcccatctgagccaagtatctgaagaaactcaggtgaaaccatttgttgctgttgcagccacttaagcctatcaagtacagacaagtccatgaagagaaggtaaaaaaaaaactttaaaaggctcttatcttttctttgagggggttaaagcaaaagagaaaaagagagagttaagttatatatgtgtggaagaaaagtaatccattagatataattattcttagctttaaatagaaagcaacattgacccacacacatgagattcgaaatctagtgagagagggacaaaattgataaaagtggaggaggttggggacaaagaaggtgagatgagaagttgtggggtctaattgacataacctaccatgtggtcatgtccttatgaacatgagatgaggagtctcttaagttagtctcttttgtgtcttttctctgtgtttttttttttccttttggcctttcaagtttttgagaggatctttttgtttggcaacaataatcaaactttgtaaaacttaaggttcatgagggtattatcatataaatatcctcttttgtaaaatcaaatcattgagtttttggtaagacaaccttctaattgtaccaatttgttttgttagagagagagagagagagggtctttcttaggcttgaaggtggagaatgtggggaatgtgaattatgaatcttaacttgcaaatgaatagaaacaatggtttgaatcatgagtgatatcatttcaatgtcttgttgtgaatctatacgtgatccttgtgacgtatgattactacccttcatcaatccatagattacaccaataatttaagtggatttcatatattagagagatggcaactcgatgaatatatgacatattataatatcacatattataattcataactgatagggacacaaaataagcgacctaaagaagaaaatgggtttgaagataagtgataggaaggtaggcgacaccattgcttttgatctaagtgtttggtccctatactttctttttttccctattaattatatatctatacattatctataatgcgtgacataattcaagagaatcaatactatttcgattttttttttttgaagaacttgaaaaaatatatccaaaattagaccgatttcaataacacaccgtacaggttgctttgaggtttccatttcattggttctttgggaaacatcaataacaagctgcttatgagatgagaagagtaaatgcttcaaatgccaaaatacttaacgttgagagtatctgttgttttttgcaatttccacaaaaaagttttagaaagtttttgattcaatgggtttcaggatgtattcttttgtaaagaagtttgtgtcaatgcattcatgttgcaattaggcattttgtcgaatcacgaaaacggaaggaacactcgtattcgtcacatcaaagtataaggccctagatcgtgtgtatcacgtctctaatttgcttacttacaaaactgtgttgtttgctcttttcactaatgatggatctatgtgataacaggaatcacattccacgtcaattatttctgtttacttcaaaagaatgtcacacctatgcaacagtgagacaagatctgaggaagagagttagagaacatgaaatttaagaaagagtgcttcaatatcttgttgtgtacaaatcaatagttctgtttgataatatcaacttgacagcttttgtcaaaatgatgagtaaaaaatcaggatctttgggacaaatacggctgaaccggccggtttagctaagtcgaaattaccggcctaatcgttaaaccataaaaaccgcaactttcagaaacactctgcttcgtcgagcggattcgacttgtctggctcaggggtcgccacaactctcccgcaagttcacacatacactcggtgctcaaaaagtttgtcctttttgcatctctcagttctgaaatatctggttctcttgtccttgaaaattttacgaggttgttctctgtgaataatcgatg

SEQ ID NO: 15724 - DNA, 3000 bp, Unknown; identical to SEQ ID NO: 15723
  misc_feature (1)..( 3000): 2750-1469P.txt file - cDNA_ID_1016101; gDNA_ID_2926211; Annot_ID_202639
